United States Patent Application Publication US 2011/0183924 A1 - sequence listing, part 177

SEQ ID NO: 438872 - DNA, 3285 bp, Homo sapiens
ctctcgcgactccttcgcgccggcccttccgcgggtgatcagctggtctgcgctcccctgacgtgggctggggcacgtcaccgccgaatggcagcctccagaaagccaccgcgagtaagggtgaatcaccaggattttcaactgagaaatttaagaataattgaacctaacgaggtgacacactcaggagacacaggtgtggaaacagacggcagaatgcctccaaaggtgacttcagagctgcttcggcagctgagacaagccatgaggaactctgagtatgtgaccgaaccgatccaggcctacatcatcccatcgggagatgctcatcagagtgagtatattgctccatgtgactgtcggcgggcttttgtctctggattcgatggctctgcgggcacagccatcatcacagaagagcatgcagccatgtggactgacgggcgctactttctccaggctgccaagcaaatggacagcaactggacacttatgaagatgggtctgaaggacacaccaactcaggaagactggctggtgagtgtgcttcctgaaggatccagggttggtgtggaccccttgatcattcctacagattattggaagaaaatggccaaagttctgagaagtgccggccatcacctcattcctgtcaaggagaacctcgttgacaaaatctggacagaccgtcctgagcgcccttgcaagcctctcctcacactgggcctggattacacaggcatctcctggaaggacaaggttgcagaccttcggttgaaaatggctgagaggaacgtcatgtggtttgtggtcactgccttggatgagattgcgtgctcttcattgatggtgaccgcatagacgcccccagtgtgaaggagcacctgcttcttgacttgggtctggaagccgaatacaggatccaggtgcatccctacaagtccatcctgagcgagctcaaggccctgtgtgctgacctctccccaagggagaaggtgtgggtcagtgacaaggccagctatgctgtgagcgagaccatccccaaggaccaccgctgctgtatgccttacacccccatctgcatcgccaaagctgtgaagaattcagctgagtcagaaggcatgaggcgggctcacattaaagatgctgttgctctctgtgaactctttaactggctggagaaagaggttcccaaaggtggtgtgacagagatctcagctgctgacaaagctgaggagtttcgcaggcaacaggcagactttgtggacctgagcttcccaacaatttccagtacgggacccaacggcgccatcattcactacgcgccagtccctgagacgaataggaccttgtccctggatgaggtgtaccttattgactcgggtgctcaatacaaggatggcaccacagatgtgacgcggacaatgcattttgggacccctacagcctacgagaaggaatgcttcacatatgtcctcaagggccacatagctgtgagtgcagccgttttcccgactggaaccaaaggtcaccttcttgactcctttgcccgttcagctttatgggattcaggcctagattacttgcacgggactggacatggtgttgggtcttttttgaatgtccatgagggtccttgcggcatcagttacaaaacattctctgatgagcccttggaggcaggcatgattgtcactgatgagcccgggtactatgaagatggggcttttggaattcgcattgagaatgttgtccttgtggttcctgtgaagaccaagtataattttaataaccggggaagcctgacctttgaacctctaacattggttccaattcagaccaaaatgatagatgtggattctcttacagacaaagagtgcgactggctcaacaattaccacctgacctgcagggatgtgattgggaaggaattgcagaaacagggccgccaggaagctctcgagtggctcatcagagagacgcaacccatctccaaacagcattaataaatacctccccggttttgtttttgtaaaatgctctggaggaaggaagaaacgtggcagatccctgacatctttcccctttcctttccttcttccctacctcccctttttactttagactttaagaagaacagaaaatcttcttatcctctttgatattttattgcaaacactcagtcttttatgattttttaattgttgagaacaagccaagaataaaattgctgcaccagaaggagggtccctccaaagttgaacacttggtgaaaggaagatgccccgacttctttggccagtgatggggaatcagtgagtgctccatgatggtcatgttccaggtgctagtacatcattcatgatcaccttaatgctcatgagactatatttatgatcagtgaataaaaatgtcagaactgtgaaaaaaaaaaaaaaaaaaaaaaaaaaaaaaaaaaaaaaaaaaaaagggggggggggggaaaaaaaaaccccgaaggggggagcccaaaaaaagagcgagcacccgagattatgctgggaaaaaggggggcccaaaaggggagagggagaaaaaaaaagaaacgagcgaagggggcgagggagacaaaaagggggaggagggaggaaaaacaggggacaagggaggaaatcttggggaaagaggcaccaaaaccggggggggggagacaaagggggacaacacacacaacaggaaaatacaaccgcccaggggacaaacaacaaaattagcacacaggcgacacaagcgcggagaaacaaaaaaaggcaacaacgcaaccacccaaacaaaaaatagcgcaaacaagaaaaaacaaagagacaaaaaaaaacccagggcacagagagtataacaaacccacacagcacagacagacaccgcacaccgagccagacagacccgcgccaaccacgaacacacacgaggcgagacgacagagcaagagcacgcaccacggacaccacagaacagcagcacgcacgagcggaccgcaccggaccacgcagccaggcgagaaagagaacacaaagccacaaatcggaaacacacgacaccaggacaggggacacgcagaaacgagagcgagagccgggccacgggcgacaacaaaggggacacaacagcagtagacacgagcggagaagaacgcagcagcgcgcaaaccgcggacgagagagcagggagagcgaggagcgagcgcgcagcggggcacagacacgggatcacaggcgaggaggggagagagcgaacggggagagagcg

SEQ ID NO: 438873 - DNA, 2367 bp, Homo sapiens
  misc_feature (22)..(24): n is a, c, g, or t
  misc_feature (44)..(44): n is a, c, g, or t
ctcctcttcccccacacccagnnntaggctaggtacgaggctgngtgtgtaatcggccgagggtcaccgccgaatggcagcctccagaaagccaccgcgagtaagggtgaatcaccaggattttcaactgagaaatttaagaataattgaacctaacgaggtgacacactcaggagacacaggtgtggaaacagagtgagtatattgctccatgtgactgtcggcgggcttttgtctctggattcgatggctctgcgggcacagccatcatcacagaagagcatgcagccatgtggactgacgggcgctactttctccaggctgccaagcaaatggacagcaactggacacttatgaagatgggtctgaaggacacaccaactcaggaagactggctggtgagtgtgcttcctgaaggatccagggttggtgtggaccccttgatcattcctacagattattggaagaaaatggccaaagttctgagaagtgccggccatcacctcattcctgtcaaggagaacctcgttgacaaaatctggacagaccgtcctgagcgcccttgcaagcctctcctcacactgggcctggattacacaggcatctcctggaaggacaaggttgcagaccttcggttgaaaatggctgagaggaacgtcatgtggtttgtggtcactgccttggatgagattgcgtggctatttaatctccgaggatcagatgtggagcacaatccagtatttttctcctacgcaatcataggactagagacgatcatgctcttcattgatggtgaccgcatagacgcccccagtgtgaaggagcacctgcttcttgacttgggtctggaagccgaatacaggatccaggtgcatccctacaagtccatcctgagcgagctcaaggccctgtgtgctgacctctccccaagggagaaggtgtgggtcagtgacaaggccagctatgctgtgagcgagaccatccccaaggaccaccgctgctgtatgccttacacccccatctgcatcgccaaagctgtgaagaattcagctgagtcagaaggcatgaggcgggctcacattaaagatgctgttgctctctgtgaactctttaactggctggagaaagaggttcccaaaggtggtgtgacagagatctcagctgctgacaaagctgaggagtttcgcaggcaacaggcagactttgtggacctgagcttcccaacaatttccagtacgggacccaacggcgccatcattcactacgcgccagtccctgagacgaataggaccttgtccctggatgaggtgtaccttattgactcgggtgctcaatacaaggatggcaccacagatgtgacgcggacaatgcattttgggacccctacagcctacgagaaggaatgcttcacatatgtcctcaagggccacatagctgtgagtgcagccgttttcccgactggaaccaaaggtcaccttcttgactcctttgcccgttcagctttatgggattcaggcctagattacttgcacgggactggacatggtgttgggtcttttttgaatgtccatgagggtccttgcggcatcagttacaaaacattctctgatgagcccttggaggcaggcatgattgtcactgatgagcccgggtactatgaagatggggcttttggaattcgcattgagaatgttgtccttgtggttcctgtgaagaccaagtataattttaataaccggggaagcctgacctttgaacctctaacattggttccaattcagaccaaaatgatagatgtggattctcttacagacaaagagtgcgactggctcaacaattaccacctgacctgcagggatgtgattgggaaggaattgcagaaacagggccgccaggaagctctcgagtggctcatcagagagacgcaacccatctccaaacagcattaataaatacctccccggttttgtttttgtaaaatgctctggaggaaggaagaaacgtggcagatccctgacatctttcccctttcctttccttcttccctacctcccctttttactttagactttaagaagaacagaaaatcttcttatcctctttgatattttattgcaaacactcagtcttttatgattttttaattgttgagaacaagccaagaataaaattgctgcaccagaaggagggtccctccaaagttgaacacttggtgaaaggaagatgccccgacttctttggccagtgatggggaatcagtgagtgctccatgatggtcatgttccaggtgctagtacatcattcatgatcaccttaatgctcatgagactatatttatgatcagtgaataaaaatgtcagaactgtg

SEQ ID NO: 438874 - DNA, 2339 bp, Homo sapiens
  misc_feature (22)..(24): n is a, c, g, or t
  misc_feature (44)..(44): n is a, c, g, or t
ctcctcttcccccacacccagnnntaggctaggtacgaggctgngtgtgtaatcggccgagggtcaccgccgaatggcagcctccagaaagccaccgcgagtaagacggcagaatgcctccaaaggtgacttcagagctgcttcggcagctgagacaagccatgaggaactctgagtatgtgaccgaaccgatccaggcctacatcatcccatcgggagatgctcatcaggcacagccatcatcacagaagagcatgcagccatgtggactgacgggcgctactttctccaggctgccaagcaaatggacagcaactggacacttatgaagatgggtctgaaggacacaccaactcaggaagactggctggtgagtgtgcttcctgaaggatccagggttggtgtggaccccttgatcattcctacagattattggaagaaaatggccaaagttctgagaagtgccggccatcacctcattcctgtcaaggagaacctcgttgacaaaatctggacagaccgtcctgagcgcccttgcaagcctctcctcacactgggcctggattacacaggcatctcctggaaggacaaggttgcagaccttcggttgaaaatggctgagaggaacgtcatgtggtttgtggtcactgccttggatgagattgcgtggctatttaatctccgaggatcagatgtggagcacaatccagtatttttctcctacgcaatcataggactagagacgatcatgctcttcattgatggtgaccgcatagacgcccccagtgtgaaggagcacctgcttcttgacttgggtctggaagccgaatacaggatccaggtgcatccctacaagtccatcctgagcgagctcaaggccctgtgtgctgacctctccccaagggagaaggtgtgggtcagtgacaaggccagctatgctgtgagcgagaccatccccaaggaccaccgctgctgtatgccttacacccccatctgcatcgccaaagctgtgaagaattcagctgagtcagaaggcatgaggcgggctcacattaaagatgctgttgctctctgtgaactctttaactggctggagaaagaggttcccaaaggtggtgtgacagagatctcagctgctgacaaagctgaggagtttcgcaggcaacaggcagactttgtggacctgagcttcccaacaatttccagtacgggacccaacggcgccatcattcactacgcgccagtccctgagacgaataggaccttgtccctggatgaggtgtaccttattgactcgggtgctcaatacaaggatggcaccacagatgtgacgcggacaatgcattttgggacccctacagcctacgagaaggaatgcttcacatatgtcctcaagggccacatagctgtgagtgcagccgttttcccgactggaaccaaaggtcaccttcttgactcctttgcccgttcagctttatgggattcaggcctagattacttgcacgggactggacatggtgttgggtcttttttgaatgtccatgagggtccttgcggcatcagttacaaaacattctctgatgagcccttggaggcaggcatgattgtcactgatgagcccgggtactatgaagatggggcttttggaattcgcattgagaatgttgtccttgtggttcctgtgaagaccaagtataattttaataaccggggaagcctgacctttgaacctctaacattggttccaattcagaccaaaatgatagatgtggattctcttacagacaaagagtgcgactggctcaacaattaccacctgacctgcagggatgtgattgggaaggaattgcagaaacagggccgccaggaagctctcgagtggctcatcagagagacgcaacccatctccaaacagcattaataaatacctccccggttttgtttttgtaaaatgctctggaggaaggaagaaacgtggcagatccctgacatctttcccctttcctttccttcttccctacctcccctttttactttagactttaagaagaacagaaaatcttcttatcctctttgatattttattgcaaacactcagtcttttatgattttttaattgttgagaacaagccaagaataaaattgctgcaccagaaggagggtccctccaaagttgaacacttggtgaaaggaagatgccccgacttctttggccagtgatggggaatcagtgagtgctccatgatggtcatgttccaggtgctagtacatcattcatgatcaccttaatgctcatgagactatatttatgatcagtgaataaaaatgtcagaactgtg

SEQ ID NO: 438875 - DNA, 3271 bp, Homo sapiens
ctctcgcgactccttcgcgccggcccttccgcgggtgatcagctggtctgcgctcccctgacgtgggctggggcacgtcaccgccgaatggcagcctccagaaagccaccgcgagtaagggtgaatcaccaggattttcaactgagaaatttaagaataattgaacctaacgaggtgacacactcaggagacacaggtgtggaaacagacggcagaatgcctccaaaggtgacttcagagctgcttcggcagctgagacaagccatgaggaactctgagtatgtgaccgaaccgatccaggcctacatcatcccatcgggagatgctcatcagagtgagtatattgctccatgtgactgtcggcgggcttttgtctctggattcgatggctctgcgggcacagccatcatcacagaagagcatgcagccatgtggactgacgggcgctactttctccaggctgccaagcaaatggacagcaactggacacttatgaagatgggtctgaaggacacaccaactcaggaagactggctggtgagtgtgcttcctgaaggatccagggttggtgtggaccccttgatcattcctacagattattggaagaaaatggccaaagttctgagaagtgccggccatcacctcattcctgtcaaggagaacctcgttgacaaaatctggacagaccgtcctgagcgcccttgcaagcctctcctcacactgggcctggattacacagggctatttaatctccgaggatcagatgtggagcacaatccagtatttttctcctacgcaatcataggactagagacgatcatgctcttcattgatggtgaccgcatagacgcccccagtgtgaaggagcacctgcttcttgacttgggtctggaagccgaatacaggatccaggtgcatccctacaagtccatcctgagcgagctcaaggccctgtgtgctgacctctccccaagggagaaggtgtgggtcagtgacaaggccagctatgctgtgagcgagaccatccccaaggaccaccgctgctgtatgccttacacccccatctgcatcgccaaagctgtgaagaattcagctgagtcagaaggcatgaggcgggctcacattaaagatgctgttgctctctgtgaactctttaactggctggagaaagaggttcccaaaggtggtgtgacagagatctcagctgctgacaaagctgaggagtttcgcaggcaacaggcagactttgtggacctgagcttcccaacaatttccagtacgggacccaacggcgccatcattcactacgcgccagtccctgagacgaataggaccttgtccctggatgaggtgtaccttattgactcgggtgctcaatacaaggatggcaccacagatgtgacgcggacaatgcattttgggacccctacagcctacgagaaggaatgcttcacatatgtcctcaagggccacatagctgtgagtgcagccgttttcccgactggaaccaaaggtcaccttcttgactcctttgcccgttcagctttatgggattcaggcctagattacttgcacgggactggacatggtgttgggtcttttttgaatgtccatgagggtccttgcggcatcagttacaaaacattctctgatgagcccttggaggcaggcatgattgtcactgatgagcccgggtactatgaagatggggcttttggaattcgcattgagaatgttgtccttgtggttcctgtgaagaccaagtataattttaataaccggggaagcctgacctttgaacctctaacattggttccaattcagaccaaaatgatagatgtggattctcttacagacaaagagtgcgactggctcaacaattaccacctgacctgcagggatgtgattgggaaggaattgcagaaacagggccgccaggaagctctcgagtggctcatcagagagacgcaacccatctccaaacagcattaataaatacctccccggttttgtttttgtaaaatgctctggaggaaggaagaaacgtggcagatccctgacatctttcccctttcctttccttcttccctacctcccctttttactttagactttaagaagaacagaaaatcttcttatcctctttgatattttattgcaaacactcagtcttttatgattttttaattgttgagaacaagccaagaataaaattgctgcaccagaaggagggtccctccaaagttgaacacttggtgaaaggaagatgccccgacttctttggccagtgatggggaatcagtgagtgctccatgatggtcatgttccaggtgctagtacatcattcatgatcaccttaatgctcatgagactatatttatgatcagtgaataaaaatgtcagaactgtgaaaaaaaaaaaaaaaaaaaaaaaaaaaaaaaaaaaaaaaaaaaaagggggggggggggaaaaaaaaaccccgaaggggggagcccaaaaaaagagcgagcacccgagattatgctgggaaaaaggggggcccaaaaggggagagggagaaaaaaaaagaaacgagcgaagggggcgagggagacaaaaagggggaggagggaggaaaaacaggggacaagggaggaaatcttggggaaagaggcaccaaaaccggggggggggagacaaagggggacaacacacacaacaggaaaatacaaccgcccaggggacaaacaacaaaattagcacacaggcgacacaagcgcggagaaacaaaaaaaggcaacaacgcaaccacccaaacaaaaaatagcgcaaacaagaaaaaacaaagagacaaaaaaaaacccagggcacagagagtataacaaacccacacagcacagacagacaccgcacaccgagccagacagacccgcgccaaccacgaacacacacgaggcgagacgacagagcaagagcacgcaccacggacaccacagaacagcagcacgcacgagcggaccgcaccggaccacgcagccaggcgagaaagagaacacaaagccacaaatcggaaacacacgacaccaggacaggggacacgcagaaacgagagcgagagccgggccacgggcgacaacaaaggggacacaacagcagtagacacgagcggagaagaacgcagcagcgcgcaaaccgcggacgagagagcagggagagcgaggagcgagcgcgcagcggggcacagacacgggatcacaggcgaggaggggagagagcgaacggggagagagcg

SEQ ID NO: 438876 - DNA, 1843 bp, Homo sapiens
ctctcgcgactccttcgcgccggcccttccgcgggtgatcagctggtctgcgctcccctgacgtgggctggggcacgtcaccgccgaatggcagcctccagaaagccaccgcgagtaagggtgaatcaccaggattttcaactgagaaatttaagaataattgaacctaacgaggtgacacactcaggagacacaggtgtggaaacagacggcagaatgcctccaaaggtgacttcagagctgcttcggcagctgagacaagccatgaggaactctgagtatgtgaccgaaccgatccaggcctacatcatcccatcgggagatgctcatcagagtgagtatattgctccatgtgactgtcggcgggcttttgtctctggattcgatggctctgcgggcacagccatcatcacagaagagcatgcagccatgtggactgacgggcgctactttctccaggctgccaagcaaatggacagcaactggacacttatgaagatgggtctgaaggacacaccaactcaggaagactggctggtgagtgtgcttcctgaaggatccagggttggtgtggaccccttgatcattcctacagattattggaagaaaatggccaaagttctgagaagtgccggccatcacctcattcctgtcaaggagaacctcgttgacaaaatctggacagaccgtcctgagcgcccttgcaagcctctcctcacactgggcctggattacacaggcatctcctggaaggacaaggttgcagaccttcggttgaaaatggctgagaggaacgtcatgtggtttgtggtcactgccttggatgagattgcgtggctatttaatctccgaggatcagatgtggagcacaatccagtatttttctcctacgcaatcataggactagagacgatcatgctcttcattgatggtgaccgcatagacgcccccagtgtgaaggagcacctgcttcttgacttgggtctggaagccgaatacaggatccaggtgcatccctacaagtccatcctgagcgagctcaaggccctgtgtgctgacctctccccaagggagaaggtgtgggtcagtgacaaggccagctatgctgtgagcgagaccatccccaaggaccaccgctgctgtatgccttacacccccatctgcatcgccaaagctgtgaagaattcagctgagtcagaaggcatgaggcgggctcacattaaagatgctgttgctctctgtgaactctttaactggctggagaaagaggttcccaaaggtggtgtgacagagatctcagctgctgacaaagctgaggagtttcgcaggcaacaggcagactttgtggacctgagcttcccaacaatttccagtacgggacccaacggcgccatcattcactacgcgccagtccctgagacgaataggaccttgtccctggatgaggtgtaccttattgactcgggtgctcaatacaaggatggcaccacagatgtgacgcggacaatgcattttgggacccctacagcctacgagaaggaatgcttcacatatgtcctcaagggccacatagctgtgagtgcagccgttttcccgactggaaccaaaggtcaccttcttgactcctttgcccgttcagctttatgggattcaggcctagattacttgcacgggactggacatggtgttgggtcttttttgaatgtccatgagggtccttgcggcatcagttacaaaacattctctgatgagcccttggaggcaggcatgattgtcactgatgagcccggtactatgaagatgggcttttggattcaccacccggcctcgtacctagccgtaa

SEQ ID NO: 438877 - DNA, 1700 bp, Homo sapiens
ctctcgcgactccttcgcgccggcccttccgcgggtgatcagctggtctgcgctcccctgacgtgggctggggcacgtcaccgccgaatggcagcctccagaaagccaccgcgagtaagggtgaatcaccaggattttcaactgagaaatttaagaataattgaacctaacgaggtgacacactcaggagacacaggtgtggaaacagacggcagaatgcctccaaaggtgacttcagagctgcttcggcagctgagacaagccatgaggaactctgagtatgtgaccgaaccgatccaggcctacatcatcccatcgggagatgctcatcagagtgagtatattgctccatgtgactgtcggcgggcttttgtctctggattcgatggctctgcgggcacagccatcatcacagaagagcatgcagccatgtggactgacgggcgctactttctccaggctgccaagcaaatggacagcaactggacacttatgaagatgggtctgaaggacacaccaactcaggaagactggctggtgagtgtgcttcctgaaggatccagggttggtgtggaccccttgatcattcctacagattattggaagaaaatggccaaagttctgagaagtgccggccatcacctcattcctgtcaaggagaacctcgttgacaaaatctggacagaccgtcctgagcgcccttgcaagcctctcctcacactgggcctggattacacaggcatctcctggaaggacaaggttgcagaccttcggttgaaaatggctgagaggaacgtcatgtggtttgtggtcactgccttggatgagattgcgtggctatttaatctccgaggatcagatgtggagcacaatccagtatttttctcctacgcaatcataggactagagacgatcatgctcttcattgatggtgaccgcatagacgcccccagtgtgaaggagcacctgcttcttgacttgggtctggaagccgaatacaggatccaggtgcatccctacaagtccatcctgagcgagctcaaggccctgtgtgctgacctctccccaagggagaaggtgtgggtcagtgacaaggccagctatgctgtgagcgagaccatccccaaggaccaccgctgctgtatgccttacacccccatctgcatcgccaaagctgtgaagaattcagctgagtcagaaggcatgaggcgggctcacattaaagatgctgttgctctctgtgaactctttaactggctggagaaagaggttcccaaaggtggtgtgacagagatctcagctgctgacaaagctgaggagtttcgcaggcaacaggcagactttgtggacctgagcttcccaacaatttccagtacgggacccaacggcgccatcattcactacgcgccagtccctgagacgaataggaccttgtccctggatgaggtgtaccttattgactcgggtgctcaatacaaggatggcaccacagatgtgacgcggacaatgcattttgggacccctacagcctacgagaaggaatgcttcacatatgtcctcaagggccacatagctgtgagtgcagccgttttcccgactggaaccaaagcaccttcttgactccttttgcccgttcagcttttattgggaattccaggggccctaaggatttaacttttggccacggggggaaacctggg

SEQ ID NO: 438878 - DNA, 3223 bp, Homo sapiens
ctctcgcgactccttcgcgccggcccttccgcgggtgatcagctggtctgcgctcccctgacgtgggctggggcacgtcaccgccgaatggcagcctccagaaagccaccgcgagtaagggtgaatcaccaggattttcaactgagaaatttaagaataattgaacctaacgaggtgacacactcaggagacacaggtgtggaaacagacggcagaatgcctccaaaggtgacttcagagctgcttcggcagctgagacaagccatgaggaactctgagtatgtgaccgaaccgatccaggcctacatcatcccatcgggagatgctcatcagagtgagtatattgctccatgtgactgtcggcgggcttttgtctctggattcgatggctctgcgggcacagccatcatcacagaagagcatgcagccatgtggactgacgggcgctactttctccaggctgccaagcaaatggacagcaactggacacttatgaagatgggtctgaaggacacaccaactcaggaagactggctggtgagtgtgcttcctgaaggatccagggttggtgtggaccccttgatcattcctacaggcatctcctggaaggacaaggttgcagaccttcggttgaaaatggctgagaggaacgtcatgtggtttgtggtcactgccttggatgagattgcgtggctatttaatctccgaggatcagatgtggagcacaatccagtatttttctcctacgcaatcataggactagagacgatcatgctcttcattgatggtgaccgcatagacgcccccagtgtgaaggagcacctgcttcttgacttgggtctggaagccgaatacaggatccaggtgcatccctacaagtccatcctgagcgagctcaaggccctgtgtgctgacctctccccaagggagaaggtgtgggtcagtgacaaggccagctatgctgtgagcgagaccatccccaaggaccaccgctgctgtatgccttacacccccatctgcatcgccaaagctgtgaagaattcagctgagtcagaaggcatgaggcgggctcacattaaagatgctgttgctctctgtgaactctttaactggctggagaaagaggttcccaaaggtggtgtgacagagatctcagctgctgacaaagctgaggagtttcgcaggcaacaggcagactttgtggacctgagcttcccaacaatttccagtacgggacccaacggcgccatcattcactacgcgccagtccctgagacgaataggaccttgtccctggatgaggtgtaccttattgactcgggtgctcaatacaaggatggcaccacagatgtgacgcggacaatgcattttgggacccctacagcctacgagaaggaatgcttcacatatgtcctcaagggccacatagctgtgagtgcagccgttttcccgactggaaccaaaggtcaccttcttgactcctttgcccgttcagctttatgggattcaggcctagattacttgcacgggactggacatggtgttgggtcttttttgaatgtccatgagggtccttgcggcatcagttacaaaacattctctgatgagcccttggaggcaggcatgattgtcactgatgagcccgggtactatgaagatggggcttttggaattcgcattgagaatgttgtccttgtggttcctgtgaagaccaagtataattttaataaccggggaagcctgacctttgaacctctaacattggttccaattcagaccaaaatgatagatgtggattctcttacagacaaagagtgcgactggctcaacaattaccacctgacctgcagggatgtgattgggaaggaattgcagaaacagggccgccaggaagctctcgagtggctcatcagagagacgcaacccatctccaaacagcattaataaatacctccccggttttgtttttgtaaaatgctctggaggaaggaagaaacgtggcagatccctgacatctttcccctttcctttccttcttccctacctcccctttttactttagactttaagaagaacagaaaatcttcttatcctctttgatattttattgcaaacactcagtcttttatgattttttaattgttgagaacaagccaagaataaaattgctgcaccagaaggagggtccctccaaagttgaacacttggtgaaaggaagatgccccgacttctttggccagtgatggggaatcagtgagtgctccatgatggtcatgttccaggtgctagtacatcattcatgatcaccttaatgctcatgagactatatttatgatcagtgaataaaaatgtcagaactgtgaaaaaaaaaaaaaaaaaaaaaaaaaaaaaaaaaaaaaaaaaaaaagggggggggggggaaaaaaaaaccccgaaggggggagcccaaaaaaagagcgagcacccgagattatgctgggaaaaaggggggcccaaaaggggagagggagaaaaaaaaagaaacgagcgaagggggcgagggagacaaaaagggggaggagggaggaaaaacaggggacaagggaggaaatcttggggaaagaggcaccaaaaccggggggggggagacaaagggggacaacacacacaacaggaaaatacaaccgcccaggggacaaacaacaaaattagcacacaggcgacacaagcgcggagaaacaaaaaaaggcaacaacgcaaccacccaaacaaaaaatagcgcaaacaagaaaaaacaaagagacaaaaaaaaacccagggcacagagagtataacaaacccacacagcacagacagacaccgcacaccgagccagacagacccgcgccaaccacgaacacacacgaggcgagacgacagagcaagagcacgcaccacggacaccacagaacagcagcacgcacgagcggaccgcaccggaccacgcagccaggcgagaaagagaacacaaagccacaaatcggaaacacacgacaccaggacaggggacacgcagaaacgagagcgagagccgggccacgggcgacaacaaaggggacacaacagcagtagacacgagcggagaagaacgcagcagcgcgcaaaccgcggacgagagagcagggagagcgaggagcgagcgcgcagcggggcacagacacgggatcacaggcgaggaggggagagagcgaacggggagagagcg

SEQ ID NO: 438879 - DNA, 2776 bp, Homo sapiens
caagtcacttaagtctctgggccttagtttccccattggtaaactgagagtggtgaatgtaattacttgaggctgaagttaaaattaaatggattaagctgagaaaaatgcttaacaatacctagcatacaacacatactcaacacaggcatctcctggaaggacaaggttgcagaccttcggttgaaaatggctgagaggaacgtcatgtggtttgtggtcactgccttggatgagattgcgtggctatttaatctccgaggatcagatgtggagcacaatccagtatttttctcctacgcaatcataggactagagacgatcatgctcttcattgatggtgaccgcatagacgcccccagtgtgaaggagcacctgcttcttgacttgggtctggaagccgaatacaggatccaggtgcatccctacaagtccatcctgagcgagctcaaggccctgtgtgctgacctctccccaagggagaaggtgtgggtcagtgacaaggccagctatgctgtgagcgagaccatccccaaggaccaccgctgctgtatgccttacacccccatctgcatcgccaaagctgtgaagaattcagctgagtcagaaggcatgaggcgggctcacattaaagatgctgttgctctctgtgaactctttaactggctggagaaagaggttcccaaaggtggtgtgacagagatctcagctgctgacaaagctgaggagtttcgcaggcaacaggcagactttgtggacctgagcttcccaacaatttccagtacgggacccaacggcgccatcattcactacgcgccagtccctgagacgaataggaccttgtccctggatgaggtgtaccttattgactcgggtgctcaatacaaggatggcaccacagatgtgacgcggacaatgcattttgggacccctacagcctacgagaaggaatgcttcacatatgtcctcaagggccacatagctgtgagtgcagccgttttcccgactggaaccaaaggtcaccttcttgactcctttgcccgttcagctttatgggattcaggcctagattacttgcacgggactggacatggtgttgggtcttttttgaatgtccatgagggtccttgcggcatcagttacaaaacattctctgatgagcccttggaggcaggcatgattgtcactgatgagcccgggtactatgaagatggggcttttggaattcgcattgagaatgttgtccttgtggttcctgtgaagaccaagtataattttaataaccggggaagcctgacctttgaacctctaacattggttccaattcagaccaaaatgatagatgtggattctcttacagacaaagagtgcgactggctcaacaattaccacctgacctgcagggatgtgattgggaaggaattgcagaaacagggccgccaggaagctctcgagtggctcatcagagagacgcaacccatctccaaacagcattaataaatacctccccggttttgtttttgtaaaatgctctggaggaaggaagaaacgtggcagatccctgacatctttcccctttcctttccttcttccctacctcccctttttactttagactttaagaagaacagaaaatcttcttatcctctttgatattttattgcaaacactcagtcttttatgattttttaattgttgagaacaagccaagaataaaattgctgcaccagaaggagggtccctccaaagttgaacacttggtgaaaggaagatgccccgacttctttggccagtgatggggaatcagtgagtgctccatgatggtcatgttccaggtgctagtacatcattcatgatcaccttaatgctcatgagactatatttatgatcagtgaataaaaatgtcagaactgtgaaaaaaaaaaaaaaaaaaaaaaaaaaaaaaaaaaaaaaaaaaaaagggggggggggggaaaaaaaaaccccgaaggggggagcccaaaaaaagagcgagcacccgagattatgctgggaaaaaggggggcccaaaaggggagagggagaaaaaaaaagaaacgagcgaagggggcgagggagacaaaaagggggaggagggaggaaaaacaggggacaagggaggaaatcttggggaaagaggcaccaaaaccggggggggggagacaaagggggacaacacacacaacaggaaaatacaaccgcccaggggacaaacaacaaaattagcacacaggcgacacaagcgcggagaaacaaaaaaaggcaacaacgcaaccacccaaacaaaaaatagcgcaaacaagaaaaaacaaagagacaaaaaaaaacccagggcacagagagtataacaaacccacacagcacagacagacaccgcacaccgagccagacagacccgcgccaaccacgaacacacacgaggcgagacgacagagcaagagcacgcaccacggacaccacagaacagcagcacgcacgagcggaccgcaccggaccacgcagccaggcgagaaagagaacacaaagccacaaatcggaaacacacgacaccaggacaggggacacgcagaaacgagagcgagagccgggccacgggcgacaacaaaggggacacaacagcagtagacacgagcggagaagaacgcagcagcgcgcaaaccgcggacgagagagcagggagagcgaggagcgagcgcgcagcggggcacagacacgggatcacaggcgaggaggggagagagcgaacggggagagagcg

SEQ ID NO: 438880 - DNA, 2699 bp, Homo sapiens
  misc_feature (64)..(64): n is a, c, g, or t
  misc_feature (67)..(67): n is a, c, g, or t
acgcgtggctcggcggactcggggtatcagctgtctggctccctacgtggctggggcacgtcancgncgaatggcagcctccagaaagccaccgcgagtaagggtgaatcaccaggattttcaactgagaaatttaagaataattgaacctaacgaggtgacacactcaggagacacaggtgtggaaacagatgtggagcacaatccagtatttttctcctacgcaatcataggactagagacgatcatgctcttcattgatggtgaccgcatagacgcccccagtgtgaaggagcacctgcttcttgacttgggtctggaagccgaatacaggatccaggtgcatccctacaagtccatcctgagcgagctcaaggccctgtgtgctgacctctccccaagggagaaggtgtgggtcagtgacaaggccagctatgctgtgagcgagaccatccccaaggaccaccgctgctgtatgccttacacccccatctgcatcgccaaagctgtgaagaattcagctgagtcagaaggcatgaggcgggctcacattaaagatgctgttgctctctgtgaactctttaactggctggagaaagaggttcccaaaggtggtgtgacagagatctcagctgctgacaaagctgaggagtttcgcaggcaacaggcagactttgtggacctgagcttcccaacaatttccagtacgggacccaacggcgccatcattcactacgcgccagtccctgagacgaataggaccttgtccctggatgaggtgtaccttattgactcgggtgctcaatacaaggatggcaccacagatgtgacgcggacaatgcattttgggacccctacagcctacgagaaggaatgcttcacatatgtcctcaagggccacatagctgtgagtgcagccgttttcccgactggaaccaaaggtcaccttcttgactcctttgcccgttcagctttatgggattcaggcctagattacttgcacgggactggacatggtgttgggtcttttttgaatgtccatgagggtccttgcggcatcagttacaaaacattctctgatgagcccttggaggcaggcatgattgtcactgatgagcccgggtactatgaagatggggcttttggaattcgcattgagaatgttgtccttgtggttcctgtgaagaccaagtataattttaataaccggggaagcctgacctttgaacctctaacattggttccaattcagaccaaaatgatagatgtggattctcttacagacaaagagtgcgactggctcaacaattaccacctgacctgcagggatgtgattgggaaggaattgcagaaacagggccgccaggaagctctcgagtggctcatcagagagacgcaacccatctccaaacagcattaataaatacctccccggttttgtttttgtaaaatgctctggaggaaggaagaaacgtggcagatccctgacatctttcccctttcctttccttcttccctacctcccctttttactttagactttaagaagaacagaaaatcttcttatcctctttgatattttattgcaaacactcagtcttttatgattttttaattgttgagaacaagccaagaataaaattgctgcaccagaaggagggtccctccaaagttgaacacttggtgaaaggaagatgccccgacttctttggccagtgatggggaatcagtgagtgctccatgatggtcatgttccaggtgctagtacatcattcatgatcaccttaatgctcatgagactatatttatgatcagtgaataaaaatgtcagaactgtgaaaaaaaaaaaaaaaaaaaaaaaaaaaaaaaaaaaaaaaaaaaaagggggggggggggaaaaaaaaaccccgaaggggggagcccaaaaaaagagcgagcacccgagattatgctgggaaaaaggggggcccaaaaggggagagggagaaaaaaaaagaaacgagcgaagggggcgagggagacaaaaagggggaggagggaggaaaaacaggggacaagggaggaaatcttggggaaagaggcaccaaaaccggggggggggagacaaagggggacaacacacacaacaggaaaatacaaccgcccaggggacaaacaacaaaattagcacacaggcgacacaagcgcggagaaacaaaaaaaggcaacaacgcaaccacccaaacaaaaaatagcgcaaacaagaaaaaacaaagagacaaaaaaaaacccagggcacagagagtataacaaacccacacagcacagacagacaccgcacaccgagccagacagacccgcgccaaccacgaacacacacgaggcgagacgacagagcaagagcacgcaccacggacaccacagaacagcagcacgcacgagcggaccgcaccggaccacgcagccaggcgagaaagagaacacaaagccacaaatcggaaacacacgacaccaggacaggggacacgcagaaacgagagcgagagccgggccacgggcgacaacaaaggggacacaacagcagtagacacgagcggagaagaacgcagcagcgcgcaaaccgcggacgagagagcagggagagcgaggagcgagcgcgcagcggggcacagacacgggatcacaggcgaggaggggagagagcgaacggggagagagcg

SEQ ID NO: 438881 - DNA, 1931 bp, Homo sapiens
gtgtcctcctcccagattcactaagtgtttacatttgtggaataattaatttttaattaactttgttaggccagtccctgagacgaataggaccttgtccctggatgaggtgtaccttattgactcgggtgctcaatacaaggatggcaccacagatgtgacgcggacaatgcattttgggacccctacagcctacgagaaggaatgcttcacatatgtcctcaagggccacatagctgtgagtgcagccgttttcccgactggaaccaaaggtcaccttcttgactcctttgcccgttcagctttatgggattcaggcctagattacttgcacgggactggacatggtgttgggtcttttttgaatgtccatgagggtccttgcggcatcagttacaaaacattctctgatgagcccttggaggcaggcatgattgtcactgatgagcccgggtactatgaagatggggcttttggaattcgcattgagaatgttgtccttgtggttcctgtgaagaccaagtgcgactggctcaacaattaccacctgacctgcagggatgtgattgggaaggaattgcagaaacagggccgccaggaagctctcgagtggctcatcagagagacgcaacccatctccaaacagcattaataaatacctccccggttttgtttttgtaaaatgctctggaggaaggaagaaacgtggcagatccctgacatctttcccctttcctttccttcttccctacctcccctttttactttagactttaagaagaacagaaaatcttcttatcctctttgatattttattgcaaacactcagtcttttatgattttttaattgttgagaacaagccaagaataaaattgctgcaccagaaggagggtccctccaaagttgaacacttggtgaaaggaagatgccccgacttctttggccagtgatggggaatcagtgagtgctccatgatggtcatgttccaggtgctagtacatcattcatgatcaccttaatgctcatgagactatatttatgatcagtgaataaaaatgtcagaactgtgaaaaaaaaaaaaaaaaaaaaaaaaaaaaaaaaaaaaaaaaaaaaagggggggggggggaaaaaaaaaccccgaaggggggagcccaaaaaaagagcgagcacccgagattatgctgggaaaaaggggggcccaaaaggggagagggagaaaaaaaaagaaacgagcgaagggggcgagggagacaaaaagggggaggagggaggaaaaacaggggacaagggaggaaatcttggggaaagaggcaccaaaaccggggggggggagacaaagggggacaacacacacaacaggaaaatacaaccgcccaggggacaaacaacaaaattagcacacaggcgacacaagcgcggagaaacaaaaaaaggcaacaacgcaaccacccaaacaaaaaatagcgcaaacaagaaaaaacaaagagacaaaaaaaaacccagggcacagagagtataacaaacccacacagcacagacagacaccgcacaccgagccagacagacccgcgccaaccacgaacacacacgaggcgagacgacagagcaagagcacgcaccacggacaccacagaacagcagcacgcacgagcggaccgcaccggaccacgcagccaggcgagaaagagaacacaaagccacaaatcggaaacacacgacaccaggacaggggacacgcagaaacgagagcgagagccgggccacgggcgacaacaaaggggacacaacagcagtagacacgagcggagaagaacgcagcagcgcgcaaaccgcggacgagagagcagggagagcgaggagcgagcgcgcagcggggcacagacacgggatcacaggcgaggaggggagagagcgaacggggagagagcg

SEQ ID NO: 438882 - DNA, 2090 bp, Homo sapiens
gcctcagagcttttgccatcatgtctagtggatcagcccctgcccaggcaccaagtcctgccagcaggtccttcctttcactctcttttttgtctcctgctcttgtggcatgttgagttgagagtctgaaaactaagtttactcccagcgccattctgctgcaccacagtctttaaccaccgcaggttttgggttcatctaggcagctacactcaaaagacacccatgggcttggctgatcctagttttttattcagctttttcagtggatataggatatgtagcccagtgtgttggcaggacagcttcgagtgtctctctcagcaggagttctcacagagtccggggctattcccccacttaccacctcccaggatggctcaggtttaagggaatgaagccacacaggtgggagcaggagctactggcttagagactgctgtctataatagtaaactgttctgggagccttttcaccagaagccatgaagtctggtcctatgtatttccggggaaacagaacacaaggaaaatacttacctgtgagtaaggagaaagggtgttgcacaccttttctctcagcttgtgatcttagcacatgggggcctttgctgttgacctgtgtagccagttgttaaagatgtagtggtgaataccgtgtctgtccttctcttccctgcagtgcgactggctcaacaattaccacctgacctgcagggatgtgattgggaaggaattgcagaaacagggccgccaggaagctctcgagtggctcatcagagagacgcaacccatctccaaacagcattaataaatacctccccggttttgtttttgtaaaatgctctggaggaaggaagaaacgtggcagatccctgacatctttcccctttcctttccttcttccctacctcccctttttactttagactttaagaagaacagaaaatcttcttatcctctttgatattttattgcaaacactcagtcttttatgattttttaattgttgagaacaagccaagaataaaattgctgcaccagaaggagggtccctccaaagttgaacacttggtgaaaggaagatgccccgacttctttggccagtgatggggaatcagtgagtgctccatgatggtcatgttccaggtgctagtacatcattcatgatcaccttaatgctcatgagactatatttatgatcagtgaataaaaatgtcagaactgtgaaaaaaaaaaaaaaaaaaaaaaaaaaaaaaaaaaaaaaaaaaaaagggggggggggggaaaaaaaaaccccgaaggggggagcccaaaaaaagagcgagcacccgagattatgctgggaaaaaggggggcccaaaaggggagagggagaaaaaaaaagaaacgagcgaagggggcgagggagacaaaaagggggaggagggaggaaaaacaggggacaagggaggaaatcttggggaaagaggcaccaaaaccggggggggggagacaaagggggacaacacacacaacaggaaaatacaaccgcccaggggacaaacaacaaaattagcacacaggcgacacaagcgcggagaaacaaaaaaaggcaacaacgcaaccacccaaacaaaaaatagcgcaaacaagaaaaaacaaagagacaaaaaaaaacccagggcacagagagtataacaaacccacacagcacagacagacaccgcacaccgagccagacagacccgcgccaaccacgaacacacacgaggcgagacgacagagcaagagcacgcaccacggacaccacagaacagcagcacgcacgagcggaccgcaccggaccacgcagccaggcgagaaagagaacacaaagccacaaatcggaaacacacgacaccaggacaggggacacgcagaaacgagagcgagagccgggccacgggcgacaacaaaggggacacaacagcagtagacacgagcggagaagaacgcagcagcgcgcaaaccgcggacgagagagcagggagagcgaggagcgagcgcgcagcggggcacagacacgggatcacaggcgaggaggggagagagcgaacggggagagagcg

SEQ ID NO: 438883 - DNA, 1476 bp, Homo sapiens
aacgtatccctttaggtcactgtgcctggcatttcttgtacagtgtatatttgaaattatttactgtgagatttgtgtctaggactgacagcactgtgctcctcctgtagggaagtacctggtggcacagtccaggaacaagctacttgggagtccaggcacaggatgctgtgttgtcaatgaaaccaagcatcagggggaagaagcagagagatgcggccaagataggaccttgggccaaatccgctctcttcctgcccctctttatctttcccctttcctttccttcttccctacctcccctttttactttagactttaagaagaacagaaaatcttcttatcctctttgatattttattgcaaacactcagtcttttatgattttttaattgttgagaacaagccaagaataaaattgctgcaccagaaggagggtccctccaaagttgaacacttggtgaaaggaagatgccccgacttctttggccagtgatggggaatcagtgagtgctccatgatggtcatgttccaggtgctagtacatcattcatgatcaccttaatgctcatgagactatatttatgatcagtgaataaaaatgtcagaactgtgaaaaaaaaaaaaaaaaaaaaaaaaaaaaaaaaaaaaaaaaaaaaagggggggggggggaaaaaaaaaccccgaaggggggagcccaaaaaaagagcgagcacccgagattatgctgggaaaaaggggggcccaaaaggggagagggagaaaaaaaaagaaacgagcgaagggggcgagggagacaaaaagggggaggagggaggaaaaacaggggacaagggaggaaatcttggggaaagaggcaccaaaaccggggggggggagacaaagggggacaacacacacaacaggaaaatacaaccgcccaggggacaaacaacaaaattagcacacaggcgacacaagcgcggagaaacaaaaaaaggcaacaacgcaaccacccaaacaaaaaatagcgcaaacaagaaaaaacaaagagacaaaaaaaaacccagggcacagagagtataacaaacccacacagcacagacagacaccgcacaccgagccagacagacccgcgccaaccacgaacacacacgaggcgagacgacagagcaagagcacgcaccacggacaccacagaacagcagcacgcacgagcggaccgcaccggaccacgcagccaggcgagaaagagaacacaaagccacaaatcggaaacacacgacaccaggacaggggacacgcagaaacgagagcgagagccgggccacgggcgacaacaaaggggacacaacagcagtagacacgagcggagaagaacgcagcagcgcgcaaaccgcggacgagagagcagggagagcgaggagcgagcgcgcagcggggcacagacacgggatcacaggcgaggaggggagagagcgaacggggagagagcg

SEQ ID NO: 438884 - DNA, 473 bp, Homo sapiens
atagatgtgttgtcgcctgatgggcctggctgggtcaaggcagaccacacagttgactgttataaaaatgattttgaggacttacacccctgcatcctggagaaccaaaaccagagatgcccctaagcccagatacccccatatcctgcccctgtttcctatcacagtagacattagccttgggacctgttgctgggagcccctcagcaccctttgtttggcctttcctgatggcacaggccattgtttgcccagtggaggagctcttggaaaatggcatcaggttccttgtgtgtctgtgaaaagtggtgaccagctcaccacttcttggctcccagttacccctggctctgagggatggcatgctggtggaatgacctcatggtgcttcagcatagtaaagaggagtaaaagcatctgttttcttctttctcccgcagtataattttaataaccggggaagcctgaccttt

SEQ ID NO: 438885 - DNA, 457 bp, Homo sapiens
agcttgggtctcaggactgttctttcagagcttgacacacagcttgttttcagtagtgtggtcttctcttgcccagaggtttctttggagtcaaggacccatctgccccactaggagctgatgcctcttactgctcttgcctgtctactgtcattttgtgcagcttctgagcagttgttagaaacctttcttcttcttttttttttctcccctgcttcaggcacagccatcatcacagaagagcatgcagccatgtggactgacgggcgctactttctccaggctgccaagcaaatggacagcaactggacacttatgaagatgggtgggtacaggcatggctagcccaaacttagttggcctgatctgggcagggatcctagaggtcctcaggactcctggatcttaatccttttatgcagtcatggacccttttgagaatccaaggaaaactgag

SEQ ID NO: 438886 - DNA, 594 bp, Homo sapiens
  misc_feature (64)..(64): n is a, c, g, or t
  misc_feature (67)..(67): n is a, c, g, or t
  misc_feature (500)..(501): n is a, c, g, or t
  misc_feature (504)..(504): n is a, c, g, or t
  misc_feature (508)..(509): n is a, c, g, or t
  misc_feature (518)..(518): n is a, c, g, or t
  misc_feature (521)..(522): n is a, c, g, or t
  misc_feature (529)..(529): n is a, c, g, or t
  misc_feature (539)..(539): n is a, c, g, or t
  misc_feature (542)..(542): n is a, c, g, or t
  misc_feature (544)..(544): n is a, c, g, or t
  misc_feature (547)..(547): n is a, c, g, or t
  misc_feature (563)..(563): n is a, c, g, or t
  misc_feature (586)..(586): n is a, c, g, or t
acgcgtggctcggcggactcggggtatcagctgtctggctccctacgtggctggggcacgtcancgncgaatggcagcctccagaaagccaccgcgagtaagggtgaatcaccaggattttcaactgagaaatttaagaataattgaacctaacgaggtgacacactcaggagacacaggtgtggaaacagacggcagaatgcctccaaaggtgacttcagagctgcttcggcagctgagacaagccatgaggaactctgagtatgtgaccgaaccgatccaggcctacatcatcccatcgggagatgctcatcagagtgagtatattgctccatgtgactgtcggcgggcttttgtctctggattcgatggctctgcgggcacagccatcatcacagaagagcatgcagccatgtggactgacgggcgctactttctccaggctgccaagcaaatggacagcaactggacacttatgaagatgggtcctgacagggacnncanccanncttcagganagnnctgggcntgggctgagntgntngcnttccctggaaaagggnatgccaaaggggctttggggtgntggggcac

SEQ ID NO: 438887 - DNA, 2492 bp, Homo sapiens
  misc_feature (22)..(24): n is a, c, g, or t
  misc_feature (44)..(44): n is a, c, g, or t
ctcctcttcccccacacccagnnntaggctaggtacgaggctgngtgtgtaatcggccgagggtcaccgccgaatggcagcctccagaaagccaccgcgagtaagggtgaatcaccaggattttcaactgagaaatttaagaataattgaacctaacgaggtgacacactcaggagacacaggtgtggaaacagacggcagaatgcctccaaaggtgacttcagagctgcttcggcagctgagacaagccatgaggaactctgagtatgtgaccgaaccgatccaggcctacatcatcccatcgggagatgctcatcagagtgagtatattgctccatgtgactgtcggcgggcttttgtctctggattcgatggctctgcgggcacagccatcatcacagaagagcatgcagccatgtggactgacgggcgctactttctccaggctgccaagcaaatggacagcaactggacacttatgaagatgggtctgaaggacacaccaactcaggaagactggctggtgagtgtgcttcctgaaggatccagggttggtgtggaccccttgatcattcctacagattattggaagaaaatggccaaagttctgagaagtgccggccatcacctcattcctgtcaaggagaacctcgttgacaaaatctggacagaccgtcctgagcgcccttgcaagcctctcctcacactgggcctggattacacaggcatctcctggaaggacaaggttgcagaccttcggttgaaaatggctgagaggaacgtcatgtggtttgtggtcactgccttggatgagattgcgtggctatttaatctccgaggatcagatgtggagcacaatccagtatttttctcctacgcaatcataggactagagacgatcatgctcttcattgatggtgaccgcatagacgcccccagtgtgaaggagcacctgcttcttgacttgggtctggaagccgaatacaggatccaggtgcatccctacaagtccatcctgagcgagctcaaggccctgtgtgctgacctctccccaagggagaaggtgtgggtcagtgacaaggccagctatgctgtgagcgagaccatccccaaggaccaccgctgctgtatgccttacacccccatctgcatcgccaaagctgtgaagaattcagctgagtcagaaggcatgaggcgggctcacattaaagatgctgttgctctctgtgaactctttaactggctggagaaagaggttcccaaaggtggtgtgacagagatctcagctgctgacaaagctgaggagtttcgcaggcaacaggcagactttgtggacctgagcttcccaacaatttccagtacgggacccaacggcgccatcattcactacgcgccagtccctgagacgaataggaccttgtccctggatgaggtgtaccttattgactcgggtgctcaatacaaggatggcaccacagatgtgacgcggacaatgcattttgggacccctacagcctacgagaaggaatgcttcacatatgtcctcaagggccacatagctgtgagtgcagccgttttcccgactggaaccaaaggtcaccttcttgactcctttgcccgttcagctttatgggattcaggcctagattacttgcacgggactggacatggtgttgggtcttttttgaatgtccatgagggtccttgcggcatcagttacaaaacattctctgatgagcccttggaggcaggcatgattgtcactgatgagcccgggtactatgaagatggggcttttggaattcgcattgagaatgttgtccttgtggttcctgtgaagaccaagtataattttaataaccggggaagcctgacctttgaacctctaacattggttccaattcagaccaaaatgatagatgtggattctcttacagacaaagagtgcgactggctcaacaattaccacctgacctgcagggatgtgattgggaaggaattgcagaaacagggccgccaggaagctctcgagtggctcatcagagagacgcaacccatctccaaacagcattaataaatacctccccggttttgtttttgtaaaatgctctggaggaaggaagaaacgtggcagatccctgacatctttcccctttcctttccttcttccctacctcccctttttactttagactttaagaagaacagaaaatcttcttatcctctttgatattttattgcaaacactcagtcttttatgattttttaattgttgagaacaagccaagaataaaattgctgcaccagaaggagggtccctccaaagttgaacacttggtgaaaggaagatgccccgacttctttggccagtgatggggaatcagtgagtgctccatgatggtcatgttccaggtgctagtacatcattcatgatcaccttaatgctcatgagactatatttatgatcagtgaataaaaatgtcagaactgtg

SEQ ID NO: 438888 - DNA, 2419 bp, Homo sapiens
gtctgcaacttcctgttctttctctccttaagggtgaatcaccaggattttcaactgagaaatttaagaataattgaacctaacgaggtgacacactcaggagacacaggtgtggaaacagacggcagaatgcctccaaaggtgacttcagagctgcttcggcagctgagacaagccatgaggaactctgagtatgtgaccgaaccgatccaggcctacatcatcccatcgggagatgctcatcagagtgagtatattgctccatgtgactgtcggcgggcttttgtctctggattcgatggctctgcgggcacagccatcatcacagaagagcatgcagccatgtggactgacgggcgctactttctccaggctgccaagcaaatggacagcaactggacacttatgaagatgggtctgaaggacacaccaactcaggaagactggctggtgagtgtgcttcctgaaggatccagggttggtgtggaccccttgatcattcctacagattattggaagaaaatggccaaagttctgagaagtgccggccatcacctcattcctgtcaaggagaacctcgttgacaaaatctggacagaccgtcctgagcgcccttgcaagcctctcctcacactgggcctggattacacaggcatctcctggaaggacaaggttgcagaccttcggttgaaaatggctgagaggaacgtcatgtggtttgtggtcactgccttggatgagattgcgtggctatttaatctccgaggatcagatgtggagcacaatccagtatttttctcctacgcaatcataggactagagacgatcatgctcttcattgatggtgaccgcatagacgcccccagtgtgaaggagcacctgcttcttgacttgggtctggaagccgaatacaggatccaggtgcatccctacaagtccatcctgagcgagctcaaggccctgtgtgctgacctctccccaagggagaaggtgtgggtcagtgacaaggccagctatgctgtgagcgagaccatccccaaggaccaccgctgctgtatgccttacacccccatctgcatcgccaaagctgtgaagaattcagctgagtcagaaggcatgaggcgggctcacattaaagatgctgttgctctctgtgaactctttaactggctggagaaagaggttcccaaaggtggtgtgacagagatctcagctgctgacaaagctgaggagtttcgcaggcaacaggcagactttgtggacctgagcttcccaacaatttccagtacgggacccaacggcgccatcattcactacgcgccagtccctgagacgaataggaccttgtccctggatgaggtgtaccttattgactcgggtgctcaatacaaggatggcaccacagatgtgacgcggacaatgcattttgggacccctacagcctacgagaaggaatgcttcacatatgtcctcaagggccacatagctgtgagtgcagccgttttcccgactggaaccaaaggtcaccttcttgactcctttgcccgttcagctttatgggattcaggcctagattacttgcacgggactggacatggtgttgggtcttttttgaatgtccatgagggtccttgcggcatcagttacaaaacattctctgatgagcccttggaggcaggcatgattgtcactgatgagcccgggtactatgaagatggggcttttggaattcgcattgagaatgttgtccttgtggttcctgtgaagaccaagtataattttaataaccggggaagcctgacctttgaacctctaacattggttccaattcagaccaaaatgatagatgtggattctcttacagacaaagagtgcgactggctcaacaattaccacctgacctgcagggatgtgattgggaaggaattgcagaaacagggccgccaggaagctctcgagtggctcatcagagagacgcaacccatctccaaacagcattaataaatacctccccggttttgtttttgtaaaatgctctggaggaaggaagaaacgtggcagatccctgacatctttcccctttcctttccttcttccctacctcccctttttactttagactttaagaagaacagaaaatcttcttatcctctttgatattttattgcaaacactcagtcttttatgattttttaattgttgagaacaagccaagaataaaattgctgcaccagaaggagggtccctccaaagttgaacacttggtgaaaggaagatgccccgacttctttggccagtgatggggaatcagtgagtgctccatgatggtcatgttccaggtgctagtacatcattcatgatcaccttaatgctcatgagactatatttatgatcagtgaataaaaatgtcagaactgtg

SEQ ID NO: 438889 - DNA, 3316 bp, Homo sapiens
ctctcgcgactccttcgcgccggcccttccgcgggtgatcagctggtctgcgctcccctgacgtgggctggggcacgtcaccgccgaatggcagcctccagaaagccaccgcgagtaagggtgaatcaccaggattttcaactgagaaatttaagaataattgaacctaacgaggtgacacactcaggagacacaggtgtggaaacagacggcagaatgcctccaaaggtgacttcagagctgcttcggcagctgagacaagccatgaggaactctgagtatgtgaccgaaccgatccaggcctacatcatcccatcgggagatgctcatcagagtgagtatattgctccatgtgactgtcggcgggcttttgtctctggattcgatggctctgcgggcacagccatcatcacagaagagcatgcagccatgtggactgacgggcgctactttctccaggctgccaagcaaatggacagcaactggacacttatgaagatgggtctgaaggacacaccaactcaggaagactggctggtgagtgtgcttcctgaaggatccagggttggtgtggaccccttgatcattcctacagattattggaagaaaatggccaaagttctgagaagtgccggccatcacctcattcctgtcaaggagaacctcgttgacaaaatctggacagaccgtcctgagcgcccttgcaagcctctcctcacactgggcctggattacacaggcatctcctggaaggacaaggttgcagaccttcggttgaaaatggctgagaggaacgtcatgtggtttgtggtcactgccttggatgagattgcgtggctatttaatctccgaggatcagatgtggagcacaatccagtatttttctcctacgcaatcataggactagagacgatcatgctcttcattgatggtgaccgcatagacgcccccagtgtgaaggagcacctgcttcttgacttgggtctggaagccgaatacaggatccaggtgcatccctacaagtccatcctgagcgagctcaaggccctgtgtgctgacctctccccaagggagaaggtgtgggtcagtgacaaggccagctatgctgtgagcgagaccatccccaaggaccaccgctgctgtatgccttacacccccatctgcatcgccaaagctgtgaagaattcagctgagtcagaaggcatgaggcgggctcacgttcccaaaggtggtgtgacagagatctcagctgctgacaaagctgaggagtttcgcaggcaacaggcagactttgtggacctgagcttcccaacaatttccagtacgggacccaacggcgccatcattcactacgcgccagtccctgagacgaataggaccttgtccctggatgaggtgtaccttattgactcgggtgctcaatacaaggatggcaccacagatgtgacgcggacaatgcattttgggacccctacagcctacgagaaggaatgcttcacatatgtcctcaagggccacatagctgtgagtgcagccgttttcccgactggaaccaaaggtcaccttcttgactcctttgcccgttcagctttatgggattcaggcctagattacttgcacgggactggacatggtgttgggtcttttttgaatgtccatgagggtccttgcggcatcagttacaaaacattctctgatgagcccttggaggcaggcatgattgtcactgatgagcccgggtactatgaagatggggcttttggaattcgcattgagaatgttgtccttgtggttcctgtgaagaccaagtataattttaataaccggggaagcctgacctttgaacctctaacattggttccaattcagaccaaaatgatagatgtggattctcttacagacaaagagtgcgactggctcaacaattaccacctgacctgcagggatgtgattgggaaggaattgcagaaacagggccgccaggaagctctcgagtggctcatcagagagacgcaacccatctccaaacagcattaataaatacctccccggttttgtttttgtaaaatgctctggaggaaggaagaaacgtggcagatccctgacatctttcccctttcctttccttcttccctacctcccctttttactttagactttaagaagaacagaaaatcttcttatcctctttgatattttattgcaaacactcagtcttttatgattttttaattgttgagaacaagccaagaataaaattgctgcaccagaaggagggtccctccaaagttgaacacttggtgaaaggaagatgccccgacttctttggccagtgatggggaatcagtgagtgctccatgatggtcatgttccaggtgctagtacatcattcatgatcaccttaatgctcatgagactatatttatgatcagtgaataaaaatgtcagaactgtgaaaaaaaaaaaaaaaaaaaaaaaaaaaaaaaaaaaaaaaaaaaaagggggggggggggaaaaaaaaaccccgaaggggggagcccaaaaaaagagcgagcacccgagattatgctgggaaaaaggggggcccaaaaggggagagggagaaaaaaaaagaaacgagcgaagggggcgagggagacaaaaagggggaggagggaggaaaaacaggggacaagggaggaaatcttggggaaagaggcaccaaaaccggggggggggagacaaagggggacaacacacacaacaggaaaatacaaccgcccaggggacaaacaacaaaattagcacacaggcgacacaagcgcggagaaacaaaaaaaggcaacaacgcaaccacccaaacaaaaaatagcgcaaacaagaaaaaacaaagagacaaaaaaaaacccagggcacagagagtataacaaacccacacagcacagacagacaccgcacaccgagccagacagacccgcgccaaccacgaacacacacgaggcgagacgacagagcaagagcacgcaccacggacaccacagaacagcagcacgcacgagcggaccgcaccggaccacgcagccaggcgagaaagagaacacaaagccacaaatcggaaacacacgacaccaggacaggggacacgcagaaacgagagcgagagccgggccacgggcgacaacaaaggggacacaacagcagtagacacgagcggagaagaacgcagcagcgcgcaaaccgcggacgagagagcagggagagcgaggagcgagcgcgcagcggggcacagacacgggatcacaggcgaggaggggagagagcgaacggggagagagcg

SEQ ID NO: 438890 - DNA, 3039 bp, Homo sapiens
ctctcgcgactccttcgcgccggcccttccgcgggtgatcagctggtctgcgctcccctgacgtgggctggggcacgtcaccgccgaatggcagcctccagaaagccaccgcgagtaagggtgaatcaccaggattttcaactgagaaatttaagaataattgaacctaacgaggtgacacactcaggagacacaggtgtggaaacagacggcagaatgcctccaaaggtgacttcagagctgcttcggcagctgagacaagccatgaggaactctgagtatgtgaccgaaccgatccaggcctacatcatcccatcgggagatgctcatcagagtgagtatattgctccatgtgactgtcggcgggcttttgtctctggattcgatggctctgcgggcacagccatcatcacagaagagcatgcagccatgtggactgacgggcgctactttctccaggctgccaagcaaatggacagcaactggacacttatgaagatgggtctgaaggacacaccaactcaggaagactggctggtgagtgtgcttcctgaaggatccagggttggtgtggaccccttgatcattcctacagattattggaagaaaatggccaaagttctgagaagtgccggccatcacctcattcctgtcaaggagaacctcgttgacaaaatctggacagaccgtcctgagcgcccttgcaagcctctcctcacactgggcctggattacacaggcatctcctggaaggacaaggttgcagaccttcggttgaaaatggctgagaggaacgtcatgtggtttgtggtcactgccttggatgagattgcgtggctatttaatctccgaggatcagatgtggagcacaatccagtatttttctcctacgcaatcataggactagagacgatcatgctcttcattgatggtgaccgcatagacgcccccagtgtgaaggagcacctgcttcttgacttgggtctggaagccgaatacaggatccaggtgcatccctacaagtccatcctgagcgagctcaaggccctgtgtgctgacctctccccaagggagaaggtgtgggtcagtgacaaggccagctatgctgtgagcgagaccatccccaaggaccaccgctgctgtatgccttacacccccatctgcatcgccaaagctgtgaagaattcagctgagtcagaaggcatgaggcgggctcacattaaagatgctgttgctctctgtgaactctttaactggctggagaaagaggttcccaaaggtggtgtgacagagatctcagctgctgacaaagctgaggagtttcgcaggcaacaggcagactttgtggacctgagcttcccaacaatttccagtacgggacccaacggcgccatcattcactacgcgccagtccctgagacgaataggaccttgtccctggatgaggtgtaccttattgactcgggtgctcaatacaaggatggcaccacagatgtgacgcggacaatgcattttgggacccctacagcctacgagaaggaatgcttcacatatgtcctcaagggccacatagctgtgagtgcagccgttttcccgactggaaccaaaggtcaccttcttgactcctttgcccgttcagctttatgggattcaggcctagattacttgcacgggactggacatggtgttgggtcttttttgaatgtccatgagggtccttgcggcatcaagagacgcaacccatctccaaacagcattaataaatacctccccggttttgtttttgtaaaatgctctggaggaaggaagaaacgtggcagatccctgacatctttcccctttcctttccttcttccctacctcccctttttactttagactttaagaagaacagaaaatcttcttatcctctttgatattttattgcaaacactcagtcttttatgattttttaattgttgagaacaagccaagaataaaattgctgcaccagaaggagggtccctccaaagttgaacacttggtgaaaggaagatgccccgacttctttggccagtgatggggaatcagtgagtgctccatgatggtcatgttccaggtgctagtacatcattcatgatcaccttaatgctcatgagactatatttatgatcagtgaataaaaatgtcagaactgtgaaaaaaaaaaaaaaaaaaaaaaaaaaaaaaaaaaaaaaaaaaaaagggggggggggggaaaaaaaaaccccgaaggggggagcccaaaaaaagagcgagcacccgagattatgctgggaaaaaggggggcccaaaaggggagagggagaaaaaaaaagaaacgagcgaagggggcgagggagacaaaaagggggaggagggaggaaaaacaggggacaagggaggaaatcttggggaaagaggcaccaaaaccggggggggggagacaaagggggacaacacacacaacaggaaaatacaaccgcccaggggacaaacaacaaaattagcacacaggcgacacaagcgcggagaaacaaaaaaaggcaacaacgcaaccacccaaacaaaaaatagcgcaaacaagaaaaaacaaagagacaaaaaaaaacccagggcacagagagtataacaaacccacacagcacagacagacaccgcacaccgagccagacagacccgcgccaaccacgaacacacacgaggcgagacgacagagcaagagcacgcaccacggacaccacagaacagcagcacgcacgagcggaccgcaccggaccacgcagccaggcgagaaagagaacacaaagccacaaatcggaaacacacgacaccaggacaggggacacgcagaaacgagagcgagagccgggccacgggcgacaacaaaggggacacaacagcagtagacacgagcggagaagaacgcagcagcgcgcaaaccgcggacgagagagcagggagagcgaggagcgagcgcgcagcggggcacagacacgggatcacaggcgaggaggggagagagcgaacggggagagagcg

SEQ ID NO: 438891 - DNA, 2442 bp, Homo sapiens
ctctcgcgactccttcgcgccggcccttccgcgggtgatcagctggtctgcgctcccctgacgtgggctggggcacgtcaccgccgaatggcagcctccagaaagccaccgcgagtaagggtgaatcaccaggattttcaactgagaaatttaagaataattgaacctaacgaggtgacacactcaggagacacaggtgtggaaacagacggcagaatgcctccaaaggtgacttcagagctgcttcggcagctgagacaagccatgaggaactctgagtatgtgaccgaaccgatccaggcctacatcatcccatcgggagatgctcatcaggcacagccatcatcacagaagagcatgcagccatgtggactgacgggcgctactttctccaggctgccaagcaaatggacagcaactggacacttatgaagatgggtctgaaggacacaccaactcaggaagactggctggtgagtgtgcttcctgaaggatccagggttggtgtggaccccttgatcattcctacagattattggaagaaaatggccaaagttctgagaagtgccggccatcacctcattcctgtcaaggagaacctcgttgacaaaatctggacagaccgtcctgagcgcccttgcaagcctctcctcacactgggcctggattacacaggcatctcctggaaggacaaggttgcagaccttcggttgaaaatggctgagaggaacgtcatgtggtttgtggtcactgccttggatgagattgcgtggctatttaatctccgaggatcagatgtggagcacaatccagtatttttctcctacgcaatcataggactagagacgatcatgctcttcattgatggtgaccgcatagacgcccccagtgtgaaggagcacctgcttcttgacttgggtctggaagccgaatacaggatccaggtgcatccctacaagtccatcctgagcgagctcaaggccctgtgtgctgacctctccccaagggagaaggtgtgggtcagtgacaaggccagctatgctgtgagcgagaccatccccaaggaccaccgctgctgtatgccttacacccccatctgcatcgccaaagctgtgaagaattcagctgagtcagaaggcatgaggcgggctcacattaaagatgctgttgctctctgtgaactctttaactggctggagaaagaggttcccaaaggtggtgtgacagagatctcagctgctgacaaagctgaggagtttcgcaggcaacaggcagactttgtggacctgagcttcccaacaatttccagtacgggacccaacggcgccatcattcactacgcgccagtccctgagacgaataggaccttgtccctggatgaggtgtaccttattgactcgggtgctcaatacaaggatggcaccacagatgtgacgcggacaatgcattttgggacccctacagcctacgagaaggaatgcttcacatatgtcctcaagggccacatagctgtgagtgcagccgttttcccgactggaaccaaaggtcaccttcttgactcctttgcccgttcagctttatgggattcaggcctagattacttgcacgggactggacatggtgttgggtcttttttgaatgtccatgagggtccttgcggcatcagttacaaaacattctctgatgagcccttggaggcaggcatgattgtcactgatgagcccgggtactatgaagatggggcttttggaattcgcattgagaatgttgtccttgtggttcctgtgaagaccaagtataattttaataaccggggaagcctgacctttgaacctctaacattggttccaattcagaccaaaatgatagatgtggattctcttacagacaaagagtgcgactggctcaacaattaccacctgacctgcagggatgtgattgggaaggaattgcagaaacagggccgccaggaagctctcgagtggctcatcagagagacgcaacccatctccaaacagcattaataaatacctccccggttttgtttttgtaaaatgctctggaggaaggaagaaacgtggcagatccctgacatctttcccctttcctttccttcttccctacctcccctttttactttagactttaagaagaacagaaaatcttcttatcctctttgatattttattgcaaacactcagtcttttatgattttttaattgttgagaacaagccaagaataaaattgctgcaccagaaggagggtccctccaaagttgaacacttggtgaaaggaagatgccccgacttctttggccagtgatggggaatcagtgagtgctccatgatggtcatgttccaggtgctagtacatcattcatgatcaccttaatgctcatgagactatatttatgatcagtgaataaaaatgtcagaactgtg

SEQ ID NO: 438892 - DNA, 3109 bp, Homo sapiens
ctctcgcgactccttcgcgccggcccttccgcgggtgatcagctggtctgcgctcccctgacgtgggctggggcacgtcaccgccgaatggcagcctccagaaagccaccgcgagtaagacggcagaatgcctccaaaggtgacttcagagctgcttcggcagctgagacaagccatgaggaactctgagtatgtgaccgaaccgatccaggcctacatcatcccatcgggagatgctcatcaggtctgaaggacacaccaactcaggaagactggctggtgagtgtgcttcctgaaggatccagggttggtgtggaccccttgatcattcctacagattattggaagaaaatggccaaagttctgagaagtgccggccatcacctcattcctgtcaaggagaacctcgttgacaaaatctggacagaccgtcctgagcgcccttgcaagcctctcctcacactgggcctggattacacaggcatctcctggaaggacaaggttgcagaccttcggttgaaaatggctgagaggaacgtcatgtggtttgtggtcactgccttggatgagattgcgtggctatttaatctccgaggatcagatgtggagcacaatccagtatttttctcctacgcaatcataggactagagacgatcatgctcttcattgatggtgaccgcatagacgcccccagtgtgaaggagcacctgcttcttgacttgggtctggaagccgaatacaggatccaggtgcatccctacaagtccatcctgagcgagctcaaggccctgtgtgctgacctctccccaagggagaaggtgtgggtcagtgacaaggccagctatgctgtgagcgagaccatccccaaggaccaccgctgctgtatgccttacacccccatctgcatcgccaaagctgtgaagaattcagctgagtcagaaggcatgaggcgggctcacattaaagatgctgttgctctctgtgaactctttaactggctggagaaagaggttcccaaaggtggtgtgacagagatctcagctgctgacaaagctgaggagtttcgcaggcaacaggcagactttgtggacctgagcttcccaacaatttccagtacgggacccaacggcgccatcattcactacgcgccagtccctgagacgaataggaccttgtccctggatgaggtgtaccttattgactcgggtgctcaatacaaggatggcaccacagatgtgacgcggacaatgcattttgggacccctacagcctacgagaaggaatgcttcacatatgtcctcaagggccacatagctgtgagtgcagccgttttcccgactggaaccaaaggtcaccttcttgactcctttgcccgttcagctttatgggattcaggcctagattacttgcacgggactggacatggtgttgggtcttttttgaatgtccatgagggtccttgcggcatcagttacaaaacattctctgatgagcccttggaggcaggcatgattgtcactgatgagcccgggtactatgaagatggggcttttggaattcgcattgagaatgttgtccttgtggttcctgtgaagaccaagtataattttaataaccggggaagcctgacctttgaacctctaacattggttccaattcagaccaaaatgatagatgtggattctcttacagacaaagagtgcgactggctcaacaattaccacctgacctgcagggatgtgattgggaaggaattgcagaaacagggccgccaggaagctctcgagtggctcatcagagagacgcaacccatctccaaacagcattaataaatacctccccggttttgtttttgtaaaatgctctggaggaaggaagaaacgtggcagatccctgacatctttcccctttcctttccttcttccctacctcccctttttactttagactttaagaagaacagaaaatcttcttatcctctttgatattttattgcaaacactcagtcttttatgattttttaattgttgagaacaagccaagaataaaattgctgcaccagaaggagggtccctccaaagttgaacacttggtgaaaggaagatgccccgacttctttggccagtgatggggaatcagtgagtgctccatgatggtcatgttccaggtgctagtacatcattcatgatcaccttaatgctcatgagactatatttatgatcagtgaataaaaatgtcagaactgtgaaaaaaaaaaaaaaaaaaaaaaaaaaaaaaaaaaaaaaaaaaaaagggggggggggggaaaaaaaaaccccgaaggggggagcccaaaaaaagagcgagcacccgagattatgctgggaaaaaggggggcccaaaaggggagagggagaaaaaaaaagaaacgagcgaagggggcgagggagacaaaaagggggaggagggaggaaaaacaggggacaagggaggaaatcttggggaaagaggcaccaaaaccggggggggggagacaaagggggacaacacacacaacaggaaaatacaaccgcccaggggacaaacaacaaaattagcacacaggcgacacaagcgcggagaaacaaaaaaaggcaacaacgcaaccacccaaacaaaaaatagcgcaaacaagaaaaaacaaagagacaaaaaaaaacccagggcacagagagtataacaaacccacacagcacagacagacaccgcacaccgagccagacagacccgcgccaaccacgaacacacacgaggcgagacgacagagcaagagcacgcaccacggacaccacagaacagcagcacgcacgagcggaccgcaccggaccacgcagccaggcgagaaagagaacacaaagccacaaatcggaaacacacgacaccaggacaggggacacgcagaaacgagagcgagagccgggccacgggcgacaacaaaggggacacaacagcagtagacacgagcggagaagaacgcagcagcgcgcaaaccgcggacgagagagcagggagagcgaggagcgagcgcgcagcggggcacagacacgggatcacaggcgaggaggggagagagcgaacggggagagagcg

SEQ ID NO: 438893 - DNA, 2935 bp, Homo sapiens
cccaagttgagatgtgttaaaatcggcacggaggagcaaatggacagcaactgcacacttatgaagatgggtctgaaggacacaccaactcaggaagactggctggtgagtgtgcttcctgaaggatccagggttggtgtggaccccttgatcattcctacagattattggaagaaaatggccaaagttctgagaagtgccggccatcacctcattcctgtcaaggagaacctcgttgacaaaatctggacagaccgtcctgagcgcccttgcaagcctctcctcacactgggcctggattacacaggcatctcctggaaggacaaggttgcagaccttcggttgaaaatggctgagaggaacgtcatgtggtttgtggtcactgccttggatgagattgcgtggctatttaatctccgaggatcagatgtggagcacaatccagtatttttctcctacgcaatcataggactagagacgatcatgctcttcattgatggtgaccgcatagacgcccccagtgtgaaggagcacctgcttcttgacttgggtctggaagccgaatacaggatccaggtgcatccctacaagtccatcctgagcgagctcaaggccctgtgtgctgacctctccccaagggagaaggtgtgggtcagtgacaaggccagctatgctgtgagcgagaccatccccaaggaccaccgctgctgtatgccttacacccccatctgcatcgccaaagctgtgaagaattcagctgagtcagaaggcatgaggcgggctcacattaaagatgctgttgctctctgtgaactctttaactggctggagaaagaggttcccaaaggtggtgtgacagagatctcagctgctgacaaagctgaggagtttcgcaggcaacaggcagactttgtggacctgagcttcccaacaatttccagtacgggacccaacggcgccatcattcactacgcgccagtccctgagacgaataggaccttgtccctggatgaggtgtaccttattgactcgggtgctcaatacaaggatggcaccacagatgtgacgcggacaatgcattttgggacccctacagcctacgagaaggaatgcttcacatatgtcctcaagggccacatagctgtgagtgcagccgttttcccgactggaaccaaaggtcaccttcttgactcctttgcccgttcagctttatgggattcaggcctagattacttgcacgggactggacatggtgttgggtcttttttgaatgtccatgagggtccttgcggcatcagttacaaaacattctctgatgagcccttggaggcaggcatgattgtcactgatgagcccgggtactatgaagatggggcttttggaattcgcattgagaatgttgtccttgtggttcctgtgaagaccaagtataattttaataaccggggaagcctgacctttgaacctctaacattggttccaattcagaccaaaatgatagatgtggattctcttacagacaaagagtgcgactggctcaacaattaccacctgacctgcagggatgtgattgggaaggaattgcagaaacagggccgccaggaagctctcgagtggctcatcagagagacgcaacccatctccaaacagcattaataaatacctccccggttttgtttttgtaaaatgctctggaggaaggaagaaacgtggcagatccctgacatctttcccctttcctttccttcttccctacctcccctttttactttagactttaagaagaacagaaaatcttcttatcctctttgatattttattgcaaacactcagtcttttatgattttttaattgttgagaacaagccaagaataaaattgctgcaccagaaggagggtccctccaaagttgaacacttggtgaaaggaagatgccccgacttctttggccagtgatggggaatcagtgagtgctccatgatggtcatgttccaggtgctagtacatcattcatgatcaccttaatgctcatgagactatatttatgatcagtgaataaaaatgtcagaactgtgaaaaaaaaaaaaaaaaaaaaaaaaaaaaaaaaaaaaaaaaaaaaagggggggggggggaaaaaaaaaccccgaaggggggagcccaaaaaaagagcgagcacccgagattatgctgggaaaaaggggggcccaaaaggggagagggagaaaaaaaaagaaacgagcgaagggggcgagggagacaaaaagggggaggagggaggaaaaacaggggacaagggaggaaatcttggggaaagaggcaccaaaaccggggggggggagacaaagggggacaacacacacaacaggaaaatacaaccgcccaggggacaaacaacaaaattagcacacaggcgacacaagcgcggagaaacaaaaaaaggcaacaacgcaaccacccaaacaaaaaatagcgcaaacaagaaaaaacaaagagacaaaaaaaaacccagggcacagagagtataacaaacccacacagcacagacagacaccgcacaccgagccagacagacccgcgccaaccacgaacacacacgaggcgagacgacagagcaagagcacgcaccacggacaccacagaacagcagcacgcacgagcggaccgcaccggaccacgcagccaggcgagaaagagaacacaaagccacaaatcggaaacacacgacaccaggacaggggacacgcagaaacgagagcgagagccgggccacgggcgacaacaaaggggacacaacagcagtagacacgagcggagaagaacgcagcagcgcgcaaaccgcggacgagagagcagggagagcgaggagcgagcgcgcagcggggcacagacacgggatcacaggcgaggaggggagagagcgaacggggagagagcg

SEQ ID NO: 438894 - DNA, 1769 bp, Homo sapiens
ctctcgcgactccttcgcgccggcccttccgcgggtgatcagctggtctgcgctcccctgacgtgggctggggcacgtcaccgccgaatggcagcctccagaaagccaccgcgagtaagggtgaatcaccaggattttcaactgagaaatttaagaataattgaacctaacgaggtgacacactcaggagacacaggtgtggaaacagacggcagaatgcctccaaaggtgacttcagagctgcttcggcagctgagacaagccatgaggaactctgagtatgtgaccgaaccgatccaggcctacatcatcccatcgggagatgctcatcagagtgagtatattgctccatgtgactgtcggcgggcttttgtctctggattcgatggctctgcgggcacagccatcatcacagaagagcatgcagccatgtggactgacgggcgctactttctccaggctgccaagcaaatggacagcaactggacacttatgaagatgggtctgaaggacacaccaactcaggaagactggctggtgagtgtgcttcctgaaggatccagggttggtgtggaccccttgatcattcctacagattattggaagaaaatggccaaagttctgagaagtgccggccatcacctcattcctgtcaaggagaacctcgttgacaaaatctggacagaccgtcctgagcgcccttgcaagcctctcctcacactgggcctggattacacaggcatctcctggaaggacaaggttgcagaccttcggttgaaaatggctgagaggaacgtcatgtggtttgtggtcactgccttggatgagattgcgtggctatttaatctccgaggatcagatgtggagcacaatccagtatttttctcctacgcaatcataggactagagacgatcatgctcttcattgatggtgaccgcatagacgcccccagtgtgaaggagcacctgcttcttgacttgggtctggaagccgaatacaggatccaggtgcatccctacaagtccatcctgagcgagctcaaggccctgtgtgctgacctctccccaagggagaaggtgtgggtcagtgacaaggccagctatgctgtgagcgagaccatccccaaggaccaccgctgctgtatgccttacacccccatctgcatcgccaaagctgtgaagaattcagctgagtcagaaggcatgaggcgggctcacattaaagatgctgttgctctctgtgaactctttaactggctggagaaagaggttcccaaaggtggtgtgacagagatctcagctgctgacaaagctgaggagtttcgcaggcaacaggcagactttgtggacctgagcttcccaacaatttccagtacgggacccaacggcgccatcattcactacgcgccagtccctgagacgaataggaccttgtccctggatgaggtgtaccttattgactcgggtgctcaatacaaggatggcaccacagatgtgacgcggacaatgcattttgggacccctacagcctacgagaaggaatgcttcacatatgtcctcaagggccacatagctgtgagtgcagccgttttcccgactggaaccaaagacttggtgaaaggaagatgccccgacttctttggccagtgatggggaatcagtgagtgctccatgatggtcatgttccaggtgctagtacatcattcatgatcaccttaatgctcatgagactatatttatgatcagtgaataaaaatgtcagaactgtg

SEQ ID NO: 438895 - DNA, 2646 bp, Homo sapiens
actgaatccttgcgcagcagctggactccaagctgaagctcttccctcccgctacaagcgaccccttaacatcttaagtcagacaggtgacagggattttgatttcttttctagggctatttaatctccgaggatcagatgtggagcacaatccagtatttttctcctacgcaatcataggactagagacgatcatgctcttcattgatggtgaccgcatagacgcccccagtgtgaaggagcacctgcttcttgacttgggtctggaagccgaatacaggatccaggtgcatccctacaagtccatcctgagcgagctcaaggccctgtgtgctgacctctccccaagggagaaggtgtgggtcagtgacaaggccagctatgctgtgagcgagaccatccccaaggaccaccgctgctgtatgccttacacccccatctgcatcgccaaagctgtgaagaattcagctgagtcagaaggcatgaggcgggctcacattaaagatgctgttgctctctgtgaactctttaactggctggagaaagaggttcccaaaggtggtgtgacagagatctcagctgctgacaaagctgaggagtttcgcaggcaacaggcagactttgtggacctgagcttcccaacaatttccagtacgggacccaacggcgccatcattcactacgcgccagtccctgagacgaataggaccttgtccctggatgaggtgtaccttattgactcgggtgctcaatacaaggatggcaccacagatgtgacgcggacaatgcattttgggacccctacagcctacgagaaggaatgcttcacatatgtcctcaagggccacatagctgtgagtgcagccgttttcccgactggaaccaaaggtcaccttcttgactcctttgcccgttcagctttatgggattcaggcctagattacttgcacgggactggacatggtgttgggtcttttttgaatgtccatgagggtccttgcggcatcagttacaaaacattctctgatgagcccttggaggcaggcatgattgtcactgatgagcccgggtactatgaagatggggcttttggaattcgcattgagaatgttgtccttgtggttcctgtgaagaccaagtataattttaataaccggggaagcctgacctttgaacctctaacattggttccaattcagaccaaaatgatagatgtggattctcttacagacaaagagtgcgactggctcaacaattaccacctgacctgcagggatgtgattgggaaggaattgcagaaacagggccgccaggaagctctcgagtggctcatcagagagacgcaacccatctccaaacagcattaataaatacctccccggttttgtttttgtaaaatgctctggaggaaggaagaaacgtggcagatccctgacatctttcccctttcctttccttcttccctacctcccctttttactttagactttaagaagaacagaaaatcttcttatcctctttgatattttattgcaaacactcagtcttttatgattttttaattgttgagaacaagccaagaataaaattgctgcaccagaaggagggtccctccaaagttgaacacttggtgaaaggaagatgccccgacttctttggccagtgatggggaatcagtgagtgctccatgatggtcatgttccaggtgctagtacatcattcatgatcaccttaatgctcatgagactatatttatgatcagtgaataaaaatgtcagaactgtgaaaaaaaaaaaaaaaaaaaaaaaaaaaaaaaaaaaaaaaaaaaaagggggggggggggaaaaaaaaaccccgaaggggggagcccaaaaaaagagcgagcacccgagattatgctgggaaaaaggggggcccaaaaggggagagggagaaaaaaaaagaaacgagcgaagggggcgagggagacaaaaagggggaggagggaggaaaaacaggggacaagggaggaaatcttggggaaagaggcaccaaaaccggggggggggagacaaagggggacaacacacacaacaggaaaatacaaccgcccaggggacaaacaacaaaattagcacacaggcgacacaagcgcggagaaacaaaaaaaggcaacaacgcaaccacccaaacaaaaaatagcgcaaacaagaaaaaacaaagagacaaaaaaaaacccagggcacagagagtataacaaacccacacagcacagacagacaccgcacaccgagccagacagacccgcgccaaccacgaacacacacgaggcgagacgacagagcaagagcacgcaccacggacaccacagaacagcagcacgcacgagcggaccgcaccggaccacgcagccaggcgagaaagagaacacaaagccacaaatcggaaacacacgacaccaggacaggggacacgcagaaacgagagcgagagccgggccacgggcgacaacaaaggggacacaacagcagtagacacgagcggagaagaacgcagcagcgcgcaaaccgcggacgagagagcagggagagcgaggagcgagcgcgcagcggggcacagacacgggatcacaggcgaggaggggagagagcgaacggggagagagcg

SEQ ID NO: 438896 - DNA, 1584 bp, Homo sapiens
ctctcgcgactccttcgcgccggcccttccgcgggtgatcagctggtctgcgctcccctgacgtgggctggggcacgtcaccgccgaatggcagcctccagaaagccaccgcgagtaagggtgaatcaccaggattttcaactgagaaatttaagaataattgaacctaacgaggtgacacactcaggagacacaggtgtggaaacagacggcagaatgcctccaaaggtgacttcagagctgcttcggcagctgagacaagccatgaggaactctgagtatgtgaccgaaccgatccaggcctacatcatcccatcgggagatgctcatcagagtgagtatattgctccatgtgactgtcggcgggcttttgtctctggattcgatggctctgcgggcacagccatcatcacagaagagcatgcagccatgtggactgacgggcgctactttctccaggctgccaagcaaatggacagcaactggacacttatgaagatgggtctgaaggacacaccaactcaggaagactggctggtgagtgtgcttcctgaaggatccagggttggtgtggaccccttgatcattcctacagattattggaagaaaatggccaaagttctgagaagtgccggccatcacctcattcctgtcaaggagaacctcgttgacaaaatctggacagaccgtcctgagcgcccttgcaagcctctcctcacactgggcctggattacacaggcatctcctggaaggacaaggttgcagaccttcggttgaaaatggctgagaggaacgtcatgtggtttgtggtcactgccttggatgagattgcgtggctatttaatctccgaggatcagatgtggagcacaatccagtatttttctcctacgcaatcataggactagagacgatcatgctcttcattgatggtgaccgcatagacgcccccagtgtgaaggagcacctgcttcttgacttgggtctggaagccgaatacaggatccaggtgcatccctacaagtccatcctgagcgagctcaaggccctgtgtgctgacctctccccaagggagaaggtgtgggtcagtgacaaggccagctatgctgtgagcgagaccatccccaaggaccaccgctgctgtatgccttacacccccatctgcatcgccaaagctgtgaagaattcagctgagtcagaaggcatgaggcgggctcacgttcccaaaggtggtgtgacagagatctcagctgctgacaaagctgaggagtttcgcaggcaacaggcagactttgtggacctgagcttcccaacaatttccagtacgggacccaacggcgccatcattcactacgcgccagtccctgagacgaataggaccttgtccctggatgaggtgtaccttattgactcgggtgctcaatacaaggatggcaccacagatgtgacgcggacaatgcattttgggacccctacagcctacgagaaggaatgcttcacatatgtcctcaagggccacatagctgtgagtgcagccgttttcccgactggaaccaaagggtaggtggtgcattctgtcacatgg

SEQ ID NO: 438897 - DNA, 926 bp, Homo sapiens
ctctcgcgactccttcgcgccggcccttccgcgggtgatcagctggtctgcgctcccctgacgtgggctggggcacgtcaccgccgaatggcagcctccagaaagccaccgcgagtaagggtgaatcaccaggattttcaactgagaaatttaagaataattgaacctaacgaggtgacacactcaggagacacaggtgtggaaacagacggcagaatgcctccaaaggtgacttcagagctgcttcggcagctgagacaagccatgaggaactctgagtatgtgaccgaaccgatccaggcctacatcatcccatcgggagatgctcatcagagtgagtatattgctccatgtgactgtcggcgggcttttgtctctggattcgatggctctgcgggcacagccatcatcacagaagagcatgcagccatgtggactgacgggcgctactttctccaggctgccaagcaaatggacagcaactggacacttatgaagatgggtctgaaggacacaccaactcaggaagactggctggtgagtgtgcttcctgaaggatccagggttggtgtggaccccttgatcattcctacagattattggaagaaaatggccaaagttctgagaagtgccggccatcacctcattcctgtcaaggagaacctcgttgacaaaatctggacagtcttttatgattttttaattgttgagaacaagccaagaataaaattgctgcaccagaaggagggtccctccaaagttgaacacttggtgaaaggaagatgccccgacttctttggccagtgatggggaatcagtgagtgctccatgatggtcatgttccaggtgctagtacatcattcatgatcaccttaatgctcatgagactatatttatgatcagtgaataaaaatgtcagaactgtg

SEQ ID NO: 438898 - DNA, 1170 bp, Homo sapiens
cgccgcagtcgagcggtcggtcgccacggtaacgcgcgcgggcaggtgtccgaccatgagcgtccgggtcgcacgggtagcgtgggtcaggggcttgggcgccagctaccgccgcggcgcctcgagcttcccggtgcctccgccgggcgcccagggtgtagcggagctgctgcgagatgcgaccggggcggaggaggaggcgccctgggcggcgacggagcggcgaatgccgggccagtgctccgtgctgctcttcccgggccagggcagccaggtggtgggcatgggccgcggtctgctcaactacccgcgcgtccgcgaactctacgccgccgcccgccgcgtgctgggctacgacctgctggaactgagcctgcacgggccgcaggagaccctggaccgcaccgtgcactgtcagcccgcgatcttcgtggcatcgctggccgctgtcgagaaactacatcacctgcagccctcggtgattgagaactgtgttgctgctgctggattcagtgtgggagagtttgcagccctagtgtttgccggagccatggaatttgctgaaggctctacggtttctccagaagaattcctctaagtttcatttcagacgcaccaggatgttgccggttagtggcgcattccacacccgcctcatggagccagccgtggagcccctgacgcaagctttaaaggcagtcgacattaagaagcctctggtttctgtctactccaacgtccacgcgcatagatacaggcatcccgggcacatccacaagctgctggcccagcagctggtctccccagtgaagtgggagcagacgatgcatgccatatacgaaaggaaaaagggcagggggttcccccaaactttcgaagtaggccctggcaggcagctgggagccatcctgaagagctgtaacatgcaggcctggaagtcctacagcgccgtggatgtgctgcagaccctcgaacatgtggacctggaccctcaggagcccccgagatgactgcagggggctcaaatgcgatgaccccctctgtcctcctgaggagaggctgtaggctgtgcctgtcgccccctaccttcctaatggctcctcctctgaggagtgaaagggatttgtttgcaacgtgctttgaaggccacataaaaagccctaaaaatga

SEQ ID NO: 438899 - DNA, 1388 bp, Homo sapiens
cgccgcagtcgagcggtcggtcgccacggtaacgcgcgcgggcaggtgtccgaccatgagcgtccgggtcgcacgggtagcgtgggtcaggggcttgggcgccagctaccgccgcggcgcctcgagcttcccggtgcctccgccgggcgcccagggtgtagcggagctgctgcgagatgcgaccggggcggaggaggaggcgccctgggcggcgacggagcggcgaatgccgggccagtgctccgtgctgctcttcccgggccagggcagccaggtggtgggcatgggccgcggtctgctcaactacccgcgcgtccgcgaactctacgccgccgcccgccgcgtgctgggctacgacctgctggaactgagcctgcacgggccgcaggagaccctggaccgcaccgtgcactgtcagcccgcgatcttcgtggcatcgctggccgctgtcgagaaactacatcacctgcagccctcggtgattgagaactgtgttgctgctgctggattcagtgtgggagagtttgcagccctagtgtttgccggagccatggaatttgctgaaggtttgtatgcagtgaaaatccgagctgaggccatgcaggaagcttcagaagctgtccccagtgggatgctgtctgtcctcggccagcctcagtccaagttcaacttcgcctgtttggaagcccgggaacactgcaagtctttaggcatagagaaccccgtatgtgaagtgtccaactacctctttccagattgcagggtgatttcaggacaccaagaggctctacggtttctccagaagaattcctctaagtttcatttcagacgcaccaggatgttgccggttagtggcgcattccacacccgcctcatggagccagccgtggagcccctgacgcaagctttaaaggcagtcgacattaagaagcctctggtttctgtctactccaacgtccacgcgcatagatacaggcatcccgggcacatccacaagctgctggcccagcagctggtctccccagtgaagtgggagcagacgatgcatgccatatacgaaaggaaaaagggcagggggttcccccaaactttcgaagtaggccctggcaggcagctgggagccatcctgaagagctgtaacatgcaggcctggaagtcctacagcgccgtggatgtgctgcagaccctcgaacatgtggacctggaccctcaggagcccccgagatgactgcagggggctcaaatgcgatgaccccctctgtcctcctgaggagaggctgtaggctgtgcctgtcgccccctaccttcctaatggctcctcctctgaggagtgaaagggatttgtttgcaacgtgctttgaaggccacataaaaagccctaaaaatga

SEQ ID NO: 438900 - DNA, 1742 bp, Homo sapiens
cgccgcagtcgagcggtcggtcgccacggtaacgcgcgcgggcaggtgtccgaccatgagcgtccgggtcgcacgggtagcgtgggtcaggggcttgggcgccagctaccgccgcggcgcctcgagcttcccggtgcctccgccgggcgcccagggtgtagcggagctgctgcgagatgcgaccggggcggaggaggaggcgccctgggcggcgacggagcggcgaatgccgggccagtgctccgtgctgctcttcccgggccagggcagccaggtggtgggcatgggccgcggtctgctcaactacccgcgcgtccgcgaactctacgccgccgcccgccgcgtgctgggctacgacctgctggaactgagcctgcacgggccgcaggagaccctggaccgcaccgtgcactgtcagcccgcgatcttcgtggcatcgctggccgctgtcgagaaactacatcacctgcagccctcggtgattgagaactgtgttgctgctgctggattcagtgtgggagagtttgcagccctagtgtttgccggagccatggaatttgctgaaggtttgtatgcagtgaaaatccgagctgaggccatgcaggaagcttcagaagctgtccccagtgggatgctgtctgtcctcggccagcctcagtccaagttcaacttcgcctgtttggaagcccgggaacactgcaagtctttaggcatagagaaccccgtatgtgaagtgtccaactacctctttccagattgcagggtgatttcaggacaccaagaggctctacggtttctccagaagaattcctctaagtttcatttcagacgcaccaggatgttgccggttagtggcgcattccacacccgcctcatggagccagccgtggagcccctgacgcaagctttaaaggcagtcgacattaagaagcctctggtttctgtctactccaacgtccacgcgcatagatacaggcatcccgggcacatccacaagctgctggcccagcagctggtctccccagtgaagtgggagcagacgatgcatgccatatacgaaaggaaaaagggcagggggttcccccaaactttcgaagtaggccctggcaggcagctgggagccatcctgaagagctgtaacatgcaggcctggaagtcctacagcgccgtggatgtgctgcagaccctcgaacatgtggacctggaccctcaggagcccccgagatgactgcagggggctcaaatgcgatgaccccctctgtcctcctgaggagaggctgtaggctgtgcctgtcgccccctaccttcctaatggctcctcctctgaggagtgaaagggatttgtttgcaacgtgctttgaaggccacataaaaagccctaaaaatgagtaaaaaattacatgacccagtccatttctcccccttggaaaaacgtttggacgttgggaagaatgatgccacagggctggtgtgtggggaagctagaatcctggccccgcctctgccagccctgcaccataggcaggtgtgccatctcagcgggaaggggaggactggctgctgcagcctgtcctgctctgtgagtgctgagaacatgctggtgtggcctcaatttcagccagtgccaggagaatcacttgaaccaggaggtggaggttgcagtgatccaagatcaagccactggactccaacctgggcaaccatcacaaaactcccatctcaaaataaaaatacaaacatta

SEQ ID NO: 438901 - DNA, 1422 bp, Homo sapiens
cgccgcagtcgagcggtcggtcgccacggtaacgcgcgcgggcaggtgtccgaccatgagcgtccgggtcgcacgggtagcgtgggtcaggggcttgggcgccagctaccgccgcggcgcctcgagcttcccggtgcctccgccgggcgcccagggtgtagcggagctgctgcgagatgcgaccggggcggaggaggaggcgccctgggcggcgacggagcggcgaatgccgggccagtgctccgtgctgctcttcccgggccagggcagccaggtggtgggcatgggccgcggtctgctcaactacccgcgcgtccgcgaactctacgccgccgcccgccgcgtgctgggctacgacctgctggaactgagcctgcacgggccgcaggagaccctggaccgcaccgtgcactgtcagcccgcgatcttcgtggcatcgctggccgctgtcgagaaactacatcacctgcagccctcggtgaggcccgaggccccgtgacaggagggggaaggtgattgagaactgtgttgctgctgctggattcagtgtgggagagtttgcagccctagtgtttgccggagccatggaatttgctgaaggtttgtatgcagtgaaaatccgagctgaggccatgcaggaagcttcagaagctgtccccagtgggatgctgtctgtcctcggccagcctcagtccaagttcaacttcgcctgtttggaagcccgggaacactgcaagtctttaggcatagagaaccccgtatgtgaagtgtccaactacctctttccagattgcagggtgatttcaggacaccaagaggctctacggtttctccagaagaattcctctaagtttcatttcagacgcaccaggatgttgccggttagtggcgcattccacacccgcctcatggagccagccgtggagcccctgacgcaagctttaaaggcagtcgacattaagaagcctctggtttctgtctactccaacgtccacgcgcatagatacaggcatcccgggcacatccacaagctgctggcccagcagctggtctccccagtgaagtgggagcagacgatgcatgccatatacgaaaggaaaaagggcagggggttcccccaaactttcgaagtaggccctggcaggcagctgggagccatcctgaagagctgtaacatgcaggcctggaagtcctacagcgccgtggatgtgctgcagaccctcgaacatgtggacctggaccctcaggagcccccgagatgactgcagggggctcaaatgcgatgaccccctctgtcctcctgaggagaggctgtaggctgtgcctgtcgccccctaccttcctaatggctcctcctctgaggagtgaaagggatttgtttgcaacgtgctttgaaggccacataaaaagccctaaaaatga

SEQ ID NO: 438902 - DNA, 1209 bp, Homo sapiens
cgccgcagtcgagcggtcggtcgccacggtaacgcgcgcgggcaggtgtccgaccatgagcgtccgggtcgcacgggtagcgtgggtcaggggcttgggcgccagctaccgccgcggcgcctcgagcttcccggtgcctccgccgggcgcccagggtgtagcggagctgctgcgagatgcgaccggggcggaggaggaggcgccctgggcggcgacggagcggcgaatgccgggccagtgctccgtgctgctcttcccgggccagggcagccaggtggtgggcatgggccgcggtctgctcaactacccgcgcgtccgcgaactctacgccgccgcccgccgcgtgctgggctacgacctgctggaactgagcctgcacgggccgcaggagaccctggaccgcaccgtgcactgtcagcccgcgatcttcgtggcatcgctggccgctgtcgagaaactacatcacctgcagccctcggttcacccacctcggcctcccaaagtgctaggattacaggtgattgagaactgtgttgctgctgctggattcagtgtgggagagtttgcagccctagtgtttgccggagccatggaatttgctgaaggctctacggtttctccagaagaattcctctaagtttcatttcagacgcaccaggatgttgccggttagtggcgcattccacacccgcctcatggagccagccgtggagcccctgacgcaagctttaaaggcagtcgacattaagaagcctctggtttctgtctactccaacgtccacgcgcatagatacaggcatcccgggcacatccacaagctgctggcccagcagctggtctccccagtgaagtgggagcagacgatgcatgccatatacgaaaggaaaaagggcagggggttcccccaaactttcgaagtaggccctggcaggcagctgggagccatcctgaagagctgtaacatgcaggcctggaagtcctacagcgccgtggatgtgctgcagaccctcgaacatgtggacctggaccctcaggagcccccgagatgactgcagggggctcaaatgcgatgaccccctctgtcctcctgaggagaggctgtaggctgtgcctgtcgccccctaccttcctaatggctcctcctctgaggagtgaaagggatttgtttgcaacgtgctttgaaggccacataaaaagccctaaaaatga

SEQ ID NO: 438903 - DNA, 2066 bp, Homo sapiens
cgccgcagtcgagcggtcggtcgccacggtaacgcgcgcgggcaggtgtccgaccatgagcgtccgggtcgcacgggtagcgtgggtcaggggcttgggcgccagctaccgccgcggcgcctcgagcttcccggtgcctccgccgggcgcccagggtgtagcggagctgctgcgagatgcgaccggggcggaggaggaggcgccctgggcggcgacggagcggcgaatgccgggccagtgctccgtgctgctcttcccgggccagggcagccaggtggtgggcatgggccgcggtctgctcaactacccgcgcgtccgcgaactctacgccgccgcccgccgcgtgctgggctacgacctgctggaactgagcctgcacgggccgcaggagaccctggaccgcaccgtgcactgtcagcccgcgatcttcgtggcatcgctggccgctgtcgagaaactacatcacctgcagccctcggtgattgagaactgtgttgctgctgctggattcagtgtgggagagtttgcagccctagtgtttgccggagccatggaatttgctgaaggtttgtatgcagtgaaaatccgagctgaggccatgcaggaagcttcagaagctgtccccagtgggatgctgtctgtcctcggccagcctcagtccaagttcaacttcgcctgtttggaagcccgggaacactgcaagtctttaggcatagagaaccccgtatgtgaagtgtccaactacctctttccagattgcagggtgatttcaggacaccaagaggctctacggtttctccagaagaattcctctaagtttcatttcagacgcaccaggatgttgccggttagtggcgcattccacacccgcctcatggagccagccgtggagcccctgacgcaagctttaaaggcagtcgacattaagaagcctctggtttctgtctactccaacgtccacgcgcatagatacaggcatcccgggcacatccacaagctgctggcccagcagctggtctccccagtgaagtgggagcagacgatgcatgccatatacgaaaggaaaaagggcagggggttcccccaaactttcgaagtaggccctggcaggcagctgggagccatcctgaagagctgtaacatgcaggcctggaagtcctacagcgccgtggatgtgctgcagaccctcgaacatgtggacctggaccctcaggagcccccgagatgactgcagggggctcaaatgcgatgaccccctctgtcctcctgaggagaggctgtaggctgtgcctgtcgccccctaccttcctaatggctcctcctctgaggagtgaaagggatttgtttgcaacgtgctttgaaggccacataaaaagccctaaaaatgagtaaaaaattacatgacccagtccatttctcccccttggaaaaacgtttggacgttgggaagaatgatgccacagggctggtgtgtggggaagctagaatcctggccccgcctctgccagccctgcaccataggcaggtgtgccatctcagcgggaaggggaggactggctgctgcagcctgtcctgctctgtgagtgctgagaacatgctggtgtggcctcaatttcagccagtgccaggggagcccctccaccacccccagcctgccccccagggctcctttgtcacaaatctgaaaggttttagaacccagttggccttggcagttttgttcacctcctcacttgacagctgggagacagaggcccacatttatggacatacccaagagatatgtattgcctgctgtgtgctagagagtgagtgcgctctgttctggtagaaaggtccttgagtgaggtgcggggtgtggggagtgccaggtagggagggcgactgaggccctggtcctaggggtggaaccatggaggaacaccctggtcacccactgggactgcgggtctgcggggcgccagagggagcacagcacatacctgcctcggagctgacccctggctccatgccccgtcctcagagcagctcctgcgccaatattaagtatgagacattccaagctg

SEQ ID NO: 438904 - DNA, 1848 bp, Homo sapiens
cgccgcagtcgagcggtcggtcgccacggtaacgcgcgcgggcaggtgtccgaccatgagcgtccgggtcgcacgggtagcgtgggtcaggggcttgggcgccagctaccgccgcggcgcctcgagcttcccggtgcctccgccgggcgcccagggtgtagcggagctgctgcgagatgcgaccggggcggaggaggaggcgccctgggcggcgacggagcggcgaatgccgggccagtgctccgtgctgctcttcccgggccagggcagccaggtggtgggcatgggccgcggtctgctcaactacccgcgcgtccgcgaactctacgccgccgcccgccgcgtgctgggctacgacctgctggaactgagcctgcacgggccgcaggagaccctggaccgcaccgtgcactgtcagcccgcgatcttcgtggcatcgctggccgctgtcgagaaactacatcacctgcagccctcggtgattgagaactgtgttgctgctgctggattcagtgtgggagagtttgcagccctagtgtttgccggagccatggaatttgctgaaggctctacggtttctccagaagaattcctctaagtttcatttcagacgcaccaggatgttgccggttagtggcgcattccacacccgcctcatggagccagccgtggagcccctgacgcaagctttaaaggcagtcgacattaagaagcctctggtttctgtctactccaacgtccacgcgcatagatacaggcatcccgggcacatccacaagctgctggcccagcagctggtctccccagtgaagtgggagcagacgatgcatgccatatacgaaaggaaaaagggcagggggttcccccaaactttcgaagtaggccctggcaggcagctgggagccatcctgaagagctgtaacatgcaggcctggaagtcctacagcgccgtggatgtgctgcagaccctcgaacatgtggacctggaccctcaggagcccccgagatgactgcagggggctcaaatgcgatgaccccctctgtcctcctgaggagaggctgtaggctgtgcctgtcgccccctaccttcctaatggctcctcctctgaggagtgaaagggatttgtttgcaacgtgctttgaaggccacataaaaagccctaaaaatgagtaaaaaattacatgacccagtccatttctcccccttggaaaaacgtttggacgttgggaagaatgatgccacagggctggtgtgtggggaagctagaatcctggccccgcctctgccagccctgcaccataggcaggtgtgccatctcagcgggaaggggaggactggctgctgcagcctgtcctgctctgtgagtgctgagaacatgctggtgtggcctcaatttcagccagtgccaggggagcccctccaccacccccagcctgccccccagggctcctttgtcacaaatctgaaaggttttagaacccagttggccttggcagttttgttcacctcctcacttgacagctgggagacagaggcccacatttatggacatacccaagagatatgtattgcctgctgtgtgctagagagtgagtgcgctctgttctggtagaaaggtccttgagtgaggtgcggggtgtggggagtgccaggtagggagggcgactgaggccctggtcctaggggtggaaccatggaggaacaccctggtcacccactgggactgcgggtctgcggggcgccagagggagcacagcacatacctgcctcggagctgacccctggctccatgccccgtcctcagagcagctcctgcgccaatattaagtatgagacattccaagctg

SEQ ID NO: 438905 - DNA, 1204 bp, Homo sapiens
cgccgcagtcgagcggtcggtcgccacggtaacgcgcgcgggcaggtgtccgaccatgagcgtccgggtcgcacgggtagcgtgggtcaggggcttgggcgccagctaccgccgcggcgcctcgagcttcccggtgcctccgccgggcgcccagggtgtagcggagctgctgcgagatgcgaccggggcggaggaggaggcgccctgggcggcgacggagcggcgaatgccgggccagtgctccgtgctgctcttcccgggccagggcagccaggtggtgggcatgggccgcggtctgctcaactacccgcgcgtccgcgaactctacgccgccgcccgccgcgtgctgggctacgacctgctggaactgagcctgcacgggccgcaggagaccctggaccgcaccgtgcactgtcagcccgcgatcttcgtggcatcgctggccgctgtcgagaaactacatcacctgcagccctcggtgaggcccgaggccccgtgacaggagggggaaggtgattgagaactgtgttgctgctgctggattcagtgtgggagagtttgcagccctagtgtttgccggagccatggaatttgctgaaggctctacggtttctccagaagaattcctctaagtttcatttcagacgcaccaggatgttgccggttagtggcgcattccacacccgcctcatggagccagccgtggagcccctgacgcaagctttaaaggcagtcgacattaagaagcctctggtttctgtctactccaacgtccacgcgcatagatacaggcatcccgggcacatccacaagctgctggcccagcagctggtctccccagtgaagtgggagcagacgatgcatgccatatacgaaaggaaaaagggcagggggttcccccaaactttcgaagtaggccctggcaggcagctgggagccatcctgaagagctgtaacatgcaggcctggaagtcctacagcgccgtggatgtgctgcagaccctcgaacatgtggacctggaccctcaggagcccccgagatgactgcagggggctcaaatgcgatgaccccctctgtcctcctgaggagaggctgtaggctgtgcctgtcgccccctaccttcctaatggctcctcctctgaggagtgaaagggatttgtttgcaacgtgctttgaaggccacataaaaagccctaaaaatga

SEQ ID NO: 438906 - DNA, 4855 bp, Homo sapiens
cgccactccgggtttatttgtttacaagcggattacgtcagctcctccctctcttccctatctctggacccgcctcctgaactcttttcccgcccctttcggctccgaaccggcttgcgtcacaatggtgcgatattcggattggctggagtcggccatcacgctccagctacgccacttccttttcgtggcactataaagggtgctgcacggcgcttgcatctcttcgcctctcggagctggaaatgcagctattgagatcttcgaatgctgcggagctggaggcggaggcagctggggaggtccgagcgatgtgaccaggccgccatcgctcgtctcttcctctctcctgccgcctcctgtctcgaaaataacttttttagtctaaagaaagaaagacaaaagtagtcgtccgcccctcacgccctctcttcctctcagccttccgcccggtgaggaagcccggggtggttgctccgccgtcggggccgcgccgccgagccccggccgccccgggccgcccccgcacgccgcccccatgcatcccttctacacccgggccgccaccatgataggcgagatcgccgccgccgtgtccttcatctccaagtttctccgcaccaaggggctcacgagcgagcgacagctgcagaccttcagccagagcctgcaggagctgctggcagaacattataaacatcactggttcccagaaaagccatgcaagggatcgggttaccgttgtattcgcatcaaccataaaatggatcctctgattggacaggcagcacagcggattggactgagcagtcaggagctgttcaggcttctcccaagtgaactcacactctgggttgacccctatgaagtgtcctacagaattggagaggatggctccatctgtgtgctgtatgaagcctcaccagcaggaggtagcactcaaaacagcaccaacgtgcaaatggtagacagccgaatcagctgtaaggaggaacttctcttgggcagaacgagcccttccaaaaactacaatatgatgactgtatcaggttaagatatagtctgtggatggatcatctgatgatgatggataaatttgatttttgctttgggtgggctcctcttggggatggattatggaatttaaaccatgtcacagctgtgaagatctggcacaagatagaatggtaaaaaaaaaaaaaaattttaagtgacagtgccatagtttggacagtacctttcaatgattaattttaatagcctgtgagtccaagtaaatgatcactttatttgctagggagggaagtcctagggtggtttcagtttctcccagacatacctaaatttttacatcaatccttttaaagaaaatctgtatttcaaagaatctttctctgcagtaaatctcgcaggggaatttgcactattacacttgaaagttgttattgttaaccttttcggcagcttttaataggaaagttaaacgttttaaacatggtagtactggaaattttacaagacttttacctagcacttaaatatgtataaatgtacataaagacaaactagtaagcatgacctggggaaatggtcagaccttgtattgtgtttttggccttgaaagtagcaagtgaccagaatctgccatggcaacaggctttaaaaaagacccttaaaaagacactgtctcaactgtggtgttagcaccagccagctctctgtacatttgctagcttgtagttttctaagactgagtaaacttcttatttttagaaagtggaggtctggtttgtaactttccttgtacttaattgggtaaaagtcttttccacaaaccaccatctattttgtgaactttgttagtcatcttttatttggtaaattatgaactggtgtaaatttgtacagttcatgtatattgattgtggcaaagttgtacagatttctatattttggatgagaaatttttcttctctctataataaatcgtttcttatcttggcattttaatcaatctcttgtcatgattatagaggtttagctaaaagtattttttcttagaagacaggttctataaactgaatctctgttgcacactggtcatgctggaaaaacatttgatgaggaatgaagatgctctgtatatacatgtttaggttttacaggaaacacaggagtagcatgttttaaaaatttctaaagtcaaaacatggacacattcacaggctaatgatctcatgaaataaggataagagaccacggtagcatctaccaaaaatgtgatactcaaaggattacatttcattgcttccctgttgaagtgaagatataaatgttccattctgacccacctttgaaaaacaattactttgccccatggattctttgttcaattagaaatttccccggggcaggtgacccatagtcttaaagaacaggctaaacaccacagagagattggttgctttttgcttttcatcacctgcaagatgtacataaaaatcacataagctggaattcaacaaaaggtatgtttatgaacttttattctcaaaagttgaaatgctgactttctcgattcctcattttcagacttttatttcagataaatactaaaaacctaagtgaaccttgataatgctgtagtgtagattacttcactaccccatataatagaaggacttgctgtttagttgtagaggataacagcgtttttcagtggaaattgaaagtggaaaaattgaattttgctctacacagttaacatatagtggcctttttttggtatatatgtaaacatgttgacactggaaatacgcagtctgaaataaaattagtaattacttgaaattagtaatctcaaataacttttaagaagttatttctacacccaggaataaattattctgattttgtagacaacacaggaataggccactgaatatgcaggtatttagagtacaaatgtctgtggatattattggcacaccattctcgagagttagaattcgtagacccgcaacacatggactacccttgccaattgttatggttttatttttaaacctattctgtgaaaaagctcctcggtatttcaaacttgaattacaataaaaacaccaggtagggttgtttttaaatgggtctcaccccagtgctgactactgttgtttaccaactacatttcatctggtaactccattgaaactaagtacctcaaccattttttttttttatcataaagccttttttcaaatggaaagttgtttttgaagatcttgacatcagactttttcaatctttgaaaatgatggaaacagttaataaaaatgtttattttagaattcaggtgatgtctggcttgtgaggagctgtttataagtttgtctttgaaaaaggcttgcacacatcactctgagaccagctgtttcctgtgactttaaccttaccttccccagacaattgagctgaacctgtatctgcggtacagtagctgtttgtgatgtatttcttgttcactgtttctggggaatgttttgaaatattttattataaatccttttaagataggatgactactttcaaaattattgttgcctttggcaccaggaattcatagttgtgattggcagtaagtttgaggagtgttactttctaagttttaacaggtagttttgaaattatttccttttttccaaatttaagtagtgcctccctctgtaatgttgaaacaaggcttcaagtggattgtatagcaagagttaccctggttcatgcaggataatgcggctgttatctttgtcatctggaatgggaatctcatgtctttatccttatgtgcaatatttctataataatagactggaaaggccaccagaaagtggctttcaggtacattgcacaaatagtttccttaagtcattataactcacacattgcaagtaattaattttgttttgtataggtgttgcagtttatgaaattggccttcaagttaaaaggaaggaagccgtattcccgatggctagtgtttaatgactacaggtttccaggctccctttaatcttgggagcaaataaatctactattggacttctccctgcgtgacttttaacatttctgatactctctcttcttcctctttacagaagagaggtatgataactgaagttgtactttgcatattgaagtttaaagatacttcctctccccttttcacccctatttcaaatgatgtgataaaatcctcttgataggctatatggagaacatttgtcaatagttttatctatgcatggaagtcttcaaaaagtatatcttggattgtctaaaactgaatagatttcttatttatctgaaggtatacagactgccaacattttagacttatctctcagtctctgccactgaacttttatatatggctgctatcaaaatataaccggtttattttcatatttggaactaatataacagtatcacaaaatcttttacagtaagatagtttgtaataccagccgacccagctgcttaactgagtccttaaatcatttaatatatgggactgtaaatagagaaatctgtacattatgagatctgatttctggttatgcctatagatctttattttctttatccctatagatcattttcttctgatgttaagtgttatatttttgaaatgctcctaaacaagtaagccttagattgtattaatcctgaggattgataccatttcctcaacactttgtggagtatgattgacaccagtttttttttgactgcaggtttaacttggcttatcacttttcgtattgctcagtatgtccaagataggaataaaaaaatgtagttc

SEQ ID NO: 438907 - DNA, 4629 bp, Homo sapiens
ggttgcttgaggcttgtggagatctacgatatgctgcgagctcgtaggatcgcgccggtagcatgtccaaggtcgcgagccatgatcagccgagtgccgccatcgctcgtctcttcctctctcctgccgcctcctgtctcgaaaataacttttttagtctaaagaaagaaagacaaaagtagtcgtccgcccctcacgccctctcttcctctcagccttccgcccggtgaggaagcccggggtggttgctccgccgtcggggccgcgccgccgagccccggccgccccgggccgcccccgcacgccgcccccatgcatcccttctacacccgggccgccaccatgataggcgagatcgccgccgccgtgtccttcatctccaagtttctccgcaccaaggggctcacgagcgagcgacagctgcagaccttcagccagagcctgcaggagctgctggcagaacattataaacatcactggttcccagaaaagccatgcaagggatcgggttaccgttgtattcgcatcaaccataaaatggatcctctgattggacaggcagcacagcggattggactgagcagtcaggagctgttcaggcttctcccaagtgaactcacactctgggttgacccctatgaagtgtcctacagaattggagaggatggctccatctgtgtgctgtatgaagcctcaccagcaggaggtagcactcaaaacagcaccaacgtgcaaatggtagacagccgaatcagctgtaaggaggaacttctcttgggcagaacgagcccttccaaaaactacaatatgatgactgtatcaggttaagatatagtctgtggatggatcatctgatgatgatggataaatttgatttttgctttgggtgggctcctcttggggatggattatggaatttaaaccatgtcacagctgtgaagatctggcacaagatagaatggtaaaaaaaaaaaaaaattttaagtgacagtgccatagtttggacagtacctttcaatgattaattttaatagcctgtgagtccaagtaaatgatcactttatttgctagggagggaagtcctagggtggtttcagtttctcccagacatacctaaatttttacatcaatccttttaaagaaaatctgtatttcaaagaatctttctctgcagtaaatctcgcaggggaatttgcactattacacttgaaagttgttattgttaaccttttcggcagcttttaataggaaagttaaacgttttaaacatggtagtactggaaattttacaagacttttacctagcacttaaatatgtataaatgtacataaagacaaactagtaagcatgacctggggaaatggtcagaccttgtattgtgtttttggccttgaaagtagcaagtgaccagaatctgccatggcaacaggctttaaaaaagacccttaaaaagacactgtctcaactgtggtgttagcaccagccagctctctgtacatttgctagcttgtagttttctaagactgagtaaacttcttatttttagaaagtggaggtctggtttgtaactttccttgtacttaattgggtaaaagtcttttccacaaaccaccatctattttgtgaactttgttagtcatcttttatttggtaaattatgaactggtgtaaatttgtacagttcatgtatattgattgtggcaaagttgtacagatttctatattttggatgagaaatttttcttctctctataataaatcgtttcttatcttggcattttaatcaatctcttgtcatgattatagaggtttagctaaaagtattttttcttagaagacaggttctataaactgaatctctgttgcacactggtcatgctggaaaaacatttgatgaggaatgaagatgctctgtatatacatgtttaggttttacaggaaacacaggagtagcatgttttaaaaatttctaaagtcaaaacatggacacattcacaggctaatgatctcatgaaataaggataagagaccacggtagcatctaccaaaaatgtgatactcaaaggattacatttcattgcttccctgttgaagtgaagatataaatgttccattctgacccacctttgaaaaacaattactttgccccatggattctttgttcaattagaaatttccccggggcaggtgacccatagtcttaaagaacaggctaaacaccacagagagattggttgctttttgcttttcatcacctgcaagatgtacataaaaatcacataagctggaattcaacaaaaggtatgtttatgaacttttattctcaaaagttgaaatgctgactttctcgattcctcattttcagacttttatttcagataaatactaaaaacctaagtgaaccttgataatgctgtagtgtagattacttcactaccccatataatagaaggacttgctgtttagttgtagaggataacagcgtttttcagtggaaattgaaagtggaaaaattgaattttgctctacacagttaacatatagtggcctttttttggtatatatgtaaacatgttgacactggaaatacgcagtctgaaataaaattagtaattacttgaaattagtaatctcaaataacttttaagaagttatttctacacccaggaataaattattctgattttgtagacaacacaggaataggccactgaatatgcaggtatttagagtacaaatgtctgtggatattattggcacaccattctcgagagttagaattcgtagacccgcaacacatggactacccttgccaattgttatggttttatttttaaacctattctgtgaaaaagctcctcggtatttcaaacttgaattacaataaaaacaccaggtagggttgtttttaaatgggtctcaccccagtgctgactactgttgtttaccaactacatttcatctggtaactccattgaaactaagtacctcaaccattttttttttttatcataaagccttttttcaaatggaaagttgtttttgaagatcttgacatcagactttttcaatctttgaaaatgatggaaacagttaataaaaatgtttattttagaattcaggtgatgtctggcttgtgaggagctgtttataagtttgtctttgaaaaaggcttgcacacatcactctgagaccagctgtttcctgtgactttaaccttaccttccccagacaattgagctgaacctgtatctgcggtacagtagctgtttgtgatgtatttcttgttcactgtttctggggaatgttttgaaatattttattataaatccttttaagataggatgactactttcaaaattattgttgcctttggcaccaggaattcatagttgtgattggcagtaagtttgaggagtgttactttctaagttttaacaggtagttttgaaattatttccttttttccaaatttaagtagtgcctccctctgtaatgttgaaacaaggcttcaagtggattgtatagcaagagttaccctggttcatgcaggataatgcggctgttatctttgtcatctggaatgggaatctcatgtctttatccttatgtgcaatatttctataataatagactggaaaggccaccagaaagtggctttcaggtacattgcacaaatagtttccttaagtcattataactcacacattgcaagtaattaattttgttttgtataggtgttgcagtttatgaaattggccttcaagttaaaaggaaggaagccgtattcccgatggctagtgtttaatgactacaggtttccaggctccctttaatcttgggagcaaataaatctactattggacttctccctgcgtgacttttaacatttctgatactctctcttcttcctctttacagaagagaggtatgataactgaagttgtactttgcatattgaagtttaaagatacttcctctccccttttcacccctatttcaaatgatgtgataaaatcctcttgataggctatatggagaacatttgtcaatagttttatctatgcatggaagtcttcaaaaagtatatcttggattgtctaaaactgaatagatttcttatttatctgaaggtatacagactgccaacattttagacttatctctcagtctctgccactgaacttttatatatggctgctatcaaaatataaccggtttattttcatatttggaactaatataacagtatcacaaaatcttttacagtaagatagtttgtaataccagccgacccagctgcttaactgagtccttaaatcatttaatatatgggactgtaaatagagaaatctgtacattatgagatctgatttctggttatgcctatagatctttattttctttatccctatagatcattttcttctgatgttaagtgttatatttttgaaatgctcctaaacaagtaagccttagattgtattaatcctgaggattgataccatttcctcaacactttgtggagtatgattgacaccagtttttttttgactgcaggtttaacttggcttatcacttttcgtattgctcagtatgtccaagataggaataaaaaaatgtagttc

SEQ ID NO: 438908 - DNA, 4812 bp, Homo sapiens
cgccactccgggtttatttgtttacaagcggattacgtcagctcctccctctcttccctatctctggacccgcctcctgaactcttttcccgcccctttcggctccgaaccggcttgcgtcacaatggtgcgatattcggattggctggagtcggccatcacgctccagctacgccacttccttttcgtggcactataaagggtgctgcacggcgcttgcatctcttcgcctctcggagctggaaatgcagctattgagatcttcgaatgctgcggagctggaggcggaggcagctggggaggtccgagcgatgtgaccaggccgccatcgctcgtctcttcctctctcctgccgcctcctgtctcgaaaataacttttttagtctaaagaaagaaagacaaaagtagtcgtccgcccctcacgccctctcttcctctcagccttccgcccggtgaggaagcccggggtggttgctccgccgtcggggccgcgccgccgagccccggccgccccgggccgcccccgcacgccgcccccatgcatcccttctacacccgggccgccaccatgataggcgagatcgccgccgccgtgtccttcatctccaagtttctccgcaccaaggggctcacgagcgagcgacagctgcagaccttcagccagagcctgcaggagctgctggcagaacattataaacatcactggttcccagaaaagccatgcaagggatcgggttaccgttgtattcgcatcaaccataaaatggatcctctgattggacaggcagcacagcggattggactgagcagtcaggagctgttcaggcttctcccaagtgaactcacactctgggttgacccctatgaagtgtcctacagaattggagaggatggctccatctgtgtgctgtatgaagcctcaccagcaggaggtagcactcaaaacagcaccaacgtgcaaatggtagacagccgaatcagctgtaaggaggaacttctcttgggcagaacgagcccttccaaaaactacaatatgatgactgtatcaggttaagatatagtctgtggatggatcatctgatgatgatggataaatttgatttttgctttgggtgggctcctcttggggatggattatggaatttaaaccatgtcacagctgtgaagatctggcacaagatagaatggtaaaaaaaaaaaaaaattttaagtgacagtgccatagtttggacagtacctttcaatgattaattttaatagcctgtgagtccaagtaaatgatcactttatttgctagggagggaagtcctagggtggtttcagtttctcccagacatacctaaatttttacatcaatccttttaaagaaaatctgtatttcaaagaatctttctctgcagtaaatctcgcaggggaatttgcttttaataggaaagttaaacgttttaaacatggtagtactggaaattttacaagacttttacctagcacttaaatatgtataaatgtacataaagacaaactagtaagcatgacctggggaaatggtcagaccttgtattgtgtttttggccttgaaagtagcaagtgaccagaatctgccatggcaacaggctttaaaaaagacccttaaaaagacactgtctcaactgtggtgttagcaccagccagctctctgtacatttgctagcttgtagttttctaagactgagtaaacttcttatttttagaaagtggaggtctggtttgtaactttccttgtacttaattgggtaaaagtcttttccacaaaccaccatctattttgtgaactttgttagtcatcttttatttggtaaattatgaactggtgtaaatttgtacagttcatgtatattgattgtggcaaagttgtacagatttctatattttggatgagaaatttttcttctctctataataaatcgtttcttatcttggcattttaatcaatctcttgtcatgattatagaggtttagctaaaagtattttttcttagaagacaggttctataaactgaatctctgttgcacactggtcatgctggaaaaacatttgatgaggaatgaagatgctctgtatatacatgtttaggttttacaggaaacacaggagtagcatgttttaaaaatttctaaagtcaaaacatggacacattcacaggctaatgatctcatgaaataaggataagagaccacggtagcatctaccaaaaatgtgatactcaaaggattacatttcattgcttccctgttgaagtgaagatataaatgttccattctgacccacctttgaaaaacaattactttgccccatggattctttgttcaattagaaatttccccggggcaggtgacccatagtcttaaagaacaggctaaacaccacagagagattggttgctttttgcttttcatcacctgcaagatgtacataaaaatcacataagctggaattcaacaaaaggtatgtttatgaacttttattctcaaaagttgaaatgctgactttctcgattcctcattttcagacttttatttcagataaatactaaaaacctaagtgaaccttgataatgctgtagtgtagattacttcactaccccatataatagaaggacttgctgtttagttgtagaggataacagcgtttttcagtggaaattgaaagtggaaaaattgaattttgctctacacagttaacatatagtggcctttttttggtatatatgtaaacatgttgacactggaaatacgcagtctgaaataaaattagtaattacttgaaattagtaatctcaaataacttttaagaagttatttctacacccaggaataaattattctgattttgtagacaacacaggaataggccactgaatatgcaggtatttagagtacaaatgtctgtggatattattggcacaccattctcgagagttagaattcgtagacccgcaacacatggactacccttgccaattgttatggttttatttttaaacctattctgtgaaaaagctcctcggtatttcaaacttgaattacaataaaaacaccaggtagggttgtttttaaatgggtctcaccccagtgctgactactgttgtttaccaactacatttcatctggtaactccattgaaactaagtacctcaaccattttttttttttatcataaagccttttttcaaatggaaagttgtttttgaagatcttgacatcagactttttcaatctttgaaaatgatggaaacagttaataaaaatgtttattttagaattcaggtgatgtctggcttgtgaggagctgtttataagtttgtctttgaaaaaggcttgcacacatcactctgagaccagctgtttcctgtgactttaaccttaccttccccagacaattgagctgaacctgtatctgcggtacagtagctgtttgtgatgtatttcttgttcactgtttctggggaatgttttgaaatattttattataaatccttttaagataggatgactactttcaaaattattgttgcctttggcaccaggaattcatagttgtgattggcagtaagtttgaggagtgttactttctaagttttaacaggtagttttgaaattatttccttttttccaaatttaagtagtgcctccctctgtaatgttgaaacaaggcttcaagtggattgtatagcaagagttaccctggttcatgcaggataatgcggctgttatctttgtcatctggaatgggaatctcatgtctttatccttatgtgcaatatttctataataatagactggaaaggccaccagaaagtggctttcaggtacattgcacaaatagtttccttaagtcattataactcacacattgcaagtaattaattttgttttgtataggtgttgcagtttatgaaattggccttcaagttaaaaggaaggaagccgtattcccgatggctagtgtttaatgactacaggtttccaggctccctttaatcttgggagcaaataaatctactattggacttctccctgcgtgacttttaacatttctgatactctctcttcttcctctttacagaagagaggtatgataactgaagttgtactttgcatattgaagtttaaagatacttcctctccccttttcacccctatttcaaatgatgtgataaaatcctcttgataggctatatggagaacatttgtcaatagttttatctatgcatggaagtcttcaaaaagtatatcttggattgtctaaaactgaatagatttcttatttatctgaaggtatacagactgccaacattttagacttatctctcagtctctgccactgaacttttatatatggctgctatcaaaatataaccggtttattttcatatttggaactaatataacagtatcacaaaatcttttacagtaagatagtttgtaataccagccgacccagctgcttaactgagtccttaaatcatttaatatatgggactgtaaatagagaaatctgtacattatgagatctgatttctggttatgcctatagatctttattttctttatccctatagatcattttcttctgatgttaagtgttatatttttgaaatgctcctaaacaagtaagccttagattgtattaatcctgaggattgataccatttcctcaacactttgtggagtatgattgacaccagtttttttttgactgcaggtttaacttggcttatcacttttcgtattgctcagtatgtccaagataggaataaaaaaatgtagttc

SEQ ID NO: 438909 - DNA, 4802 bp, Homo sapiens
cgccactccgggtttatttgtttacaagcggattacgtcagctcctccctctcttccctatctctggacccgcctcctgaactcttttcccgcccctttcggctccgaaccggcttgcgtcacaatggtgcgatattcggattggctggagtcggccatcacgctccagctacgccacttccttttcgtggcactataaagggtgctgcacggcgcttgcatctcttcgcctctcggagctggaaatgcagctattgagatcttcgaatgctgcggagctggaggcggaggcagctggggaggtccgagcgatgtgaccaggccgccatcgctcgtctcttcctctctcctgccgcctcctgtctcgaaaataacttttttagtctaaagaaagaaagacaaaagtagtcgtccgcccctcacgccctctcttcctctcagccttccgcccggtgaggaagcccggggtggttgctccgccgtcggggccgcgccgccgagccccggccgccccgggccgcccccgcacgccgcccccatgcatcccttctacacccgggccgccaccatgataggcgagatcgccgccgccgtgtccttcatctccaagtttctccgcaccaaggggctcacgagcgagcgacagctgcagaccttcagccagagcctgcaggagctgctggcagaacattataaacatcactggttcccagaaaagccatgcaagggatcgggttaccgttgtattcgcatcaaccataaaatggatcctctgattggacaggcagcacagcggattggactgagcagtcaggagctgttcaggcttctcccaagtgaactcacactctgggttgacccctatgaagtgtcctacagaattggagaggatggctccatctgtgtgctgtatgaagcctcaccagcaggaggtagcactcaaaacagcaccaacgtgcaaatggtagacagccgaatcagctgtaaggaggaacttctcttgggcagaacgagcccttccaaaaactacaatatgatgactgtatcaggttaagatatagtctgtggatggatcatctgatgatgatggataaatttgatttttgctttgggtgggctcctcttggggatggattatggaatttaaaccatgtcacagctgtgaagatctggcacaagatagaatggtaaaaaaaaaaaaaaattttaagtgacagtgccatagtttggacagtacctttcaatgattaattttaatagcctgtgagtccaagtaaatgatcactttatttgctagggagggaagtcctagggtggtttcagtttctcccagacatacctaaatttttacatcaatccttttaaagaaaatctgtatttcaaagaatctttctctgcagtaaatctcgcaggggaatttgcactattacacttgaaagttgttattgttaaccttttcggcagcttttaataggaaagttaaacgttttaaacatggtagtactggaaattttacaagacttttacctagcacttaaatatgtataaatgtacataaagacaaactagtaagcatgacctggggaaatggtcagaccttgtattgtgtttttggccttgaaagtagcaagtgaccagaatctgccatggcaacaggctttaaaaaagacccttaaaaagacactgtctcaactgtggtgttagcaccagccagctctctgtacatttgctagcttgtagttttctaagactgagtaaacttcttatttttagaaagtggaggtctggtttgtaactttccttgtacttaattggttttatttggtaaattatgaactggtgtaaatttgtacagttcatgtatattgattgtggcaaagttgtacagatttctatattttggatgagaaatttttcttctctctataataaatcgtttcttatcttggcattttaatcaatctcttgtcatgattatagaggtttagctaaaagtattttttcttagaagacaggttctataaactgaatctctgttgcacactggtcatgctggaaaaacatttgatgaggaatgaagatgctctgtatatacatgtttaggttttacaggaaacacaggagtagcatgttttaaaaatttctaaagtcaaaacatggacacattcacaggctaatgatctcatgaaataaggataagagaccacggtagcatctaccaaaaatgtgatactcaaaggattacatttcattgcttccctgttgaagtgaagatataaatgttccattctgacccacctttgaaaaacaattactttgccccatggattctttgttcaattagaaatttccccggggcaggtgacccatagtcttaaagaacaggctaaacaccacagagagattggttgctttttgcttttcatcacctgcaagatgtacataaaaatcacataagctggaattcaacaaaaggtatgtttatgaacttttattctcaaaagttgaaatgctgactttctcgattcctcattttcagacttttatttcagataaatactaaaaacctaagtgaaccttgataatgctgtagtgtagattacttcactaccccatataatagaaggacttgctgtttagttgtagaggataacagcgtttttcagtggaaattgaaagtggaaaaattgaattttgctctacacagttaacatatagtggcctttttttggtatatatgtaaacatgttgacactggaaatacgcagtctgaaataaaattagtaattacttgaaattagtaatctcaaataacttttaagaagttatttctacacccaggaataaattattctgattttgtagacaacacaggaataggccactgaatatgcaggtatttagagtacaaatgtctgtggatattattggcacaccattctcgagagttagaattcgtagacccgcaacacatggactacccttgccaattgttatggttttatttttaaacctattctgtgaaaaagctcctcggtatttcaaacttgaattacaataaaaacaccaggtagggttgtttttaaatgggtctcaccccagtgctgactactgttgtttaccaactacatttcatctggtaactccattgaaactaagtacctcaaccattttttttttttatcataaagccttttttcaaatggaaagttgtttttgaagatcttgacatcagactttttcaatctttgaaaatgatggaaacagttaataaaaatgtttattttagaattcaggtgatgtctggcttgtgaggagctgtttataagtttgtctttgaaaaaggcttgcacacatcactctgagaccagctgtttcctgtgactttaaccttaccttccccagacaattgagctgaacctgtatctgcggtacagtagctgtttgtgatgtatttcttgttcactgtttctggggaatgttttgaaatattttattataaatccttttaagataggatgactactttcaaaattattgttgcctttggcaccaggaattcatagttgtgattggcagtaagtttgaggagtgttactttctaagttttaacaggtagttttgaaattatttccttttttccaaatttaagtagtgcctccctctgtaatgttgaaacaaggcttcaagtggattgtatagcaagagttaccctggttcatgcaggataatgcggctgttatctttgtcatctggaatgggaatctcatgtctttatccttatgtgcaatatttctataataatagactggaaaggccaccagaaagtggctttcaggtacattgcacaaatagtttccttaagtcattataactcacacattgcaagtaattaattttgttttgtataggtgttgcagtttatgaaattggccttcaagttaaaaggaaggaagccgtattcccgatggctagtgtttaatgactacaggtttccaggctccctttaatcttgggagcaaataaatctactattggacttctccctgcgtgacttttaacatttctgatactctctcttcttcctctttacagaagagaggtatgataactgaagttgtactttgcatattgaagtttaaagatacttcctctccccttttcacccctatttcaaatgatgtgataaaatcctcttgataggctatatggagaacatttgtcaatagttttatctatgcatggaagtcttcaaaaagtatatcttggattgtctaaaactgaatagatttcttatttatctgaaggtatacagactgccaacattttagacttatctctcagtctctgccactgaacttttatatatggctgctatcaaaatataaccggtttattttcatatttggaactaatataacagtatcacaaaatcttttacagtaagatagtttgtaataccagccgacccagctgcttaactgagtccttaaatcatttaatatatgggactgtaaatagagaaatctgtacattatgagatctgatttctggttatgcctatagatctttattttctttatccctatagatcattttcttctgatgttaagtgttatatttttgaaatgctcctaaacaagtaagccttagattgtattaatcctgaggattgataccatttcctcaacactttgtggagtatgattgacaccagtttttttttgactgcaggtttaacttggcttatcacttttcgtattgctcagtatgtccaagataggaataaaaaaatgtagttc

SEQ ID NO: 438910 - DNA, 4801 bp, Homo sapiens
cgccactccgggtttatttgtttacaagcggattacgtcagctcctccctctcttccctatctctggacccgcctcctgaactcttttcccgcccctttcggctccgaaccggcttgcgtcacaatggtgcgatattcggattggctggagtcggccatcacgctccagctacgccacttccttttcgtggcactataaagggtgctgcacggcgcttgcatctcttcgcctctcggagctggaaatgcagctattgagatcttcgaatgctgcggagctggaggcggaggcagctggggaggtccgagcgatgtgaccaggccgccatcgctcgtctcttcctctctcctgccgcctcctgtctcgaaaataacttttttagtctaaagaaagaaagacaaaagtagtcgtccgcccctcacgccctctcttcctctcagccttccgcccggtgaggaagcccggggtggttgctccgccgtcggggccgcgccgccgagccccggccgccccgggccgcccccgcacgccgcccccatgcatcccttctacacccgggccgccaccatgataggcgagatcgccgccgccgtgtccttcatctccaagtttctccgcaccaaggggctcacgagcgagcgacagctgcagaccttcagccagagcctgcaggagctgctggcagaacattataaacatcactggttcccagaaaagccatgcaagggatcgggttaccgttgtattcgcatcaaccataaaatggatcctctgattggacaggcagcacagcggattggactgagcagtcaggagctgttcaggcttctcccaagtgaactcacactctgggttgacccctatgaagtgtcctacagaattggagaggatggctccatctgtgtgctgtatgaagcctcaccagcaggaggtagcactcaaaacagcaccaacgtgcaaatggtagacagccgaatcagctgtaaggaggaacttctcttgggcagaacgagcccttccaaaaactacaatatgatgactgtatcaggttaagatatagtctgtggatggatcatctgatgatgatggataaatttgatttttgctttgggtgggctcctcttggggatggattatggaatttaaaccatgtcacagctgtgaagatctggcacaagatagaatggtaaaaaaaaaaaaaaattttaagtgacagtgccatagtttggacagtacctttcaatgattaattttaatagcctgtgagtccaagtaaatgatcactttatttgctagggagggaagtcctagggtggtttcagtttctcccagacatacctaaatttttacatcaatccttttaaagaaaatctgtatttcaaagaatctttctctgcagtaaatctcgcaggggaatttgcactattacacttgaaagttgttattgttaaccttttcggcagcttttaataggaaagttaaacgttttaaacatggtagtactggaaattttacaagacttttacctagcacttaaatatgtataaatgtacataaagacaaactagtaagcatgacctggggaaatggtcagaccttgtattgtgtttttggccttgaaagtagcaagtgaccagaatctgccatggcaacaggctttaaaaaagacccttactagcttgtagttttctaagactgagtaaacttcttatttttagaaagtggaggtctggtttgtaactttccttgtacttaattgggtaaaagtcttttccacaaaccaccatctattttgtgaactttgttagtcatcttttatttggtaaattatgaactggtgtaaatttgtacagttcatgtatattgattgtggcaaagttgtacagatttctatattttggatgagaaatttttcttctctctataataaatcgtttcttatcttggcattttaatcaatctcttgtcatgattatagaggtttagctaaaagtattttttcttagaagacaggttctataaactgaatctctgttgcacactggtcatgctggaaaaacatttgatgaggaatgaagatgctctgtatatacatgtttaggttttacaggaaacacaggagtagcatgttttaaaaatttctaaagtcaaaacatggacacattcacaggctaatgatctcatgaaataaggataagagaccacggtagcatctaccaaaaatgtgatactcaaaggattacatttcattgcttccctgttgaagtgaagatataaatgttccattctgacccacctttgaaaaacaattactttgccccatggattctttgttcaattagaaatttccccggggcaggtgacccatagtcttaaagaacaggctaaacaccacagagagattggttgctttttgcttttcatcacctgcaagatgtacataaaaatcacataagctggaattcaacaaaaggtatgtttatgaacttttattctcaaaagttgaaatgctgactttctcgattcctcattttcagacttttatttcagataaatactaaaaacctaagtgaaccttgataatgctgtagtgtagattacttcactaccccatataatagaaggacttgctgtttagttgtagaggataacagcgtttttcagtggaaattgaaagtggaaaaattgaattttgctctacacagttaacatatagtggcctttttttggtatatatgtaaacatgttgacactggaaatacgcagtctgaaataaaattagtaattacttgaaattagtaatctcaaataacttttaagaagttatttctacacccaggaataaattattctgattttgtagacaacacaggaataggccactgaatatgcaggtatttagagtacaaatgtctgtggatattattggcacaccattctcgagagttagaattcgtagacccgcaacacatggactacccttgccaattgttatggttttatttttaaacctattctgtgaaaaagctcctcggtatttcaaacttgaattacaataaaaacaccaggtagggttgtttttaaatgggtctcaccccagtgctgactactgttgtttaccaactacatttcatctggtaactccattgaaactaagtacctcaaccattttttttttttatcataaagccttttttcaaatggaaagttgtttttgaagatcttgacatcagactttttcaatctttgaaaatgatggaaacagttaataaaaatgtttattttagaattcaggtgatgtctggcttgtgaggagctgtttataagtttgtctttgaaaaaggcttgcacacatcactctgagaccagctgtttcctgtgactttaaccttaccttccccagacaattgagctgaacctgtatctgcggtacagtagctgtttgtgatgtatttcttgttcactgtttctggggaatgttttgaaatattttattataaatccttttaagataggatgactactttcaaaattattgttgcctttggcaccaggaattcatagttgtgattggcagtaagtttgaggagtgttactttctaagttttaacaggtagttttgaaattatttccttttttccaaatttaagtagtgcctccctctgtaatgttgaaacaaggcttcaagtggattgtatagcaagagttaccctggttcatgcaggataatgcggctgttatctttgtcatctggaatgggaatctcatgtctttatccttatgtgcaatatttctataataatagactggaaaggccaccagaaagtggctttcaggtacattgcacaaatagtttccttaagtcattataactcacacattgcaagtaattaattttgttttgtataggtgttgcagtttatgaaattggccttcaagttaaaaggaaggaagccgtattcccgatggctagtgtttaatgactacaggtttccaggctccctttaatcttgggagcaaataaatctactattggacttctccctgcgtgacttttaacatttctgatactctctcttcttcctctttacagaagagaggtatgataactgaagttgtactttgcatattgaagtttaaagatacttcctctccccttttcacccctatttcaaatgatgtgataaaatcctcttgataggctatatggagaacatttgtcaatagttttatctatgcatggaagtcttcaaaaagtatatcttggattgtctaaaactgaatagatttcttatttatctgaaggtatacagactgccaacattttagacttatctctcagtctctgccactgaacttttatatatggctgctatcaaaatataaccggtttattttcatatttggaactaatataacagtatcacaaaatcttttacagtaagatagtttgtaataccagccgacccagctgcttaactgagtccttaaatcatttaatatatgggactgtaaatagagaaatctgtacattatgagatctgatttctggttatgcctatagatctttattttctttatccctatagatcattttcttctgatgttaagtgttatatttttgaaatgctcctaaacaagtaagccttagattgtattaatcctgaggattgataccatttcctcaacactttgtggagtatgattgacaccagtttttttttgactgcaggtttaacttggcttatcacttttcgtattgctcagtatgtccaagataggaataaaaaaatgtagttc

SEQ ID NO: 438911 - DNA, 5056 bp, Homo sapiens
cgccactccgggtttatttgtttacaagcggattacgtcagctcctccctctcttccctatctctggacccgcctcctgaactcttttcccgcccctttcggctccgaaccggcttgcgtcacaatggtgcgatattcggattggctggagtcggccatcacgctccagctacgccacttccttttcgtggcactataaagggtgctgcacggcgcttgcatctcttcgcctctcggagctggaaatgcagctattgagatcttcgaatgctgcggagctggaggcggaggcagctggggaggtccgagcgatgtgaccaggccgccatcgctcgtctcttcctctctcctgccgcctcctgtctcgaaaataacttttttagtctaaagaaagaaagacaaaagtagtcgtccgcccctcacgccctctcttcctctcagccttccgcccggtgaggaagcccggggtggttgctccgccgtcggggccgcgccgccgagccccggccgccccgggccgcccccgcacgccgcccccatgcatcccttctacacccgggccgccaccatgataggcgagatcgccgccgccgtgtccttcatctccaagtttctccgactggccgaggctgcgcgcctgattcctgttttggcggctcaaccggttggttcctggagattgttttgtccggtactactgtgttatttctaaaaccctgcccgctttttccatccccgcacatgcacaacaacggatgcaatcctggacattttaaaaagttgatagttttcattttcgctcctcaaaggagcctggggtaggaggaatccgcagtgggagctaacgatcctaagcgttgtttctctgttcttcttttcttctatagaacattataaacatcactggttcccagaaaagccatgcaagggatcgggttaccgttgtattcgcatcaaccataaaatggatcctctgattggacaggcagcacagcggattggactgagcagtcaggagctgttcaggcttctcccaagtgaactcacactctgggttgacccctatgaagtgtcctacagaattggagaggatggctccatctgtgtgctgtatgaagcctcaccagcaggaggtagcactcaaaacagcaccaacgtgcaaatggtagacagccgaatcagctgtaaggaggaacttctcttgggcagaacgagcccttccaaaaactacaatatgatgactgtatcaggttaagatatagtctgtggatggatcatctgatgatgatggataaatttgatttttgctttgggtgggctcctcttggggatggattatggaatttaaaccatgtcacagctgtgaagatctggcacaagatagaatggtaaaaaaaaaaaaaaattttaagtgacagtgccatagtttggacagtacctttcaatgattaattttaatagcctgtgagtccaagtaaatgatcactttatttgctagggagggaagtcctagggtggtttcagtttctcccagacatacctaaatttttacatcaatccttttaaagaaaatctgtatttcaaagaatctttctctgcagtaaatctcgcaggggaatttgcactattacacttgaaagttgttattgttaaccttttcggcagcttttaataggaaagttaaacgttttaaacatggtagtactggaaattttacaagacttttacctagcacttaaatatgtataaatgtacataaagacaaactagtaagcatgacctggggaaatggtcagaccttgtattgtgtttttggccttgaaagtagcaagtgaccagaatctgccatggcaacaggctttaaaaaagacccttaaaaagacactgtctcaactgtggtgttagcaccagccagctctctgtacatttgctagcttgtagttttctaagactgagtaaacttcttatttttagaaagtggaggtctggtttgtaactttccttgtacttaattgggtaaaagtcttttccacaaaccaccatctattttgtgaactttgttagtcatcttttatttggtaaattatgaactggtgtaaatttgtacagttcatgtatattgattgtggcaaagttgtacagatttctatattttggatgagaaatttttcttctctctataataaatcgtttcttatcttggcattttaatcaatctcttgtcatgattatagaggtttagctaaaagtattttttcttagaagacaggttctataaactgaatctctgttgcacactggtcatgctggaaaaacatttgatgaggaatgaagatgctctgtatatacatgtttaggttttacaggaaacacaggagtagcatgttttaaaaatttctaaagtcaaaacatggacacattcacaggctaatgatctcatgaaataaggataagagaccacggtagcatctaccaaaaatgtgatactcaaaggattacatttcattgcttccctgttgaagtgaagatataaatgttccattctgacccacctttgaaaaacaattactttgccccatggattctttgttcaattagaaatttccccggggcaggtgacccatagtcttaaagaacaggctaaacaccacagagagattggttgctttttgcttttcatcacctgcaagatgtacataaaaatcacataagctggaattcaacaaaaggtatgtttatgaacttttattctcaaaagttgaaatgctgactttctcgattcctcattttcagacttttatttcagataaatactaaaaacctaagtgaaccttgataatgctgtagtgtagattacttcactaccccatataatagaaggacttgctgtttagttgtagaggataacagcgtttttcagtggaaattgaaagtggaaaaattgaattttgctctacacagttaacatatagtggcctttttttggtatatatgtaaacatgttgacactggaaatacgcagtctgaaataaaattagtaattacttgaaattagtaatctcaaataacttttaagaagttatttctacacccaggaataaattattctgattttgtagacaacacaggaataggccactgaatatgcaggtatttagagtacaaatgtctgtggatattattggcacaccattctcgagagttagaattcgtagacccgcaacacatggactacccttgccaattgttatggttttatttttaaacctattctgtgaaaaagctcctcggtatttcaaacttgaattacaataaaaacaccaggtagggttgtttttaaatgggtctcaccccagtgctgactactgttgtttaccaactacatttcatctggtaactccattgaaactaagtacctcaaccattttttttttttatcataaagccttttttcaaatggaaagttgtttttgaagatcttgacatcagactttttcaatctttgaaaatgatggaaacagttaataaaaatgtttattttagaattcaggtgatgtctggcttgtgaggagctgtttataagtttgtctttgaaaaaggcttgcacacatcactctgagaccagctgtttcctgtgactttaaccttaccttccccagacaattgagctgaacctgtatctgcggtacagtagctgtttgtgatgtatttcttgttcactgtttctggggaatgttttgaaatattttattataaatccttttaagataggatgactactttcaaaattattgttgcctttggcaccaggaattcatagttgtgattggcagtaagtttgaggagtgttactttctaagttttaacaggtagttttgaaattatttccttttttccaaatttaagtagtgcctccctctgtaatgttgaaacaaggcttcaagtggattgtatagcaagagttaccctggttcatgcaggataatgcggctgttatctttgtcatctggaatgggaatctcatgtctttatccttatgtgcaatatttctataataatagactggaaaggccaccagaaagtggctttcaggtacattgcacaaatagtttccttaagtcattataactcacacattgcaagtaattaattttgttttgtataggtgttgcagtttatgaaattggccttcaagttaaaaggaaggaagccgtattcccgatggctagtgtttaatgactacaggtttccaggctccctttaatcttgggagcaaataaatctactattggacttctccctgcgtgacttttaacatttctgatactctctcttcttcctctttacagaagagaggtatgataactgaagttgtactttgcatattgaagtttaaagatacttcctctccccttttcacccctatttcaaatgatgtgataaaatcctcttgataggctatatggagaacatttgtcaatagttttatctatgcatggaagtcttcaaaaagtatatcttggattgtctaaaactgaatagatttcttatttatctgaaggtatacagactgccaacattttagacttatctctcagtctctgccactgaacttttatatatggctgctatcaaaatataaccggtttattttcatatttggaactaatataacagtatcacaaaatcttttacagtaagatagtttgtaataccagccgacccagctgcttaactgagtccttaaatcatttaatatatgggactgtaaatagagaaatctgtacattatgagatctgatttctggttatgcctatagatctttattttctttatccctatagatcattttcttctgatgttaagtgttatatttttgaaatgctcctaaacaagtaagccttagattgtattaatcctgaggattgataccatttcctcaacactttgtggagtatgattgacaccagtttttttttgactgcaggtttaacttggcttatcacttttcgtattgctcagtatgtccaagataggaataaaaaaatgtagttc

SEQ ID NO: 438912 - DNA, 4801 bp, Homo sapiens
cgccactccgggtttatttgtttacaagcggattacgtcagctcctccctctcttccctatctctggacccgcctcctgaactcttttcccgcccctttcggctccgaaccggcttgcgtcacaatggtgcgatattcggattggctggagtcggccatcacgctccagctacgccacttccttttcgtggcactataaagggtgctgcacggcgcttgcatctcttcgcctctcggagctggaaatgcagctattgagatcttcgaatgctgcggagctggaggcggaggcagctggggaggtccgagcgatgtgaccaggccgccatcgctcgtctcttcctctctcctgccgcctcctgtctcgaaaataacttttttagtctaaagaaagaaagacaaaagtagtcgtccgcccctcacgccctctcttcctctcagccttccgcccggtgaggaagcccggggtggttgctccgccgtcggggccgcgccgccgagccccggccgccccgggccgcccccgcacgccgcccccatgcatcccttctacacccgggccgccaccatgataggcgagatcgccgccgccgtgtccttcatctccaagtttctccgcaccaaggggctcacgagcgagcgacagctgcagaccttcagccagagcctgcaggagctgctggcagaacattataaacatcactggttcccagaaaagccatgcaagggatcgggttaccgttgtattcgcatcaaccataaaatggatcctctgattggacaggcagcacagcggattggactgagcagtcaggagctgttcaggcttctcccaagtgaactcacactctgggttgacccctatgaagtgtcctacagaattggagaggatggctccatctgtgtgctgtatgaagcctcaccagcaggaggtagcactcaaaacagcaccaacgtgcaaatggtagacagccgaatcagctgtaaggaggaacttctcttgggcagaacgagcccttccaaaaactacaatatgatgactgtatcagttgctttgggtgggctcctcttggggatggattatggaatttaaaccatgtcacagctgtgaagatctggcacaagatagaatggtaaaaaaaaaaaaaaattttaagtgacagtgccatagtttggacagtacctttcaatgattaattttaatagcctgtgagtccaagtaaatgatcactttatttgctagggagggaagtcctagggtggtttcagtttctcccagacatacctaaatttttacatcaatccttttaaagaaaatctgtatttcaaagaatctttctctgcagtaaatctcgcaggggaatttgcactattacacttgaaagttgttattgttaaccttttcggcagcttttaataggaaagttaaacgttttaaacatggtagtactggaaattttacaagacttttacctagcacttaaatatgtataaatgtacataaagacaaactagtaagcatgacctggggaaatggtcagaccttgtattgtgtttttggccttgaaagtagcaagtgaccagaatctgccatggcaacaggctttaaaaaagacccttaaaaagacactgtctcaactgtggtgttagcaccagccagctctctgtacatttgctagcttgtagttttctaagactgagtaaacttcttatttttagaaagtggaggtctggtttgtaactttccttgtacttaattgggtaaaagtcttttccacaaaccaccatctattttgtgaactttgttagtcatcttttatttggtaaattatgaactggtgtaaatttgtacagttcatgtatattgattgtggcaaagttgtacagatttctatattttggatgagaaatttttcttctctctataataaatcgtttcttatcttggcattttaatcaatctcttgtcatgattatagaggtttagctaaaagtattttttcttagaagacaggttctataaactgaatctctgttgcacactggtcatgctggaaaaacatttgatgaggaatgaagatgctctgtatatacatgtttaggttttacaggaaacacaggagtagcatgttttaaaaatttctaaagtcaaaacatggacacattcacaggctaatgatctcatgaaataaggataagagaccacggtagcatctaccaaaaatgtgatactcaaaggattacatttcattgcttccctgttgaagtgaagatataaatgttccattctgacccacctttgaaaaacaattactttgccccatggattctttgttcaattagaaatttccccggggcaggtgacccatagtcttaaagaacaggctaaacaccacagagagattggttgctttttgcttttcatcacctgcaagatgtacataaaaatcacataagctggaattcaacaaaaggtatgtttatgaacttttattctcaaaagttgaaatgctgactttctcgattcctcattttcagacttttatttcagataaatactaaaaacctaagtgaaccttgataatgctgtagtgtagattacttcactaccccatataatagaaggacttgctgtttagttgtagaggataacagcgtttttcagtggaaattgaaagtggaaaaattgaattttgctctacacagttaacatatagtggcctttttttggtatatatgtaaacatgttgacactggaaatacgcagtctgaaataaaattagtaattacttgaaattagtaatctcaaataacttttaagaagttatttctacacccaggaataaattattctgattttgtagacaacacaggaataggccactgaatatgcaggtatttagagtacaaatgtctgtggatattattggcacaccattctcgagagttagaattcgtagacccgcaacacatggactacccttgccaattgttatggttttatttttaaacctattctgtgaaaaagctcctcggtatttcaaacttgaattacaataaaaacaccaggtagggttgtttttaaatgggtctcaccccagtgctgactactgttgtttaccaactacatttcatctggtaactccattgaaactaagtacctcaaccattttttttttttatcataaagccttttttcaaatggaaagttgtttttgaagatcttgacatcagactttttcaatctttgaaaatgatggaaacagttaataaaaatgtttattttagaattcaggtgatgtctggcttgtgaggagctgtttataagtttgtctttgaaaaaggcttgcacacatcactctgagaccagctgtttcctgtgactttaaccttaccttccccagacaattgagctgaacctgtatctgcggtacagtagctgtttgtgatgtatttcttgttcactgtttctggggaatgttttgaaatattttattataaatccttttaagataggatgactactttcaaaattattgttgcctttggcaccaggaattcatagttgtgattggcagtaagtttgaggagtgttactttctaagttttaacaggtagttttgaaattatttccttttttccaaatttaagtagtgcctccctctgtaatgttgaaacaaggcttcaagtggattgtatagcaagagttaccctggttcatgcaggataatgcggctgttatctttgtcatctggaatgggaatctcatgtctttatccttatgtgcaatatttctataataatagactggaaaggccaccagaaagtggctttcaggtacattgcacaaatagtttccttaagtcattataactcacacattgcaagtaattaattttgttttgtataggtgttgcagtttatgaaattggccttcaagttaaaaggaaggaagccgtattcccgatggctagtgtttaatgactacaggtttccaggctccctttaatcttgggagcaaataaatctactattggacttctccctgcgtgacttttaacatttctgatactctctcttcttcctctttacagaagagaggtatgataactgaagttgtactttgcatattgaagtttaaagatacttcctctccccttttcacccctatttcaaatgatgtgataaaatcctcttgataggctatatggagaacatttgtcaatagttttatctatgcatggaagtcttcaaaaagtatatcttggattgtctaaaactgaatagatttcttatttatctgaaggtatacagactgccaacattttagacttatctctcagtctctgccactgaacttttatatatggctgctatcaaaatataaccggtttattttcatatttggaactaatataacagtatcacaaaatcttttacagtaagatagtttgtaataccagccgacccagctgcttaactgagtccttaaatcatttaatatatgggactgtaaatagagaaatctgtacattatgagatctgatttctggttatgcctatagatctttattttctttatccctatagatcattttcttctgatgttaagtgttatatttttgaaatgctcctaaacaagtaagccttagattgtattaatcctgaggattgataccatttcctcaacactttgtggagtatgattgacaccagtttttttttgactgcaggtttaacttggcttatcacttttcgtattgctcagtatgtccaagataggaataaaaaaatgtagttc

SEQ ID NO: 438913 - DNA, 3928 bp, Homo sapiens
gctgatgatgatccatccacagactatatcttaacctgatacagtcatcatattgtagtttttggaagggctcgttctgcccaagagcccttccaaaaactacaatatgatgactgtatcaggttaagatatagtctgtggatggatcatctgatgatgatggataaatttgatttttgctttgggtgggctcctcttggggatggattatggaatttaaaccatgtcacagctgtgaagatctggcacaagatagaatggtaaaaaaaaaaaaaaattttaagtgacagtgccatagtttggacagtacctttcaatgattaattttaatagcctgtgagtccaagtaaatgatcactttatttgctagggagggaagtcctagggtggtttcagtttctcccagacatacctaaatttttacatcaatccttttaaagaaaatctgtatttcaaagaatctttctctgcagtaaatctcgcaggggaatttgcactattacacttgaaagttgttattgttaaccttttcggcagcttttaataggaaagttaaacgttttaaacatggtagtactggaaattttacaagacttttacctagcacttaaatatgtataaatgtacataaagacaaactagtaagcatgacctggggaaatggtcagaccttgtattgtgtttttggccttgaaagtagcaagtgaccagaatctgccatggcaacaggctttaaaaaagacccttaaaaagacactgtctcaactgtggtgttagcaccagccagctctctgtacatttgctagcttgtagttttctaagactgagtaaacttcttatttttagaaagtggaggtctggtttgtaactttccttgtacttaattgggtaaaagtcttttccacaaaccaccatctattttgtgaactttgttagtcatcttttatttggtaaattatgaactggtgtaaatttgtacagttcatgtatattgattgtggcaaagttgtacagatttctatattttggatgagaaatttttcttctctctataataaatcgtttcttatcttggcattttaatcaatctcttgtcatgattatagaggtttagctaaaagtattttttcttagaagacaggttctataaactgaatctctgttgcacactggtcatgctggaaaaacatttgatgaggaatgaagatgctctgtatatacatgtttaggttttacaggaaacacaggagtagcatgttttaaaaatttctaaagtcaaaacatggacacattcacaggctaatgatctcatgaaataaggataagagaccacggtagcatctaccaaaaatgtgatactcaaaggattacatttcattgcttccctgttgaagtgaagatataaatgttccattctgacccacctttgaaaaacaattactttgccccatggattctttgttcaattagaaatttccccggggcaggtgacccatagtcttaaagaacaggctaaacaccacagagagattggttgctttttgcttttcatcacctgcaagatgtacataaaaatcacataagctggaattcaacaaaaggtatgtttatgaacttttattctcaaaagttgaaatgctgactttctcgattcctcattttcagacttttatttcagataaatactaaaaacctaagtgaaccttgataatgctgtagtgtagattacttcactaccccatataatagaaggacttgctgtttagttgtagaggataacagcgtttttcagtggaaattgaaagtggaaaaattgaattttgctctacacagttaacatatagtggcctttttttggtatatatgtaaacatgttgacactggaaatacgcagtctgaaataaaattagtaattacttgaaattagtaatctcaaataacttttaagaagttatttctacacccaggaataaattattctgattttgtagacaacacaggaataggccactgaatatgcaggtatttagagtacaaatgtctgtggatattattggcacaccattctcgagagttagaattcgtagacccgcaacacatggactacccttgccaattgttatggttttatttttaaacctattctgtgaaaaagctcctcggtatttcaaacttgaattacaataaaaacaccaggtagggttgtttttaaatgggtctcaccccagtgctgactactgttgtttaccaactacatttcatctggtaactccattgaaactaagtacctcaaccattttttttttttatcataaagccttttttcaaatggaaagttgtttttgaagatcttgacatcagactttttcaatctttgaaaatgatggaaacagttaataaaaatgtttattttagaattcaggtgatgtctggcttgtgaggagctgtttataagtttgtctttgaaaaaggcttgcacacatcactctgagaccagctgtttcctgtgactttaaccttaccttccccagacaattgagctgaacctgtatctgcggtacagtagctgtttgtgatgtatttcttgttcactgtttctggggaatgttttgaaatattttattataaatccttttaagataggatgactactttcaaaattattgttgcctttggcaccaggaattcatagttgtgattggcagtaagtttgaggagtgttactttctaagttttaacaggtagttttgaaattatttccttttttccaaatttaagtagtgcctccctctgtaatgttgaaacaaggcttcaagtggattgtatagcaagagttaccctggttcatgcaggataatgcggctgttatctttgtcatctggaatgggaatctcatgtctttatccttatgtgcaatatttctataataatagactggaaaggccaccagaaagtggctttcaggtacattgcacaaatagtttccttaagtcattataactcacacattgcaagtaattaattttgttttgtataggtgttgcagtttatgaaattggccttcaagttaaaaggaaggaagccgtattcccgatggctagtgtttaatgactacaggtttccaggctccctttaatcttgggagcaaataaatctactattggacttctccctgcgtgacttttaacatttctgatactctctcttcttcctctttacagaagagaggtatgataactgaagttgtactttgcatattgaagtttaaagatacttcctctccccttttcacccctatttcaaatgatgtgataaaatcctcttgataggctatatggagaacatttgtcaatagttttatctatgcatggaagtcttcaaaaagtatatcttggattgtctaaaactgaatagatttcttatttatctgaaggtatacagactgccaacattttagacttatctctcagtctctgccactgaacttttatatatggctgctatcaaaatataaccggtttattttcatatttggaactaatataacagtatcacaaaatcttttacagtaagatagtttgtaataccagccgacccagctgcttaactgagtccttaaatcatttaatatatgggactgtaaatagagaaatctgtacattatgagatctgatttctggttatgcctatagatctttattttctttatccctatagatcattttcttctgatgttaagtgttatatttttgaaatgctcctaaacaagtaagccttagattgtattaatcctgaggattgataccatttcctcaacactttgtggagtatgattgacaccagtttttttttgactgcaggtttaacttggcttatcacttttcgtattgctcagtatgtccaagataggaataaaaaaatgtagttc

SEQ ID NO: 438914 - DNA, 3692 bp, Homo sapiens
ggacgcgtgggtcgacccacgcgtcgaataaagtgatcatttacttgctagggagggaagtgatcatttaatagcctgtgagtccaagtaaatgatcacttccctccctagcaaataaagtgatcatttacttgggagggaagtcctagggtggtttcagtttctcccagacatacctaaatttttacatcaatccttttaaagaaaatctgtatttcaaagaatctttctctgcagtaaatctcgcaggggaatttgcactattacacttgaaagttgttattgttaaccttttcggcagcttttaataggaaagttaaacgttttaaacatggtagtactggaaattttacaagacttttacctagcacttaaatatgtataaatgtacataaagacaaactagtaagcatgacctggggaaatggtcagaccttgtattgtgtttttggccttgaaagtagcaagtgaccagaatctgccatggcaacaggctttaaaaaagacccttaaaaagacactgtctcaactgtggtgttagcaccagccagctctctgtacatttgctagcttgtagttttctaagactgagtaaacttcttatttttagaaagtggaggtctggtttgtaactttccttgtacttaattgggtaaaagtcttttccacaaaccaccatctattttgtgaactttgttagtcatcttttatttggtaaattatgaactggtgtaaatttgtacagttcatgtatattgattgtggcaaagttgtacagatttctatattttggatgagaaatttttcttctctctataataaatcgtttcttatcttggcattttaatcaatctcttgtcatgattatagaggtttagctaaaagtattttttcttagaagacaggttctataaactgaatctctgttgcacactggtcatgctggaaaaacatttgatgaggaatgaagatgctctgtatatacatgtttaggttttacaggaaacacaggagtagcatgttttaaaaatttctaaagtcaaaacatggacacattcacaggctaatgatctcatgaaataaggataagagaccacggtagcatctaccaaaaatgtgatactcaaaggattacatttcattgcttccctgttgaagtgaagatataaatgttccattctgacccacctttgaaaaacaattactttgccccatggattctttgttcaattagaaatttccccggggcaggtgacccatagtcttaaagaacaggctaaacaccacagagagattggttgctttttgcttttcatcacctgcaagatgtacataaaaatcacataagctggaattcaacaaaaggtatgtttatgaacttttattctcaaaagttgaaatgctgactttctcgattcctcattttcagacttttatttcagataaatactaaaaacctaagtgaaccttgataatgctgtagtgtagattacttcactaccccatataatagaaggacttgctgtttagttgtagaggataacagcgtttttcagtggaaattgaaagtggaaaaattgaattttgctctacacagttaacatatagtggcctttttttggtatatatgtaaacatgttgacactggaaatacgcagtctgaaataaaattagtaattacttgaaattagtaatctcaaataacttttaagaagttatttctacacccaggaataaattattctgattttgtagacaacacaggaataggccactgaatatgcaggtatttagagtacaaatgtctgtggatattattggcacaccattctcgagagttagaattcgtagacccgcaacacatggactacccttgccaattgttatggttttatttttaaacctattctgtgaaaaagctcctcggtatttcaaacttgaattacaataaaaacaccaggtagggttgtttttaaatgggtctcaccccagtgctgactactgttgtttaccaactacatttcatctggtaactccattgaaactaagtacctcaaccattttttttttttatcataaagccttttttcaaatggaaagttgtttttgaagatcttgacatcagactttttcaatctttgaaaatgatggaaacagttaataaaaatgtttattttagaattcaggtgatgtctggcttgtgaggagctgtttataagtttgtctttgaaaaaggcttgcacacatcactctgagaccagctgtttcctgtgactttaaccttaccttccccagacaattgagctgaacctgtatctgcggtacagtagctgtttgtgatgtatttcttgttcactgtttctggggaatgttttgaaatattttattataaatccttttaagataggatgactactttcaaaattattgttgcctttggcaccaggaattcatagttgtgattggcagtaagtttgaggagtgttactttctaagttttaacaggtagttttgaaattatttccttttttccaaatttaagtagtgcctccctctgtaatgttgaaacaaggcttcaagtggattgtatagcaagagttaccctggttcatgcaggataatgcggctgttatctttgtcatctggaatgggaatctcatgtctttatccttatgtgcaatatttctataataatagactggaaaggccaccagaaagtggctttcaggtacattgcacaaatagtttccttaagtcattataactcacacattgcaagtaattaattttgttttgtataggtgttgcagtttatgaaattggccttcaagttaaaaggaaggaagccgtattcccgatggctagtgtttaatgactacaggtttccaggctccctttaatcttgggagcaaataaatctactattggacttctccctgcgtgacttttaacatttctgatactctctcttcttcctctttacagaagagaggtatgataactgaagttgtactttgcatattgaagtttaaagatacttcctctccccttttcacccctatttcaaatgatgtgataaaatcctcttgataggctatatggagaacatttgtcaatagttttatctatgcatggaagtcttcaaaaagtatatcttggattgtctaaaactgaatagatttcttatttatctgaaggtatacagactgccaacattttagacttatctctcagtctctgccactgaacttttatatatggctgctatcaaaatataaccggtttattttcatatttggaactaatataacagtatcacaaaatcttttacagtaagatagtttgtaataccagccgacccagctgcttaactgagtccttaaatcatttaatatatgggactgtaaatagagaaatctgtacattatgagatctgatttctggttatgcctatagatctttattttctttatccctatagatcattttcttctgatgttaagtgttatatttttgaaatgctcctaaacaagtaagccttagattgtattaatcctgaggattgataccatttcctcaacactttgtggagtatgattgacaccagtttttttttgactgcaggtttaacttggcttatcacttttcgtattgctcagtatgtccaagataggaataaaaaaatgtagttc

SEQ ID NO: 438915 - DNA, 2006 bp, Homo sapiens
cgccactccgggtttatttgtttacaagcggattacgtcagctcctccctctcttccctatctctggacccgcctcctgaactcttttcccgcccctttcggctccgaaccggcttgcgtcacaatggtgcgatattcggattggctggagtcggccatcacgctccagctacgccacttccttttcgtggcactataaagggtgctgcacggcgcttgcatctcttcgcctctcggagctggaaatgcagctattgagatcttcgaatgctgcggagctggaggcggaggcagctggggaggtccgagcgatgtgaccaggccgccatcgctcgtctcttcctctctcctgccgcctcctgtctcgaaaataacttttttagtctaaagaaagaaagacaaaagtagtcgtccgcccctcacgccctctcttcctctcagccttccgcccggtgaggaagcccggggtggttgctccgccgtcggggccgcgccgccgagccccggccgccccgggccgcccccgcacgccgcccccatgcatcccttctacacccgggccgccaccatgataggcgagatcgccgccgccgtgtccttcatctccaagtttctccgcaccaaggggctcacgagcgagcgacagctgcagaccttcagccagagcctgcaggagctgctggcagaacattataaacatcactggttcccagaaaagccatgcaagggatcgggttaccgttgtattcgcatcaaccataaaatggatcctctgattggacaggcagcacagcggattggactgagcagtcaggagctgttcaggcttctcccaagtgaactcacactctgggttgacccctatgaagtgtcctacagaattggagaggatggctccatctgtgtgctgtatgaagcctcaccagcaggaggtagcactcaaaacagcaccaacgtgcaaatggtagacagccgaatcagctgtaaggaggaacttctcttgggcagaacgagcccttccaaaaactacaatatgatgactgtatcaggttaagatatagtctgtggatggatcatctgatgatgatggataaatttgatttttgctttgggtgggctcctcttggggatggattatggaatttaaaccatgtcacagctgtgaagatctggcacaagatagaatggtaaaaaaaaaaaaaaattttaagtgacagtgccatagtttggacagtacctttcaatgattaattttaatagcctgtgagtccaagtaaatgatcactttatttgctagggagggaagtcctagggtggtttcagtttctcccagacatacctaaatttttacatcaatccttttaaagaaaatctgtatttcaaagaatctttctctgcagtaaatctcgcaggggaatttgcactattacacttgaaagttgttattgttaaccttttcggcagcttttaataggaaagttaaacgttttaaacatggtagtactggaaattttacaagacttttacctagcacttaaatatgtataaatgtacataaagacaaactagtaagcatgacctggggaaatggtcagaccttgtattgtgtttttggccttgaaagtagcaagtgaccagaatctgccatggcaacaggctttaaaaaagacccttaaaaagacactgtctcaactgtggtgttagcaccagccagctctctgtacatttgctagcttgtagttttctaagactgagtaaacttcttatttttagaaagtggaggtctggtttgtaactttccttgtacttaattgggtaaaagtcttttccacaaaccaccatctattttgtgaactttgttagtcatcttttatttggtaaattatgaactggtgtaaatttgtacagttcatgtatattgattgtggcaaagttgtacagatttctatattttggatgagaaatttttcttctctctataataaatcgtttcttatcttggcatt

SEQ ID NO: 438916 - DNA, 4800 bp, Homo sapiens
cgccactccgggtttatttgtttacaagcggattacgtcagctcctccctctcttccctatctctggacccgcctcctgaactcttttcccgcccctttcggctccgaaccggcttgcgtcacaatggtgcgatattcggattggctggagtcggccatcacgctccagctacgccacttccttttcgtggcactataaagggtgctgcacggcgcttgcatctcttcgcctctcggagctggaaatgcagctattgagatcttcgaatgctgcggagctggaggcggaggcagctggggaggtccgagcgatgtgaccaggccgccatcgctcgtctcttcctctctcctgccgcctcctgtctcgaaaataacttttttagtctaaagaaagaaagacaaaagtagtcgtccgcccctcacgccctctcttcctctcagccttccgcccggtgaggaagcccggggtggttgctccgccgtcggggccgcgccgccgagccccggccgccccgggccgcccccgcacgccgcccccatgcatcccttctacacccgggccgccaccatgataggcgagatcgccgccgccgtgtccttcatctccaagtttctccgcaccaaggggctcacgagcgagcgacagctgcagaccttcagccagagcctgcaggagctgctggcagaacattataaacatcactggttcccagaaaagccatgcaagggatcgggttaccgttgtattcgcatcaaccataaaatggatcctctgattggacaggcagcacagcggattggactgagcagtcaggagctgttcaggcttctcccaagtgaactcacactctgggttgacccctatgaagtgtcctacagaattggagaggatggctccatctgtgtgctgtatgaagcctcaccagcaggaggtagcactcaaaacagcaccaacgtgcaaatggtagacagccgaatcagctgtaaggaggaacttctcttgggcagaacgagcccttccaaaaactacaatatgatgactgtatcaggttaagatatagtctgtggatggatcatctgatgatgatggataaatttgatttttgctttgggtgggctcctcttggggatggattatggaatttaaaccatgtcacagctgtgaagatctggcacaagatagaatggtaaaaaaaaaaaaaaattttaagtgacagtgccatagtttggacagtacctttcaatgattaattttaatagcctgtgagtccaagtaaatgatcactttatttgctagggagggaagtcctagggtggtttcagtttctcccagacatacctaaatttttacatcaatccttttaaacactattacacttgaaagttgttattgttaaccttttcggcagcttttaataggaaagttaaacgttttaaacatggtagtactggaaattttacaagacttttacctagcacttaaatatgtataaatgtacataaagacaaactagtaagcatgacctggggaaatggtcagaccttgtattgtgtttttggccttgaaagtagcaagtgaccagaatctgccatggcaacaggctttaaaaaagacccttaaaaagacactgtctcaactgtggtgttagcaccagccagctctctgtacatttgctagcttgtagttttctaagactgagtaaacttcttatttttagaaagtggaggtctggtttgtaactttccttgtacttaattgggtaaaagtcttttccacaaaccaccatctattttgtgaactttgttagtcatcttttatttggtaaattatgaactggtgtaaatttgtacagttcatgtatattgattgtggcaaagttgtacagatttctatattttggatgagaaatttttcttctctctataataaatcgtttcttatcttggcattttaatcaatctcttgtcatgattatagaggtttagctaaaagtattttttcttagaagacaggttctataaactgaatctctgttgcacactggtcatgctggaaaaacatttgatgaggaatgaagatgctctgtatatacatgtttaggttttacaggaaacacaggagtagcatgttttaaaaatttctaaagtcaaaacatggacacattcacaggctaatgatctcatgaaataaggataagagaccacggtagcatctaccaaaaatgtgatactcaaaggattacatttcattgcttccctgttgaagtgaagatataaatgttccattctgacccacctttgaaaaacaattactttgccccatggattctttgttcaattagaaatttccccggggcaggtgacccatagtcttaaagaacaggctaaacaccacagagagattggttgctttttgcttttcatcacctgcaagatgtacataaaaatcacataagctggaattcaacaaaaggtatgtttatgaacttttattctcaaaagttgaaatgctgactttctcgattcctcattttcagacttttatttcagataaatactaaaaacctaagtgaaccttgataatgctgtagtgtagattacttcactaccccatataatagaaggacttgctgtttagttgtagaggataacagcgtttttcagtggaaattgaaagtggaaaaattgaattttgctctacacagttaacatatagtggcctttttttggtatatatgtaaacatgttgacactggaaatacgcagtctgaaataaaattagtaattacttgaaattagtaatctcaaataacttttaagaagttatttctacacccaggaataaattattctgattttgtagacaacacaggaataggccactgaatatgcaggtatttagagtacaaatgtctgtggatattattggcacaccattctcgagagttagaattcgtagacccgcaacacatggactacccttgccaattgttatggttttatttttaaacctattctgtgaaaaagctcctcggtatttcaaacttgaattacaataaaaacaccaggtagggttgtttttaaatgggtctcaccccagtgctgactactgttgtttaccaactacatttcatctggtaactccattgaaactaagtacctcaaccattttttttttttatcataaagccttttttcaaatggaaagttgtttttgaagatcttgacatcagactttttcaatctttgaaaatgatggaaacagttaataaaaatgtttattttagaattcaggtgatgtctggcttgtgaggagctgtttataagtttgtctttgaaaaaggcttgcacacatcactctgagaccagctgtttcctgtgactttaaccttaccttccccagacaattgagctgaacctgtatctgcggtacagtagctgtttgtgatgtatttcttgttcactgtttctggggaatgttttgaaatattttattataaatccttttaagataggatgactactttcaaaattattgttgcctttggcaccaggaattcatagttgtgattggcagtaagtttgaggagtgttactttctaagttttaacaggtagttttgaaattatttccttttttccaaatttaagtagtgcctccctctgtaatgttgaaacaaggcttcaagtggattgtatagcaagagttaccctggttcatgcaggataatgcggctgttatctttgtcatctggaatgggaatctcatgtctttatccttatgtgcaatatttctataataatagactggaaaggccaccagaaagtggctttcaggtacattgcacaaatagtttccttaagtcattataactcacacattgcaagtaattaattttgttttgtataggtgttgcagtttatgaaattggccttcaagttaaaaggaaggaagccgtattcccgatggctagtgtttaatgactacaggtttccaggctccctttaatcttgggagcaaataaatctactattggacttctccctgcgtgacttttaacatttctgatactctctcttcttcctctttacagaagagaggtatgataactgaagttgtactttgcatattgaagtttaaagatacttcctctccccttttcacccctatttcaaatgatgtgataaaatcctcttgataggctatatggagaacatttgtcaatagttttatctatgcatggaagtcttcaaaaagtatatcttggattgtctaaaactgaatagatttcttatttatctgaaggtatacagactgccaacattttagacttatctctcagtctctgccactgaacttttatatatggctgctatcaaaatataaccggtttattttcatatttggaactaatataacagtatcacaaaatcttttacagtaagatagtttgtaataccagccgacccagctgcttaactgagtccttaaatcatttaatatatgggactgtaaatagagaaatctgtacattatgagatctgatttctggttatgcctatagatctttattttctttatccctatagatcattttcttctgatgttaagtgttatatttttgaaatgctcctaaacaagtaagccttagattgtattaatcctgaggattgataccatttcctcaacactttgtggagtatgattgacaccagtttttttttgactgcaggtttaacttggcttatcacttttcgtattgctcagtatgtccaagataggaataaaaaaatgtagttc

SEQ ID NO: 438917 - DNA, 2587 bp, Homo sapiens
cgccactccgggtttatttgtttacaagcggattacgtcagctcctccctctcttccctatctctggacccgcctcctgaactcttttcccgcccctttcggctccgaaccggcttgcgtcacaatggtgcgatattcggattggctggagtcggccatcacgctccagctacgccacttccttttcgtggcactataaagggtgctgcacggcgcttgcatctcttcgcctctcggagctggaaatgcagctattgagatcttcgaatgctgcggagctggaggcggaggcagctggggaggtccgagcgatgtgaccaggccgccatcgctcgtctcttcctctctcctgccgcctcctgtctcgaaaataacttttttagtctaaagaaagaaagacaaaagtagtcgtccgcccctcacgccctctcttcctctcagccttccgcccggtgaggaagcccggggtggttgctccgccgtcggggccgcgccgccgagccccggccgccccgggccgcccccgcacgccgcccccatgcatcccttctacacccgggccgccaccatgataggcgagatcgccgccgccgtgtccttcatctccaagtttctccgcaccaaggggctcacgagcgagcgacagctgcagaccttcagccagagcctgcaggagctgctggcagaacattataaacatcactggttcccagaaaagccatgcaagggatcgggttaccgttgtattcgcatcaaccataaaatggatcctctgattggacaggcagcacagcggattggactgagcagtcaggagctgttcaggcttctcccaagtgaactcacactctgggttgacccctatgaagtgtcctacagaattggagaggatggctccatctgtgtgctgtatgaagcctcaccagcaggaggtagcactcaaaacagcaccaacgtgcaaatggtagacagccgaatcagctgtaaggaggaacttctcttgggcagaacgagcccttccaaaaactacaatatgatgactgtatcaggttaagatatagtctgtggatggatcatctgatgatgatggataaatttgatttttgctttgggtgggctcctcttggggatggattatggaatttaaaccatgtcacagctgtgaagatctggcacaagatagaatggtaaaaaaaaaaaaaaattttaagtgacagtgccatagtttggacagtacctttcaatgattaattttaatagcctgtgagtccaagtaaatgatcactttatttgctagggagggaagtcctagggtggtttcagtttctcccagacatacctaaatttttacatcaatccttttaaagaaaatctgtatttcaaagaatctttctctgcagtaaatctcgcaggggaatttgcactattacacttgaaagttgttattgttaaccttttcggcagcttttaataggaaagttaaacgttttaaacatggtagtactggaaattttacaagacttttacctagcacttaaatatgtataaatgtacataaagacaaactagtaagcatgacctggggaaatggtcagaccttgtattgtgtttttggccttgaaagtagcaagtgaccagaatctgccatggcaacaggctttaaaaaagacccttaaaaagacactgtctcaactgtggtgttagcaccagccagctctctgtacatttgctagcttgtagttttctaagactgagtaaacttcttatttttagaaagtggaggtctggtttgtaactttccttgtacttaattgggtaaaagtcttttccacaaaccaccatctattttgtgaactttgttagtcatcttttatttggtaaattatgaactggtgtaaatttgtacagttcatgtatattgattgtggcaaagttgtacagatttctatattttggatgagaaatttttcttctctctataataaatcgtttcttatcttggcattaaaaaaaaaacaaaaaaaaacaaaaaaaaaaaaagacaaaacaaaacaaaaaaaaaaaaaaaaaaaaacacacaaaaaacaaaaagaggggggggcgccgcgcaaaaaaacaccccggggggacccccacaccgccgcgcacccccacattttgtttcaaaaaagggggccccccaaaaggggggagctttaaaactaaagacaccggagggcggcgccggacatacaaacacgacgaagcccggagcgggaataacaaccagccgcgagcgaggcaatctatgaaggagaagagacacaccaccacactcgaggggcggggggcgaagcaccatcacggggaggcgcacacacaccacccacgcaagaggaaaatattacagcgaccgcagcgggaaggaatcaacataaacaaccatgacgggagtgtcgacagatcggtggagcacaaccacaccgcacaatatcatcgcgtcgcagatagaacacaaagataggcacccacccgacatcattcaatcaaagcaaacaatactttaccaacacagagcaggctccgttatataagtaaaaccaaaaga

SEQ ID NO: 438918 - DNA, 2158 bp, Homo sapiens
cgccactccgggtttatttgtttacaagcggattacgtcagctcctccctctcttccctatctctggacccgcctcctgaactcttttcccgcccctttcggctccgaaccggcttgcgtcacaatggtgcgatattcggattggctggagtcggccatcacgctccagctacgccacttccttttcgtggcactataaagggtgctgcacggcgcttgcatctcttcgcctctcggagctggaaatgcagctattgagatcttcgaatgctgcggagctggaggcggaggcagctggggaggtccgagcgatgtgaccaggccgccatcgctcgtctcttcctctctcctgccgcctcctgtctcgaaaataacttttttagtctaaagaaagaaagacaaaagtagtcgtccgcccctcacgccctctcttcctctcagccttccgcccggtgaggaagcccggggtggttgctccgccgtcggggccgcgccgccgagccccggccgccccgggccgcccccgcacgccgcccccatgcatcccttctacacccgggccgccaccatgataggcgagatcgccgccgccgtgtccttcatctccaagtttctccgcaccaaggggctcacgagcgagcgacagctgcagaccttcagccagagcctgcaggagctgctggcagaacattataaacatcactggttcccagaaaagccatgcaagggatcgggttaccgttgtattcgcatcaaccataaaatggatcctctgattggacaggcagcacagcggattggactgagcagtcaggagctgttcaggcttctcccaagtgaactcacactctgggttgacccctatgaagtgtcctacagaattggagaggatggctccatctgtgtgctgtatgaagcctcaccagcaggaggtagcactcaaaacagcaccaacgtgcaaatggtagacagccgaatcagctgtaaggaggaacttctcttgggcagaacgagcccttccaaaaactacaatatgatgactgtatcaggttaagatatagtctgtggatggatcatctgatgatgatggataaatttgatttttgctttgggtgggctcctcttggggatggattatggaatttaaaccatgtcacagctgtgaagatctggcacaagatagaatggtaaaaaaaaaaaaaaattttaagtgacagtgccatagtttggacagtacctttcaatgattaattttaatagcctgtgagtccaagtaaatgatcactttatttgctagggagggaagtcctagggtggtttcagtttctcccagacatacctaaatttttacatcaatccttttaaagaaaatctgtatttcaaagaatctttctctgcagtaaatctcgcaggggaatttgcactattacacttgaaagttgttattgttaaccttttcggcagcttttaataggaaagttaaacgttttaaacatggtagtactggaaattttacaagacttttacctagcacttaaatatgtataaatgtacataaagacaaactagtaagcatgacctggggaaatggtcagaccttgtattgtgtttttggccttgaaagtagcaagtgaccagaatctgccatggcaacaggctttaaaaaagacccttaaaaagacactgtctcaactgtggtgttagcaccagccagctctctgtacatttgctagcttgtagttttctaagactgagtaaacttcttatttttagaaagtggaggtctggtttgtaactttccttgtacttaattgggtaaaagtcttttccacaaaccaccatctattttgtgaactttgttagtcatcttttatttggtaaattatgaactggtgtaaatttgtacagttcatgtatattgattgtggcaaagttgtacagatttctatattttggatgagaaatctgtacaacttttccacaaaccaccaatcgtattttgtgaactttgttagtcatcttttatttggtaaattatgaactggtgtaaatttgtacagttcatgtatattgattgtggcaaagttgtacagatttctatattttggatgagaaatttttcttctctctataataaatcgtttcttatcttggcatt

SEQ ID NO: 438919 - DNA, 4235 bp, Homo sapiens
ccgaggcgggagctgcggtccgaggaccgtcggcggatttggggacaaaggagccgtggggctgggaacattataaacatcactggttcccagaaaagccatgcaagggatcgggttaccgttgtattcgcatcaaccataaaatggatcctctgattggacaggcagcacagcggattggactgagcagtcaggagctgttcaggcttctcccaagtgaactcacactctgggttgacccctatgaagtgtcctacagaattggagaggatggctccatctgtgtgctgtatgaagcctcaccagcaggaggtagcactcaaaacagcaccaacgtgcaaatggtagacagccgaatcagctgtaaggaggaacttctcttgggcagaacgagcccttccaaaaactacaatatgatgactgtatcaggttaagatatagtctgtggatggatcatctgatgatgatggataaatttgatttttgctttgggtgggctcctcttggggatggattatggaatttaaaccatgtcacagctgtgaagatctggcacaagatagaatggtaaaaaaaaaaaaaaattttaagtgacagtgccatagtttggacagtacctttcaatgattaattttaatagcctgtgagtccaagtaaatgatcactttatttgctagggagggaagtcctagggtggtttcagtttctcccagacatacctaaatttttacatcaatccttttaaagaaaatctgtatttcaaagaatctttctctgcagtaaatctcgcaggggaatttgcactattacacttgaaagttgttattgttaaccttttcggcagcttttaataggaaagttaaacgttttaaacatggtagtactggaaattttacaagacttttacctagcacttaaatatgtataaatgtacataaagacaaactagtaagcatgacctggggaaatggtcagaccttgtattgtgtttttggccttgaaagtagcaagtgaccagaatctgccatggcaacaggctttaaaaaagacccttaaaaagacactgtctcaactgtggtgttagcaccagccagctctctgtacatttgctagcttgtagttttctaagactgagtaaacttcttatttttagaaagtggaggtctggtttgtaactttccttgtacttaattgggtaaaagtcttttccacaaaccaccatctattttgtgaactttgttagtcatcttttatttggtaaattatgaactggtgtaaatttgtacagttcatgtatattgattgtggcaaagttgtacagatttctatattttggatgagaaatttttcttctctctataataaatcgtttcttatcttggcattttaatcaatctcttgtcatgattatagaggtttagctaaaagtattttttcttagaagacaggttctataaactgaatctctgttgcacactggtcatgctggaaaaacatttgatgaggaatgaagatgctctgtatatacatgtttaggttttacaggaaacacaggagtagcatgttttaaaaatttctaaagtcaaaacatggacacattcacaggctaatgatctcatgaaataaggataagagaccacggtagcatctaccaaaaatgtgatactcaaaggattacatttcattgcttccctgttgaagtgaagatataaatgttccattctgacccacctttgaaaaacaattactttgccccatggattctttgttcaattagaaatttccccggggcaggtgacccatagtcttaaagaacaggctaaacaccacagagagattggttgctttttgcttttcatcacctgcaagatgtacataaaaatcacataagctggaattcaacaaaaggtatgtttatgaacttttattctcaaaagttgaaatgctgactttctcgattcctcattttcagacttttatttcagataaatactaaaaacctaagtgaaccttgataatgctgtagtgtagattacttcactaccccatataatagaaggacttgctgtttagttgtagaggataacagcgtttttcagtggaaattgaaagtggaaaaattgaattttgctctacacagttaacatatagtggcctttttttggtatatatgtaaacatgttgacactggaaatacgcagtctgaaataaaattagtaattacttgaaattagtaatctcaaataacttttaagaagttatttctacacccaggaataaattattctgattttgtagacaacacaggaataggccactgaatatgcaggtatttagagtacaaatgtctgtggatattattggcacaccattctcgagagttagaattcgtagacccgcaacacatggactacccttgccaattgttatggttttatttttaaacctattctgtgaaaaagctcctcggtatttcaaacttgaattacaataaaaacaccaggtagggttgtttttaaatgggtctcaccccagtgctgactactgttgtttaccaactacatttcatctggtaactccattgaaactaagtacctcaaccattttttttttttatcataaagccttttttcaaatggaaagttgtttttgaagatcttgacatcagactttttcaatctttgaaaatgatggaaacagttaataaaaatgtttattttagaattcaggtgatgtctggcttgtgaggagctgtttataagtttgtctttgaaaaaggcttgcacacatcactctgagaccagctgtttcctgtgactttaaccttaccttccccagacaattgagctgaacctgtatctgcggtacagtagctgtttgtgatgtatttcttgttcactgtttctggggaatgttttgaaatattttattataaatccttttaagataggatgactactttcaaaattattgttgcctttggcaccaggaattcatagttgtgattggcagtaagtttgaggagtgttactttctaagttttaacaggtagttttgaaattatttccttttttccaaatttaagtagtgcctccctctgtaatgttgaaacaaggcttcaagtggattgtatagcaagagttaccctggttcatgcaggataatgcggctgttatctttgtcatctggaatgggaatctcatgtctttatccttatgtgcaatatttctataataatagactggaaaggccaccagaaagtggctttcaggtacattgcacaaatagtttccttaagtcattataactcacacattgcaagtaattaattttgttttgtataggtgttgcagtttatgaaattggccttcaagttaaaaggaaggaagccgtattcccgatggctagtgtttaatgactacaggtttccaggctccctttaatcttgggagcaaataaatctactattggacttctccctgcgtgacttttaacatttctgatactctctcttcttcctctttacagaagagaggtatgataactgaagttgtactttgcatattgaagtttaaagatacttcctctccccttttcacccctatttcaaatgatgtgataaaatcctcttgataggctatatggagaacatttgtcaatagttttatctatgcatggaagtcttcaaaaagtatatcttggattgtctaaaactgaatagatttcttatttatctgaaggtatacagactgccaacattttagacttatctctcagtctctgccactgaacttttatatatggctgctatcaaaatataaccggtttattttcatatttggaactaatataacagtatcacaaaatcttttacagtaagatagtttgtaataccagccgacccagctgcttaactgagtccttaaatcatttaatatatgggactgtaaatagagaaatctgtacattatgagatctgatttctggttatgcctatagatctttattttctttatccctatagatcattttcttctgatgttaagtgttatatttttgaaatgctcctaaacaagtaagccttagattgtattaatcctgaggattgataccatttcctcaacactttgtggagtatgattgacaccagtttttttttgactgcaggtttaacttggcttatcacttttcgtattgctcagtatgtccaagataggaataaaaaaatgtagttc

SEQ ID NO: 438920 - DNA, 1157 bp, Homo sapiens
cgccactccgggtttatttgtttacaagcggattacgtcagctcctccctctcttccctatctctggacccgcctcctgaactcttttcccgcccctttcggctccgaaccggcttgcgtcacaatggtgcgatattcggattggctggagtcggccatcacgctccagctacgccacttccttttcgtggcactataaagggtgctgcacggcgcttgcatctcttcgcctctcggagctggaaatgcagctattgagatcttcgaatgctgcggagctggaggcggaggcagctggggaggtccgagcgatgtgaccaggccgccatcgctcgtctcttcctctctcctgccgcctcctgtctcgaaaataacttttttagtctaaagaaagaaagacaaaagtagtcgtccgcccctcacgccctctcttcctctcagccttccgcccggtgaggaagcccggggtggttgctccgccgtcggggccgcgccgccgagccccggccgccccgggccgcccccgcacgccgcccccatgcatcccttctacacccgggccgccaccatgataggcgagatcgccgccgccgtgtccttcatctccaagtttctccgcaccaaggggctcacgagcgagcgacagctgcagaccttcagccagagcctgcaggagctgctggcagacctctgactatgtgaagatacggtgggaagatgactgaccgcaagacaggaagagagccctcaccgaggaaccaaatgggcagtatcttgatttggatttctcaactcaagaaccatgagaaatgaatgtctgctgttcaagccacccagtcaatggtatttggttatgggcagcccagttgacaagagagcgcatatgaatttaatgagcatttgagaaaaggtaatgtttttcatttttttcccttagaagcatctatcgatcttcattgacattctgtggtcagaacttggaattatagacgtaagagaatggggtaggtgcatggaagaattagggcaacggtatgacagggaaggagaggtgggagagggattagtggcctttaaatttataaatagggtataacaaagggtagaagaggggagtaaggcataaaaaaggatactagaaattggaaggagaaaga

SEQ ID NO: 438921 - DNA, 4667 bp, Homo sapiens
  misc_feature (1534)..(1534): n is a, c, g, or t
gggcagggaaggccaaaggtccaagggagccggcccagggagccctggccctgacctcccagaggctctagctctgtgggtgaaggctgctgtggcaccagccgggggcaggtctgcacagtggacagactctggtggaagcatcctggatcccagggccaggtcaggcccccagacaggggtgtagacatgctttataagtggggaagggcctgcttcctgagtcggaggctgagaggatggagggtgcagctttagtactgggcacctcagtgacttatatcacacccatgccctgcagcctaccccgtgcggtgcctgctgcccagtgcccatggctcttgcgcagactgggctgcccgctggtacttcgttgcctctgtgggccaatgtaaccgcttctggtatggcggctgccatggcaatgccaataactttgcctcggagcaagagtgcatgagcagctgccagggatctctccatgggccccgtcgtccccagcctggggcttctggaaggagcacccacacggatggtggcggcagcagtcctgcaggcgagcaggaacccagccagcacaggacaggggccgcggtgcagagaaagccctggccttctggtggtctctggcggcaagaccaacagcctgggccaggggaggccccccacacccaggcctttggagaatggccatgggggcaggagcttgggtccagggcccctggactgggtggagatgccggatcaccagcgccacccttccacagctcctcctacaggtgaggcccaccttccccaggtgagggggttaggacgcccagacaaggagcatgccagttggagctaaacccctgaagtcagccggccctccctccccatccctaacttctgtttctcccgagagccctgcctggtgggccttgttgccatcattctacagatggagaagctggggcttcagagacttgaggctactctgatgtctaatagacatctgtgcagatggtggctccggggttctccatcagatctcgccagtataccccggggcctgtctggctggaaaagtttattggcttcgtgacctttggcaagtcacccaacttctccaagcctcagtttcttgacctgtaaaatggtggcattaccttctgccctgtatacctcacaggtgtgggttctggtcaagatgactcctgggactggatcatattaatgaaggatttgggaaggttaaaaacaaaattaaaagcgttgtgttccacatgggtcgagcgtgtagtttagcccccacatgaacctggtgtgtgccgtccctcccgacctctccccaccccttgggctttgcacctaccttgttgctgctacaagaacaggttgaggcagtgatgcttgggggagccgggggcaggttggggagggtagattcctgaatccatgggcttctggggctctgcctcccatagggaccctctagccccaaaagtgcctgtgacaggatgggccccaagctgtctgtcatggaacacactgnttagggtggttctggtcctggcgctcatgccagtcagcagatctcacttcccacctctccaggattagcttggcaggtgtggagccctcgttggtgcaggcagccctggggcagttggtgcggctctcctgctcagacgacactgccccggaatcccaggctgcctggcagaaagatggccagcccatctcctctgacaggcacaggctgcagttcgacggatccctgatcatccaccccctgcaggcagaggacgcgggcacctacagctgtggcagcacccggccaggccgcgactcccagaagatccaacttcgcatcatagggggtgacatggccgtgctgtctgaggctgagctgagccgcttccctcagcccagggacccagctcaggactttggccaagcgggggctgctgggcccctgggggccatcccctcttcacacccacagcctgcaaacaggctgcgtttggaccagaaccagccccgggtggtggatgccagtccaggccagcggatccggatgacctgccgtgccgaaggcttcccgcccccagccatcgagtggcagagagatgggcagcctgtctcttctcccagacaccagctgcagcctgatggctccctggtcattagccgagtggctgtagaagatggcggcttctacacctgtgtcgctttcaatgggcaggaccgagaccagcgatgggtccagctcagagttctgggggagctgacaatctcaggactgccccctactgtgacagtgccagagggtgatacggccaggctattgtgtgtggtagcaggagaaagtgtgaacatcaggtggtccaggaacgggctacctgtgcaggctgatggccaccgtgtccaccagtccccagatggcacgctgctcatttacaacttgcgggccagggatgagggctcctacacgtgcagtgcctaccaggggagccaggcagtcagccgcagcaccgaggtgaaggtggtctcaccagcacccaccgcccagcccagggaccctggcagggactgcgtcgaccagccagagctggccaactgtgatttgatcctgcaggcccagctttgtggcaatgagtattactccagcttctgctgtgccagctgttcacgtttccagcctcacgctcagcccatctggcagtagggatgaaggctagttccagccccagtccaaaatagttcatagggctagggagaaaggaagatggactcttggcttcctctctctggctggcaaagggagttatcttctggaatacattagctctttcaaaaacccacccagtgtttagcctcaacggcagccagttaccagcttctctctgtagccttcagcagtgtttgcatctctgacataaccacaggctgctgttttcaagaagagcaatctgtttggataagaaaaacctttactttacagcttccctttataatttgttacacaggaatagttaaatgcatttgtttgtttgttttttgagacagagtttcactcttgttgcccaggctggagggcaatggcgcgatctcagctcactgcaacctccgtctcctgggttcttgattctcctgtgtcagccttctgagtagctaggattacagatgcctatcaccatgcctgggtaatttttgtatttttagttgagatggggtttcaccatgttggccaggctggtctcgaacttctgacctcagatgatctgcccgcctcagcctcccaaagtgctgggattacaggcatgagccaccacgcccagccatcaatgcattttttttattttttttttgagacagagtttcgcacttcttgcccaggctggagtacaatggtgcgatcttggctcactgcaacctccacctcctgggttcaagcgcttctccagcctcagcctcctgagtagctgggattacaggtatgtgccaccatgcctggctaattttgtatttttagtagagacggggtttctccatgttggtcagactggtcttgaactcccgacctcaggtaatccgcccgcctcggcctcccaaaatgctgggattagaggtgtgagccactgtgcccagcccatcaatgtgttttaaagctagctgtcagggttccacttaatttaaagctgggcagggagatgtgtaatgatttcaaagttaacacctgtttgttttctaaagggcatgccaagtcctgctgtatcagggaagtattctgtgctaaaatcagcgatggttcattgctctagtctctctcacccttctaggcagtgcatcagtcagctctaaatctggtgcagagggttaacagcataacccttgttggcaaaatggaatagatgttaagacctcaaatagggatttgggatgaaacagctgcagttagcactgttatctgagcatgaaagaactggaaacgctccttacgtcgagatgttggaccttgaagccctcctgaggccaacatgcaaatctggctgtgacggttcatctgacacctgtgtaaagctgaccagcctgctctgtacagtgacaatgaggagcccctctcttccttaagtaggaatctgtgaagcaaaatgtttgctgccaaagacaaatcagactgtcagtcattaaaaacagcattagcaggatgaggatagcaatggggaagggttgtgggcaatgcagtaacagggaaatggcttcagaaatggtttgagttggaagacaacattcttcatctctcaggacttctaattccttgatgctaaaagaagaggcatggattctatgagcttccaagtccctttccactttaaccttctacaaatctttcagaggactgcctagtagcaaaggttattcctggacacaggaaagacgggcattacagggaccaaagctctgaaaggtgacttttattaccaacacactggctggaaaagggacaaaccacatcacgggtgagtgatacttctcagtcttctctactcattcaacaaaggaaatgtgggctggggcagaggtcttttttcatttaatactggaaaaatattgaagagcatccatgttcacttatggctggttttgctatagaaattggaaaataaaggccacttttttga

SEQ ID NO: 438922 - DNA, 2918 bp, Homo sapiens
cagtgtagttagtattagagccaccgttaacaggactgttttcctattaccttgtctaatatgcattgcttcctctggggaaagtgaaaaactggaaggatgaggacccaggtgactaagataagctggtgatattgaagggacaaaactttgatggttggaggaacccagcagagaaagggaaaagataagagctcttgctaactcaaaattttacttggggctgatcctacctgctctcccaatccagaggcaagaacagttgtcatttagtaattcaggtctcaaacatttttttttaacttcaagagatgtttaattatccagtcaataaatatttgggagtctaggaagagctattcagtgggctgaggccacaaataataatgggaggaccactgcatgttgaagtgaggccaagaaacaggtagaaatcatcatccctcatagagtttgtacgtatggttaaaaggttacagggtaagtgcacttcgttttcaatctggcagttataatgctgtgttcctttgaaggaaatgaaatggcaggtgagaattttcagcatacacagagcttcctcaccaccttctctctcccctgtcgttctgcagcacccaccgcccagcccagggaccctggcagggactgcgtcgaccagccagagctggccaactgtgatttgatcctgcaggcccagctttgtggcaatgagtattactccagcttctgctgtgccagctgttcacgtttccagcctcacgctcagcccatctggcagtagggatgaaggctagttccagccccagtccaaaatagttcatagggctagggagaaaggaagatggactcttggcttcctctctctggctggcaaagggagttatcttctggaatacattagctctttcaaaaacccacccagtgtttagcctcaacggcagccagttaccagcttctctctgtagccttcagcagtgtttgcatctctgacataaccacaggctgctgttttcaagaagagcaatctgtttggataagaaaaacctttactttacagcttccctttataatttgttacacaggaatagttaaatgcatttgtttgtttgttttttgagacagagtttcactcttgttgcccaggctggagggcaatggcgcgatctcagctcactgcaacctccgtctcctgggttcttgattctcctgtgtcagccttctgagtagctaggattacagatgcctatcaccatgcctgggtaatttttgtatttttagttgagatggggtttcaccatgttggccaggctggtctcgaacttctgacctcagatgatctgcccgcctcagcctcccaaagtgctgggattacaggcatgagccaccacgcccagccatcaatgcattttttttattttttttttgagacagagtttcgcacttcttgcccaggctggagtacaatggtgcgatcttggctcactgcaacctccacctcctgggttcaagcgcttctccagcctcagcctcctgagtagctgggattacaggtatgtgccaccatgcctggctaattttgtatttttagtagagacggggtttctccatgttggtcagactggtcttgaactcccgacctcaggtaatccgcccgcctcggcctcccaaaatgctgggattagaggtgtgagccactgtgcccagcccatcaatgtgttttaaagctagctgtcagggttccacttaatttaaagctgggcagggagatgtgtaatgatttcaaagttaacacctgtttgttttctaaagggcatgccaagtcctgctgtatcagggaagtattctgtgctaaaatcagcgatggttcattgctctagtctctctcacccttctaggcagtgcatcagtcagctctaaatctggtgcagagggttaacagcataacccttgttggcaaaatggaatagatgttaagacctcaaatagggatttgggatgaaacagctgcagttagcactgttatctgagcatgaaagaactggaaacgctccttacgtcgagatgttggaccttgaagccctcctgaggccaacatgcaaatctggctgtgacggttcatctgacacctgtgtaaagctgaccagcctgctctgtacagtgacaatgaggagcccctctcttccttaagtaggaatctgtgaagcaaaatgtttgctgccaaagacaaatcagactgtcagtcattaaaaacagcattagcaggatgaggatagcaatggggaagggttgtgggcaatgcagtaacagggaaatggcttcagaaatggtttgagttggaagacaacattcttcatctctcaggacttctaattccttgatgctaaaagaagaggcatggattctatgagcttccaagtccctttccactttaaccttctacaaatctttcagaggactgcctagtagcaaaggttattcctggacacaggaaagacgggcattacagggaccaaagctctgaaaggtgacttttattaccaacacactggctggaaaagggacaaaccacatcacgggtgagtgatacttctcagtcttctctactcattcaacaaaggaaatgtgggctggggcagaggtcttttttcatttaatactggaaaaatattgaagagcatccatgttcacttatggctggttttgctatagaaattggaaaataaaggccacttttttgaaatccccagtttaattaaaccagattttggcctattggtataaacacatcagaaggtaagtttgaggttagctagcagctaactagttctaatagaaccagtcacagaatagtgggctaagattagaggtaaaactcattctaggccagtggttctcaactttaccatattgcgagctta

SEQ ID NO: 438923 - DNA, 859 bp, Homo sapiens
cctcctagccctcttacccattgctatcgccaacatgcaaatctggctgtgacggttcatctgacacctgtgtaaagctgaccagcctgctctgtacagtgacaatgaggagcccctctcttccttaagtaggaatctgtgaagcaaaatgtttgctgccaaagacaaatcagactgtcagtcattaaaaacagcattagcaggatgaggatagcaatggggaagggttgtgggcaatgcagtaacagggaaatggcttcagaaatggtttgagttggaagacaacattcttcatctctcaggacttctaattccttgatgctaaaagaagaggcatggattctatgagcttccaagtccctttccactttaaccttctacaaatctttcagaggactgcctagtagcaaaggttattcctggacacaggaaagacgggcattacagggaccaaagctctgaaaggtgacttttattaccaacacactggctggaaaagggacaaaccacatcacgggtgagtgatacttctcagtcttctctactcattcaacaaaggaaatgtgggctggggcagaggtcttttttcatttaatactggaaaaatattgaagagcatccatgttcacttatggctggttttgctatagaaattggaaaataaaggccacttttttgaaatccccagtttaattaaaccagattttggcctattggtataaacacatcagaaggtaagtttgaggttagctagcagctaactagttctaatagaaccagtcacagaatagtgggctaagattagaggtaaaactcattctaggccagtggttctcaactttaccatattgcgagctta

SEQ ID NO: 438924 - DNA, 2656 bp, Homo sapiens
cagtgtagttagtattagagccaccgttaacaggactgttttcctattaccttgtctaatatgcattgcttcctctggggaaagtgaaaaactggaaggatgaggacccaggtgactaagataagctggtgatattgaagggacaaaactttgatggttggaggaacccagcagagaaagggaaaagataagagctcttgctaactcaaaattttacttggggctgatcctacctgctctcccaatccagaggcaagaacagttgtcatttagtaattcaggtctcaaacatttttttttaacttcaagagatgtttaattatccagtcaataaatatttgggagtctaggaagagctattcagtgggctgaggccacaaataataatgggaggaccactgcatgttgaagtgaggccaagaaacaggtagaaatcatcatccctcatagagtttgtacgtatggttaaaaggttacagggtaagtgcacttcgttttcaatctggcagttataatgctgtgttcctttgaaggaaatgaaatggcaggtgagaattttcagcatacacagagcttcctcaccaccttctctctcccctgtcgttctgcagcacccaccgcccagcccagggaccctggcagggactgcgtcgaccagccagagctggccaactgtgatttgatcctgcaggcccagctttgtggcaatgagtattactccagcttctgctgtgccagctgttcacgtttccagcctcacgctcagcccatctggcagtagggatgaaggctagttccagccccagtccaaaatagttcatagggctagggagaaaggaagatggactcttggcttcctctctctggctggcaaagggagttatcttctggaatacattagctctttcaaaaacccacccagtgtttagcctcaacggcagccagttaccagcttctctctgtagccttcagcagtgtttgcatctctgacataaccacaggctgctgttttcaagaagagcaatctgtttggataagaaaaacctttactttacagcttccctttataatttgttacacaggaatagttaaatgcatttgtttgtttgttttttgagacagagtttcactcttgttgcccaggctggagggcaatggcgcgatctcagctcactgcaacctccgtctcctgggttcttgattctcctgtgtcagccttctgagtagctaggattacagatgcctatcaccatgcctgggtaatttttgtatttttagttgagatggggtttcaccatgttggccaggctggtctcgaacttctgacctcagatgatctgcccgcctcagcctcccaaagtgctgggattacaggcatgagccaccacgcccagccatcaatgcattttttttattttttttttgagacagagtttcgcacttcttgcccaggctggagtacaatggtgcgatcttggctcactgcaacctccacctcctgggttcaagcgcttctccagcctcagcctcctgagtagctgggattacaggtatgtgccaccatgcctggctaattttgtatttttagtagagacggggtttctccatgttggtcagactggtcttgaactcccgacctcaggtaatccgcccgcctcggcctcccaaaatgctgggattagaggtgtgagccactgtgcccagcccatcaatgtgttttaaagctagctgtcagggttccacttaatttaaagctgggcagggagatgtgtaatgatttcaaagttaacacctgtttgttttctaaagggcatgccaagtcctgctgtatcagggaagtattctgtgctaaaatcagcgatggttcattgctctagtctctctcacccttctaggcagtgcatcagtcagctctaaatctggtgcagagggttaacagcataacccttgttggcaaaatggaatagatgttaagacctcaaatagggatttgggatgaaacagctgcagttagcactgttatctgagcatgaaagaactggaaacgctccttacgtcgagatgttggaccttgaagccctcctgaggccaacatgcaaatctggctgtgacggttcatctgacacctgtgtaaagctgaccagcctgctctgtacagtgacaatgaggagcccctctcttccttaagtaggaatctgtgaagcaaaatgtttgctgccaaagacaaatcagactgtcagtcattaaaaacagcattagcaggatgaggatagcaatggggaagggttgtgggcaatgcagtaacagggaaatggcttcagaaatggtttgagttggaagactcatgatgagtactaagctgagtttatttcaggaatgtaaagttggttgactattcaaaaaatctaatcagtggaataaaccaattaacaattaagataaaaatcataatcatctcggctaggcatggtggcatgcgcctgtagtcccagctctttgggaggctgaggcgggcggatcgcatgaggccgggagttcaagaccagcctggccaacatggtgaaaccctatctctacaaaatataccaaaattagccgggcgtggtggtgcctgcctgtctcaaaaaaagcaagactctgtctttaaaaaaaaaaa

SEQ ID NO: 438925 - DNA, 1474 bp, Homo sapiens
gccgccgcccgcgacctcctctcctcctccgtcgtcaccccggccgccctgccagccccgaacttgcccgcgcctggccgcgcggcccctcagcccacggggctggcggcgcggttgggatgggaccgatgtggcgcatgcgtggtggcgccactaggcgcgggagttgctgcggcggggacggtgctgcggacggccgagggccaggccgctccggccgggctcgtggtgggggcagccccagcggcggcggcggcggcgtgggctggcgaggccgcgcggacggcgcccgacagcagctggaggagcggtttgccgacctggcggcgagccacttggaggccatccgtgcgcgggacgagtgggaccggcagaacgcgcggctgcgtcaggagaacgcccggctgcggctcgagaaccggcggctgaagcgcgagaaccgcagcctcttccgtcaggctttgcggctccccggcgaaggcggcaacgggacgcccgcggaggcacgccgggtccctgaagaggccagcacgaaccggagggctagagacagcggccgagaggacgagccgggcagccccagggccctgagggcccgacttgagaagctggaagccatgtaccgccgggccctgctgcagctgcacctcgagcagcggggaccacgtccgagcggggacaaggaggagcagcctctacagtgaacccgactccggcctccgctcccgggactcggagccctctgggccctggctgtagccgaggccgcagccggtgagaggcggagcctcggagcgggcccctcctcctccgttcccagctacccccgacctcgcgcacgccctggcccgcgccctgcccgcggataccttggactacggtgccttcccgcccccaccagtggacacttccgggtggcgcttggccatccgcttggtggaggtcgagtgggtgcaagggccctcaggacctcccacatgtacagttcccctgcctcttgccccggctagtttccctggagagaggcctagccaacaacgaagggacggattttaaaacagcgagaactgggtgccaagaaacacttcatattccctgaacttttctggatgttgtgcgaacctgttgtatttttttttttcctgtattttggttctgagggatgagtaatgtgtttttagttggttgagtttatccattcttcaatcccctaaagccttcagctattctttcatatgtggccaacattttaagtacagtgtttgcttttataagtcggtgttacttggatgtcctataaaatacccactttttataaagatgatatttataacctaggaactcatgcctgtcttggctgcagtccctgtacatctaatatatactgatttgtttgcccccagagaatttttaaggtatctgcctatatcgtgatcttttgaaatggtaaataaatctggtgcattaaaaatta

SEQ ID NO: 438926 - DNA, 1526 bp, Homo sapiens
gccgccgcccgcgacctcctctcctcctccgtcgtcaccccggccgccctgccagccccgaacttgcccgcgcctggccgcgcggcccctcagcccacggggctggcggcgcggttgggatgggaccgatgtggcgcatgcgtggtggcgccactaggcgcgggagttgctgcggcggggacggtgctgcggacggccgagggccaggccgctccggccgggctcgtggtgggggcagccccagcggcggcggcggcggcgtgggctggcgaggccgcgcggacggcgcccgacagcagctggaggagcggtttgccgacctggcggcgagccacttggaggccatccgtgcgcgggacgagtgggaccggcagaacgcgcggctgcgtcaggagaacgcccggctgcggctcgagaaccggcggctgaagcgcgagaaccgcagcctcttccgtcaggctttgcggctccccggcgaaggcggcaacgggacgcccgcggaggcacgccgggtccctgaagaggccagcacgaaccggagggctagagacagcggccgagaggacgagccgggcagccccagggccctgagggcccgacttgagaagctggaagccatgtaccgccgggccctgctgcagctgcacctcgagcagcggggaccacgtccgagcggggacaaggaggagcagcctctacagtgaacccgactccggcctccgctcccgggactcggagccctctgggccctggctgtagccgaggccgcagccggtgagaggcggagcctcggagcgggcccctcctcctccgttcccagctacccccgacctcgcgcacgccctggcccgcgccctgcccgcggataccttggactacggtgccttcccgcccccaccagtggacacttccgggtggcgcttggccatccgcttggtggaggtcgagtgggtgcaagggccctcaggacctcccacatgtacagttcccctgcctcttgccccggctagtttccctggagagaggcctagccaacaacgaagggacggattttaaaacagcgagaactgggtgccaagaaacacttcatattccctgaacttttctggatgttgtgcgaacctgttgtatttttttttttcctgtattttggttctgagggatgagtaatgtgtttttagttggttgagtttatccattcttcaatcccctaaagccttcagctattctttcatatgtggccaacattttaagtacagtgtttgcttttataagtcggtgttacttggatgtcctataaaatacccactttttataaagatgatatttataacctaggaactcatgcctgtcttggctgcagtccctgtacatctaatatatactgatttgtttgcccccagagaatttttaaggtatctgcctatatcgtgatcttttgaaatggtaaataaatctggtgcattaaaaattatctgaaaggttgcggcgagtattatttgaagtgtgttacatttttatatttt

SEQ ID NO: 438927 - DNA, 241 bp, Homo sapiens
gcggccgcctactactactactactgctcgaattcaagcttctaacgatgtacggggtcatgcctgtcttggctgcagtccctgtacatctaatatatactgatttgtttgcccccagagaatttttaaggtatctgcctatatcgtgatcttttgaaatggtaaataaatctggtgcattaaaaattatctgaaaggttgcggcgagtattatttgaagtgtgttacatttttatatttt

SEQ ID NO: 438928 - DNA, 612 bp, Homo sapiens
gccagggagtcgggtgtagggttggggtgcgattacgctgctagcagttacagtgcagaagaacgtggcggctgggattggggcgtggtcaggccatccacggcttccgagagacagagaagtcgcgctggtcagaagccagccgggccatcctgcagcgcgtgcaggcggccgcctttggccccggccagaccctgctctcctccgtgcacgtgctggacctggaagcccgcggctacatcaagccccacgtggacagcatcaagttctgcggggccaccatcgccggcctgtctctcctgtctcccagcgttatgcggctggtgcacacccaggagccgggggagtggctggaactcttgctggagccgggctccctctacatccttaggggctcagcccgttatgacttctcccatgagatccttcgggatgaagagtccttctttggggaacgccggattccccggggccggcgcatctccgtgatctgccgctccctccctgagggcatggggccaggggagtctggacagccgcccccagcctgctgacccccagctttctacagacaccagatttgtgaataaagttggggaatggacagcctaa

SEQ ID NO: 438929 - DNA, 464 bp, Homo sapiens
agctcaagagaggaggcgggttctggaaaaaggccaatagcctgtgaaggcgagtctagcagcaaccaatagctatgagcgagaggcgggactctgagggaagtcaatcgctgccgcaggtaccgccaatggcttttggcgggggcgttccccaaccctgccctctctcatgaccccgctccgggattatggccgggactgggctgctggcgctgcggacgctgccagggcccagctgggtgcgaggctcgggcccttccgtgctgagccgcctgcaggacgcggccgtggtgcggcctggcttcctgagcacggcagaggaggagacgctgagccgagaactggagcccgagctgcgccgccgccgctacgaatacgatcactgggacgcgaaaacgaccctacccgggaggacaatcggggacagatgtggttggagcatgaagaggaagagcagtagtaga

SEQ ID NO: 438930 - DNA, 983 bp, Homo sapiens
agctcaagagaggaggcgggttctggaaaaaggccaatagcctgtgaaggcgagtctagcagcaaccaatagctatgagcgagaggcgggactctgagggaagtcaatcgctgccgcaggtaccgccaatggcttttggcgggggcgttccccaaccctgccctctctcatgaccccgctccgggattatggccgggactgggctgctggcgctgcggacgctgccagggcccagctgggtgcgaggctcgggcccttccgtgctgagccgcctgcaggacgcggccgtggtgcggcctggcttcctgagcacggcagaggaggagacgctgagccgagaactggagcccgagctgcgccgccgccgctacgaatacgatcactgggacgcggccatccacggcttccgagagacagagaagtcgcgctggtcagaagccagccgggccatcctgcagcgcgtgcaggcggccgcctttggccccggccagaccctgctctcctccgtgcacgtgctggacctggaagcccgcggctacatcaagccccacgtggacagcatcaagttctgcggggccaccatcgccggcctgtctctcctgtctcccagcgttatgcggctggtgcacacccaggagccgggggagtggctggaactcttgctggagccgggctccctctacatccttaggggctcagcccgttatgacttctcccatgagatccttcgggatgaagagtccttctttggggaacgccggattccccggggccggcgcatctccgtgatctgccgctccctccctgagggcatggggccaggggagtctggacagccgcccccagcctgctgacccccagctttctacagacaccagatttgtgaataaagttggggaatggacagcctaaaaaaaaaaaaataattttatttttttctttatatataaatttatcatatttacttttatataaaaaaaaaa

SEQ ID NO: 438931 - DNA, 316 bp, Homo sapiens
agcagggggctggaatccaggaggctggaatccaggtctgcctggagcaggggctgccctccttgcacccagtcacagcctgtttcttcctgcaggggctcagcccgttatgacttctcccatgagatccttcgggatgaagagtccttctttggggaacgccggattccccggggccggcgcatctccgtgatctgccgctccctccctgagggcatggggccaggggagtctggacagccgcccccagcctgctgacccccagctttctacagacaccagatttgtgaataaagttggggaatggacagcctaa

SEQ ID NO: 438932 - DNA, 912 bp, Homo sapiens
agctcaagagaggaggcgggttctggaaaaaggccaatagcctgtgaaggcgagtctagcagcaaccaatagctatgagcgagaggcgggactctgagggaagtcaatcgctgccgcaggtaccgccaatggcttttggcgggggcgttccccaaccctgccctctctcatgaccccgctccgggattatggccgggactgggctgctggcgctgcggacgctgccagggcccagctgggtgcgaggctcgggcccttccgtgctgagccgcctgcaggacgcggccgtggtgcggcctggcttcctgagcacggcagaggaggagacgctgagccgagaactggagcccgagctgcgccgccgccgctacgaatacgatcactgggacgcggccatccacggcttccgagagacagagaagtcgcgctggtcagaagccagccgggccatcctgcagcgcgtgcaggcggccgcctttggccccggccagaccctgctctcctccgtgcacgtgctggacctggaagcccgcggctacatcaagccccacgtggacagcatcaagttctgcggggccaccatcgccggcctgtctctcctgtctcccagcgttatgcggctggtgcacacccaggagccgggggagtggctggaactcttgctggagccgggctccctctacatccttaggggctcagcccgttatgacttctcccatgagatccttcgggatgaagagtccttctttggggaacgccggattccccggggccggcgcatctccgtgatctgccgctccctccctgagggcatggggccaggggagtctggacagccgcccccagcctgctgacccccagctttctacagacaccagatttgtgaataaagttggggaatggacagcctaa

SEQ ID NO: 438933 - DNA, 863 bp, Homo sapiens
gccagggagtcgggtgtagggttggggtgcgattacgctgctagcagttacagtgcagaagaacgtggcggctgggattggggcgtggtcaggccatccacggcttccgagagacagagaagtcgcgctggtcagaagccagccgggccatcctgcagcgcgtgcaggcggccgcctttggccccggccagaccctgctctcctccgtgcacgtgctggacctggaagcccgcggctacatcaagccccacgtggacagcatcaagttctgcggggccaccatcgccggcctgtctctcctgtctcccagcgttatgcggctggtgcacacccaggagccgggggagtggctggaactcttgctggagccgggctccctctacatccttaggggctcagcccgttatgacttctcccatgagatccttcgggatgaagagtccttctttggggaacgccggattccccggggccggcgcatctccgtgatctgccgctccctccctgagggcatggggccaggggagtctggacagccgcccccagcctgctgacccccagctttctacagacaccagatttgtgaataaagttggggaatggacagcctaaaaaaaaaaaaaaaaaaaaaaaaaaaacaaaaaacaaacaaacacaaacaaaaaaacccgcagcggcgctccacattcacagcgggcgcgccgaaacagcaggggtcaaacaaaccggccaccgggggccaaaggggtgaaccgcagccccagtttccgtcgacccaagggaggacaaaacatcgcggagccccccataagagagcacggaacaaccacagcaaccacgcggggagaaccgcggcacatagg

SEQ ID NO: 438934 - DNA, 1133 bp, Homo sapiens
agctcaagagaggaggcgggttctggaaaaaggccaatagcctgtgaaggcgagtctagcagcaaccaatagctatgagcgagaggcgggactctgagggaagtcaatcgctgccgcaggtaccgccaatggcttttggcgggggcgttccccaaccctgccctctctcatgaccccgctccgggattatggccgggactgggctgctggcgctgcggacgctgccagggcccagctgggtgcgaggctcgggcccttccgtgctgagccgcctgcaggacgcggccgtggtgcggcctggcttcctgagcacggcagaggaggagacgctgagccgagaactggagcccgagctgcgccgccgccgctacgaatacgatcactgggacgcggccatccacggcttccgagagacagagaagtcgcgctggtcagaagccagccgggccatcctgcagcgcgtgcaggcggccgcctttggccccggccagaccctgctctcctccgtgcacgtgctggacctggaagcccgcggctacatcaagccccacgtggacagcatcaagttctgcggggccaccatcgccggcctgtctctcctgtctcccagcgttatgcggctggtgcacacccaggagccgggggagtggctggaactcttgctggagccgggctccctctacatccttaggggctcagcccgttatgacttctcccatgagatccttcgggatgaagagtccttctttggggaacgccggattccccggggccggcgcatctccgtgatctgccgctccctccctgagggcatggggccaggggagtctggacagccgcccccagcctgctgacccccagctttctacagacaccagatttgtgaataaagttggggaatggacagcctaactgggacattgcagtggctgcttgctggggccgggatttgcaggggaacccaggatggcactggcccatagggagctccaggtgtggctggctggacacatggtcaaagtcacaaggccgggagagtggtgtcctttattgcactcactgctggtcgccccagcccactcccctcctcgttgtctctgcatccaggtctccaataaataagtcagccgagc

SEQ ID NO: 438935 - DNA, 662 bp, Homo sapiens
gtggggaatagaaaggtccccttcaactaaggtataacctgccctaacaagcctgaaatagttctctaggcggccctcagcaagtgcatgctgcgggtgccaggctcaaaagggagcaccggtggttttaacaggggtcattgcttccgcaggcgcaaacacatgtttcacggggtgtcttggggggttctaaccgcagtcgctcttcacagcctgctatacctactagggtccaatgcccgccagcctagctccagtgcttctagtaggagggctgaaagggagcaacttttcctccaatcctggaaattcgacacaattagatttgaactgctggaaatacaacacatgttaaatcttaagtacaagggggaaaaaataaatcagttattgaaacataaaaatgaataccaaggacctgatcaaatttcacacagcagtttccttgcaacactttcagctccccatgctccagaatacccacccaagaaaataataggctttaaaacaatatcggctcctcatccaaagaacaactgctgattgaaacacctcattagctgagtgtagagaagtgcatcttatgaaacagtcttagcagtggtaggttgggaaggagatagctgcaaccaaaaaagaaataaatattctataaaccttca

SEQ ID NO: 438936 - DNA, 1416 bp, Homo sapiens
ggatccccgggctgcaggattcggcacgaggagaagtgcatcttatgaaacagtcttagcagtggtaggttgggaaggagatagctgcaaccaaaaaagaaataaatattctataaaccttcagctgctatcgggtttcacttttctgctcttgctgtccaaagactcagtgtatttcattacttttgactctactagacatgactgggtttcaacagtaaaggtcttcaactcttgctagtcattggaatcaagccgcaaaattttaaaaactgagatgctcaggccacaccccagctcaattaaatcagaaaccctagacttgggatcctctaactattagatttcttaaagctccctcagtaattccaatgtacagtcaagtttgagaactaccaatctaaatttcaagtttgagggtatttgaaaattaaagccattcacaatacgaagccagctaaaaatgtagaatgattttgagcaacttgtggagtataataagagaattaatgtgacttcaatgcttggagcattcttgttcaagtggcccaggtttggtgaaacaggactaccttgtcatctgcacgtccaggcatatttcgtagttttgcagtaaataatattcacataatgatactgtattgactttcaattttcagaattaacctatagttacagcacttaagacaaccagagttataaaagagaatttaaatattataactttggacaatataaaagtgatgatttaactgacagaagctaggaaatataagggggaggagaagtggaagaaagcaaagagagtcaggaatactacttaaaactgatgggttaagaaatagtgctttaattctatttaagtaataaaagaaatggatgtaaatcataaaaatatatatctaaaattaaaatattgatggtagtatgctaaatttcttaccttgaataatacaaagacaaatggtattgtgtagattaacaaatgaagaaacagagacttaacatattatttagaggaataagacagaattagccaaaggggcttactctaagacctgggagaaagacctgggagtcagggcacaggaaagatgacatttccttattacctgccctctacagtatttgaatatttatttccatgtacttgtcattacttttctaaaaacaactacagacagtcatacaagcaactcaagcctatatgagagatctattaagcccacggttttcattttacaggtgataaaaccaagtccagagaagtaaaattacttactgaggatcccacatttatagcagagctgagagattaaaattcaggtcttctgaactcaagtctcttgctcaaaaagtggatacacagccagagatcttacagggcaaggtgacaggctgtgttcaatatctctg

SEQ ID NO: 438937 - DNA, 416 bp, Homo sapiens
ggcacgagggaaattcgacacaattagatttaacatgtgttgtatttccagcagttcaaatctaattgtgtcgaatttccaggattgctggaaatacaacacatgttaaatcttaagtacaagggggaaaaaataaatcagttattgaaacataaaaatgaataccaaggacctgatcaaatttcacacagcagtttccttgcaacactttcagctccccatgctccagaatacccacccaagaaaataataggctttaaaacaatatcggctcctcatccaaagaacaactgctgattgaaacacctcattagctgagtgtagagaagtgcatcttatgaaacagtcttagcagtggtaggttgggaaggagatagctgcaaccaaaaaagaaataaatattctataaaccttca

SEQ ID NO: 438938 - DNA, 632 bp, Homo sapiens
ccgagttccaatccaaataattctttggaggatggtgaccagatgctaaagtttccaacacatactaaaatgtctctgggtccgagttaagtttgattttcttctgtgagtactatgttggggttactagagttgtggacagctggagatccccaattagaactctaaacactgcttgaatttcttcattaacccaacttagagacatctttcttaatgatttatgcttagatgccctaaaaaggcagtagctaggttctgaggcagctagaataatctctagaaagaaatacagtaattacgggtttgtatttattttttatctcattctgaaaaattctactgtctttaagtcatctatgtagtatttctccataatggcttcaatttataccaattgcaactgttgaatctcctcctaaggaaaggataacagtgagcacagcttcacttttgcttccttgattttcctttttagaatggactggtacctattgttgaaccagaggtaattcctgatggagaccatgacctggaacactgccagtatgttactgagaaggtaagttttaaatatgaaggccccaattctagttgaaaaattagcctttaggatggatagcatagagaag

SEQ ID NO: 438939 - DNA, 1609 bp, Homo sapiens
aaaaacatgatgagaagtctataaaaattgtgtgctaccaaagatctgtcttatttggcagctgctgcctcacccacagcttttgatatctaggaggactcttctctcccaaactacctgtcaccatggcccaccgatttccagccctcacccaggagcagaagaaggagctctcagaaattgcccagagcattgttgccaatggaaaggggatcctggctgcagatgaatctgtaggtaccatggggaaccgcctgcagaggatcaaggtggaaaacactgaagagaaccgccggcagttccgagaaatcctcttctctgtggacagttccatcaaccagagcatcgggggtgtgatccttttccacgagaccctctaccagaaggacagccagggaaagctgttcagaaacatcctcaaggaaaaggggatcgtggtgggaatcaagttagaccaaggaggtgctcctcttgcaggagaacaaacaaagaaaccaccattcaagggcttgatggcctctcagagcgctgtgctcagtacaagaaagatggtgttgactttgggaagtggcgtgctgtgctgaggattgccgaccagtgtccatccagcctcgctatccaaatggactggtacctattgttgaaccagaggtaattcctgatggagaccatgacctggaacactgccagtatgttactgagaaggtcctggctgctgtctacaaggccctgaatgaccatcatgtttacctggagggcaccctgctaaagcccaacatggtgactgctggacatgcctgcaccaagaagtatactccagaacaagtagctatggccaccgtaacagctctccaccgtactgttcctgcagctgttcctggcatctgctttttgtctggtggcatgagtgaagaggatgccactctcaacctcaatgctatcaacctttgccctctaccaaagccctggaaactaagtttctcttatggacgggccctgcaggccagtgcactggctgcctggggtggcaaggctgcaaacaaggaggcaacccaggaggcttttatgaagcgggccatggctaactgccaggcggccaaaggacagtatgttcacacgggttcttctggggctgcttccacccagtcgctcttcacagcctgctatacctactagggtccaatgcccgccagcctagctccagtgcttctagtaggagggctgaaagggagcaacttttcctccaatcctggaaattcgacacaattagatttgaactgctggaaatacaacacatgttaaatcttaagtacaagggggaaaaaataaatcagttattgaaacataaaaatgaataccaaggacctgatcaaatttcacacagcagtttccttgcaacactttcagctccccatgctccagaatacccacccaagaaaataataggctttaaaacaatatcggctcctcatccaaagaacaactgctgattgaaacacctcattagctgagtgtagagaagtgcatcttatgaaacagtcttagcagtggtaggttgggaaggagatagctgcaaccaaaaaagaaataaatattctataaaccttca

SEQ ID NO: 438940 - DNA, 1588 bp, Homo sapiens
  misc_feature (43)..(43): n is a, c, g, or t
  misc_feature (45)..(45): n is a, c, g, or t
  misc_feature (47)..(47): n is a, c, g, or t
gggggggggagggggggggggcggggaccgggagacgtccttncnancgcgagctgcctcacccacagcttttgatatctaggaggactcttctctcccaaactacctgtcaccatggcccaccgatttccagccctcacccaggagcagaagaaggagctctcagaaattgcccagagcattgttgccaatggaaaggggatcctggctgcagatgaatctgtaggtaccatggggaaccgcctgcagaggatcaaggtggaaaacactgaagagaaccgccggcagttccgagaaatcctcttctctgtggacagttccatcaaccagagcatcgggggtgtgatccttttccacgagaccctctaccagaaggacagccagggaaagctgttcagaaacatcctcaagggaacaaacaaagaaaccaccattcaagggcttgatggcctctcagagcgctgtgctcagtacaagaaagatggtgttgactttgggaagtggcgtgctgtgctgaggattgccgaccagtgtccatccagcctcgctatccaggaaaacgccaacgccctggctcgctacgccagcatctgtcagcagaatggactggtacctattgttgaaccagaggtaattcctgatggagaccatgacctggaacactgccagtatgttactgagaaggtcctggctgctgtctacaaggccctgaatgaccatcatgtttacctggagggcaccctgctaaagcccaacatggtgactgctggacatgcctgcaccaagaagtatactccagaacaagtagctatggccaccgtaacagctctccaccgtactgttcctgcagctgttcctggcatctgctttttgtctggtggcatgagtgaagaggatgccactctcaacctcaatgctatcaacctttgccctctaccaaagccctggaaactaagtttctcttatggacgggccctgcaggccagtgcactggctgcctggggtggcaaggctgcaaacaaggaggcaacccaggaggcttttatgaagcgggccatggctaactgccaggcggccaaaggacagtatgttcacacgggttcttctggggctgcttccacccagtcgctcttcacagcctgctatacctactagggtccaatgcccgccagcctagctccagtgcttctagtaggagggctgaaagggagcaacttttcctccaatcctggaaattcgacacaattagatttgaactgctggaaatacaacacatgttaaatcttaagtacaagggggaaaaaataaatcagttattgaaacataaaaatgaataccaaggacctgatcaaatttcacacagcagtttccttgcaacactttcagctccccatgctccagaatacccacccaagaaaataataggctttaaaacaatatcggctcctcatccaaagaacaactgctgattgaaacacctcattagctgagtgtagagaagtgcatcttatgaaacagtcttagcagtggtaggttgggaaggagatagctgcaaccaaaaaagaaataaatattctataaaccttca

SEQ ID NO: 438941 - DNA, 2902 bp, Homo sapiens
aaaaacatgatgagaagtctataaaaattgtgtgctaccaaagatctgtcttatttggcagctgctgcctcacccacagcttttgatatctaggaggactcttctctcccaaactacctgtcaccatggcccaccgatttccagccctcacccaggagcagaagaaggagctctcagaaattgcccagagcattgttgccaatggaaaggggatcctggctgcagatgaatctgtaggtaccatggggaaccgcctgcagaggatcaaggtggaaaacactgaagagaaccgccggcagttccgagaaatcctcttctctgtggacagttccatcaaccagagcatcgggggtgtgatccttttccacgagaccctctaccagaaggacagccagggaaagctgttcagaaacatcctcaaggaaaaggggatcgtggtgggaatcaagttagaccaaggaggtgctcctcttgcaggagaacaaacaaagaaaccaccattcaagggcttgatggcctctcagagcgctgtgctcagtacaagaaagatggtgttgactttgggaagtggcgtgctgtgctgaggattgccgaccagtgtccatccagcctcgctatccaaatggactggtacctattgttgaaccagaggtaattcctgatggagaccatgacctggaacactgccagtatgttactgagaaggtcctggctgctgtctacaaggccctgaatgaccatcatgtttacctggagggcaccctgctaaagcccaacatggtgactgctggacatgcctgcaccaagaagtatactccagaacaagtagctatggccaccgtaacagctctccaccgtactgttcctgcagctgttcctggcatctgctttttgtctggtggcatgagtgaagaggatgccactctcaacctcaatgctatcaacctttgccctctaccaaagccctggaaactaagtttctcttatggacgggccctgcaggccagtgcactggctgcctggggtggcaaggctgcaaacaaggaggcaacccaggaggcttttatgaagcgggccatggctaactgccaggcggccaaaggacagtatgttcacacgggttcttctggggctgcttccacccagtcgctcttcacagcctgctatacctactagggtccaatgcccgccagcctagctccagtgcttctagtaggagggctgaaagggagcaacttttcctccaatcctggaaattcgacacaattagatttgaactgctggaaatacaacacatgttaaatcttaagtacaagggggaaaaaataaatcagttattgaaacataaaaatgaataccaaggacctgatcaaatttcacacagcagtttccttgcaacactttcagctccccatgctccagaatacccacccaagaaaataataggctttaaaacaatatcggctcctcatccaaagaacaactgctgattgaaacacctcattagctgagtgtagagaagtgcatcttatgaaacagtcttagcagtggtaggttgggaaggagatagctgcaaccaaaaaagaaataaatattctataaaccttcagctgctatcgggtttcacttttctgctcttgctgtccaaagactcagtgtatttcattacttttgactctactagacatgactgggtttcaacagtaaaggtcttcaactcttgctagtcattggaatcaagccgcaaaattttaaaaactgagatgctcaggccacaccccagctcaattaaatcagaaaccctagacttgggatcctctaactattagatttcttaaagctccctcagtaattccaatgtacagtcaagtttgagaactaccaatctaaatttcaagtttgagggtatttgaaaattaaagccattcacaatacgaagccagctaaaaatgtagaatgattttgagcaacttgtggagtataataagagaattaatgtgacttcaatgcttggagcattcttgttcaagtggcccaggtttggtgaaacaggactaccttgtcatctgcacgtccaggcatatttcgtagttttgcagtaaataatattcacataatgatactgtattgactttcaattttcagaattaacctatagttacagcacttaagacaaccagagttataaaagagaatttaaatattataactttggacaatataaaagtgatgatttaactgacagaagctaggaaatataagggggaggagaagtggaagaaagcaaagagagtcaggaatactacttaaaactgatgggttaagaaatagtgctttaattctatttaagtaataaaagaaatggatgtaaatcataaaaatatatatctaaaattaaaatattgatggtagtatgctaaatttcttaccttgaataatacaaagacaaatggtattgtgtagattaacaaatgaagaaacagagacttaacatattatttagaggaataagacagaattagccaaaggggcttactctaagacctgggagaaagacctgggagtcagggcacaggaaagatgacatttccttattacctgccctctacagtatttgaatatttatttccatgtacttgtcattacttttctaaaaacaactacagacagtcatacaagcaactcaagcctatatgagagatctattaagcccacggttttcattttacaggtgataaaaccaagtccagagaagtaaaattacttactgaggatcccacatttatagcagagctgagagattaaaattcaggtcttctgaactcaagtctcttgctcaaaaagtggatacacagccagagatcttacagggcaaggtgacaggctgtgttcaatatctctg

SEQ ID NO: 438942 - DNA, 2850 bp, Homo sapiens
aaaaacatgatgagaagtctataaaaattgtgtgctaccaaagatctgtcttatttggcagctgctgcctcacccacagcttttgatatctaggaggactcttctctcccaaactacctgtcaccatggcccaccgatttccagccctcacccaggagcagaagaaggagctctcagaaattgcccagagcattgttgccaatggaaaggggatcctggctgcagatgaatctgtaggtaccatggggaaccgcctgcagaggatcaaggtggaaaacactgaagagaaccgccggcagttccgagaaatcctcttctctgtggacagttccatcaaccagagcatcgggggtgtgatccttttccacgagaccctctaccagaaggacagccagggaaagctgttcagaaacatcctcaaggaaaaggggatcgtggtgggaatcaagttagaccaaggaggtgctcctcttgcaggagaacaaacaaagaaaccaccattcaagggcttgatggcctctcagagcgctgtgctcagtacaagaaagatggtgttgactttgggaagtggcgtgctgtgctgaggattgccgaccagtgtccatccagcctcgctatccaaatggactggtacctattgttgaaccagaggtaattcctgatggagaccatgacctggaacactgccagtatgttactgagaaggtcctggctgctgtctacaaggccctgaatgaccatcatgtttacctggagggcaccctgctaaagcccaacatggtgactgctggacatgcctgcaccaagaagtatactccagaacaagtagctatggccaccgtaacagctctccaccgtactgttcctgcagctgttcctggcatctgctttttgtctggtggcatgagtgaagaggatgccactctcaacctcaatgctatcaacctttgccctctaccaaagccctggaaactaagtttctcttatggacgggccctgcaggccagtgcactggctgcctggggtggcaaggctgcaaacaaggaggcaacccaggaggcttttatgaagcgggccatggctaactgccaggcggccaaaggacagtatgttcacacgggttcttctggggctgcttccacccagtcgctcttcacagcctgctatacctactagggtccaatgcccgccagcctagctccagtgcttctagtaggagggctgaaagggagcaacttttcctccaatcctggaaattcgacacaattagatttgaactgctggaaatacaacacatgttaaatcttaagtacaagggggaaaaaataaatcagttattgaaacataaaaatgaataccaaggacctgatcaaatttcacacagcagtttccttgcaacactttcagctccccatgctccagaatacccacccaagaaaataataggctcattagctgagtgtagagaagtgcatcttatgaaacagtcttagcagtggtaggttgggaaggagatagctgcaaccaaaaaagaaataaatattctataaaccttcagctgctatcgggtttcacttttctgctcttgctgtccaaagactcagtgtatttcattacttttgactctactagacatgactgggtttcaacagtaaaggtcttcaactcttgctagtcattggaatcaagccgcaaaattttaaaaactgagatgctcaggccacaccccagctcaattaaatcagaaaccctagacttgggatcctctaactattagatttcttaaagctccctcagtaattccaatgtacagtcaagtttgagaactaccaatctaaatttcaagtttgagggtatttgaaaattaaagccattcacaatacgaagccagctaaaaatgtagaatgattttgagcaacttgtggagtataataagagaattaatgtgacttcaatgcttggagcattcttgttcaagtggcccaggtttggtgaaacaggactaccttgtcatctgcacgtccaggcatatttcgtagttttgcagtaaataatattcacataatgatactgtattgactttcaattttcagaattaacctatagttacagcacttaagacaaccagagttataaaagagaatttaaatattataactttggacaatataaaagtgatgatttaactgacagaagctaggaaatataagggggaggagaagtggaagaaagcaaagagagtcaggaatactacttaaaactgatgggttaagaaatagtgctttaattctatttaagtaataaaagaaatggatgtaaatcataaaaatatatatctaaaattaaaatattgatggtagtatgctaaatttcttaccttgaataatacaaagacaaatggtattgtgtagattaacaaatgaagaaacagagacttaacatattatttagaggaataagacagaattagccaaaggggcttactctaagacctgggagaaagacctgggagtcagggcacaggaaagatgacatttccttattacctgccctctacagtatttgaatatttatttccatgtacttgtcattacttttctaaaaacaactacagacagtcatacaagcaactcaagcctatatgagagatctattaagcccacggttttcattttacaggtgataaaaccaagtccagagaagtaaaattacttactgaggatcccacatttatagcagagctgagagattaaaattcaggtcttctgaactcaagtctcttgctcaaaaagtggatacacagccagagatcttacagggcaaggtgacaggctgtgttcaatatctctg

SEQ ID NO: 438943 - DNA, 1601 bp, Homo sapiens
aaaaacatgatgagaagtctataaaaattgtgtgctaccaaagatctgtcttatttggcagctgctgcctcacccacagcttttgatatctaggaggactcttctctcccaaactacctgtcaccatggcccaccgatttccagccctcacccaggagcagaagaaggagctctcagaaattgcccagagcattgttgccaatggaaaggggatcctggctgcagatgaatctgtaggtaccatggggaaccgcctgcagaggatcaaggtgggttccatcaaccagagcatcgggggtgtgatccttttccacgagaccctctaccagaaggacagccagggaaagctgttcagaaacatcctcaaggaaaaggggatcgtggtgggaatcaagttagaccaaggaggtgctcctcttgcaggagaacaaacaaagaaaccaccattcaagggcttgatggcctctcagagcgctgtgctcagtacaagaaagatggtgttgactttgggaagtggcgtgctgtgctgaggattgccgaccagtgtccatccagcctcgctatccaggaaaacgccaacgccctggctcgctacgccagcatctgtcagcagaatggactggtacctattgttgaaccagaggtaattcctgatggagaccatgacctggaacactgccagtatgttactgagaaggtcctggctgctgtctacaaggccctgaatgaccatcatgtttacctggagggcaccctgctaaagcccaacatggtgactgctggacatgcctgcaccaagaagtatactccagaacaagtagctatggccaccgtaacagctctccaccgtactgttcctgcagctgttcctggcatctgctttttgtctggtggcatgagtgaagaggatgccactctcaacctcaatgctatcaacctttgccctctaccaaagccctggaaactaagtttctcttatggacgggccctgcaggccagtgcactggctgcctggggtggcaaggctgcaaacaaggaggcaacccaggaggcttttatgaagcgggccatggctaactgccaggcggccaaaggacagtatgttcacacgggttcttctggggctgcttccacccagtcgctcttcacagcctgctatacctactagggtccaatgcccgccagcctagctccagtgcttctagtaggagggctgaaagggagcaacttttcctccaatcctggaaattcgacacaattagatttgaactgctggaaatacaacacatgttaaatcttaagtacaagggggaaaaaataaatcagttattgaaacataaaaatgaataccaaggacctgatcaaatttcacacagcagtttccttgcaacactttcagctccccatgctccagaatacccacccaagaaaataataggctttaaaacaatatcggctcctcatccaaagaacaactgctgattgaaacacctcattagctgagtgtagagaagtgcatcttatgaaacagtcttagcagtggtaggttgggaaggagatagctgcaaccaaaaaagaaataaatattctataaaccttca

SEQ ID NO: 438944 - DNA, 2848 bp, Homo sapiens
aaaaacatgatgagaagtctataaaaattgtgtgctaccaaagatctgtcttatttggcagctgctgcctcacccacagcttttgatatctaggaggactcttctctcccaaactacctgtcaccatggcccaccgatttccagccctcacccaggagcagaagaaggagctctcagaaattgcccagagcattgttgccaatggaaaggggatcctggctgcagatgaatctgtaggtaccatggggaaccgcctgcagaggatcaaggtggaaaacactgaagagaaccgccggcagttccgagaaatcctcttctctgtggacagttccatcaaccagagcatcgggggtgtgatccttttccacgagaccctctaccagaaggacagccagggaaagctgttcagaaacatcctcaaggaaaaggggatcgtggtgggaatcaagttagaccaaggaggtgctcctcttgcaggagaacaaacaaagaaaccaccattcaagggcttgatggcctctcagagcgctgtgctcagtacaagaaagatggtgttgactttgggaagtggcgtgctgtgctgaggattgccgaccagtgtccatccagcctcgctatccaaatggactggtacctattgttgaaccagaggtaattcctgatggagaccatgacctggaacactgccagtatgttactgagaaggtcctggctgctgtctacaaggccctgaatgaccatcatgtttacctggagggcaccctgctaaagcccaacatggtgactgctggacatgcctgcaccaagaagtatactccagaacaagtagctatggccaccgtaacagctctccaccgtactgttcctgcagctgttcctggcatctgctttttgtctggtggcatgagtgaagaggatgccactctcaacctcaatgctatcaacctttgccctctaccaaagccctggaaactaagtttctcttatggacgggccctgcaggccagtgcactggctgcctggggtggcaaggctgcaaacaaggaggcaacccaggaggcttttatgaagcgggccatggctaactgccaggcggccaaaggacagtatgttcacacgggttcttctggggctgcttccacccagtcgctcttcacagcctgctatacctactagggtccaatgccctccaatcctggaaattcgacacaattagatttgaactgctggaaatacaacacatgttaaatcttaagtacaagggggaaaaaataaatcagttattgaaacataaaaatgaataccaaggacctgatcaaatttcacacagcagtttccttgcaacactttcagctccccatgctccagaatacccacccaagaaaataataggctttaaaacaatatcggctcctcatccaaagaacaactgctgattgaaacacctcattagctgagtgtagagaagtgcatcttatgaaacagtcttagcagtggtaggttgggaaggagatagctgcaaccaaaaaagaaataaatattctataaaccttcagctgctatcgggtttcacttttctgctcttgctgtccaaagactcagtgtatttcattacttttgactctactagacatgactgggtttcaacagtaaaggtcttcaactcttgctagtcattggaatcaagccgcaaaattttaaaaactgagatgctcaggccacaccccagctcaattaaatcagaaaccctagacttgggatcctctaactattagatttcttaaagctccctcagtaattccaatgtacagtcaagtttgagaactaccaatctaaatttcaagtttgagggtatttgaaaattaaagccattcacaatacgaagccagctaaaaatgtagaatgattttgagcaacttgtggagtataataagagaattaatgtgacttcaatgcttggagcattcttgttcaagtggcccaggtttggtgaaacaggactaccttgtcatctgcacgtccaggcatatttcgtagttttgcagtaaataatattcacataatgatactgtattgactttcaattttcagaattaacctatagttacagcacttaagacaaccagagttataaaagagaatttaaatattataactttggacaatataaaagtgatgatttaactgacagaagctaggaaatataagggggaggagaagtggaagaaagcaaagagagtcaggaatactacttaaaactgatgggttaagaaatagtgctttaattctatttaagtaataaaagaaatggatgtaaatcataaaaatatatatctaaaattaaaatattgatggtagtatgctaaatttcttaccttgaataatacaaagacaaatggtattgtgtagattaacaaatgaagaaacagagacttaacatattatttagaggaataagacagaattagccaaaggggcttactctaagacctgggagaaagacctgggagtcagggcacaggaaagatgacatttccttattacctgccctctacagtatttgaatatttatttccatgtacttgtcattacttttctaaaaacaactacagacagtcatacaagcaactcaagcctatatgagagatctattaagcccacggttttcattttacaggtgataaaaccaagtccagagaagtaaaattacttactgaggatcccacatttatagcagagctgagagattaaaattcaggtcttctgaactcaagtctcttgctcaaaaagtggatacacagccagagatcttacagggcaaggtgacaggctgtgttcaatatctctg

SEQ ID NO: 438945 - DNA, 1555 bp, Homo sapiens
aaaaacatgatgagaagtctataaaaattgtgtgctaccaaagatctgtcttatttggcagctgctgcctcacccacagcttttgatatctaggaggactcttctctcccaaactacctgtcaccatggcccaccgatttccagccctcacccaggagcagaagaaggagctctcagaaattgcccagagcattgttgccaatggaaaggggatcctggctgcagatgaatctgtaggtaccatggggaaccgcctgcagaggatcaaggtggaaaacactgaagagaaccgccggcagttccgagaaatcctcttctctgtggacagttccatcaaccagagcatcgggggtgtgatccttttccacgagaccctctaccagaaggacagccagggaaagctgttcagaaacatcctcaaggaaaaggggatcgtggtgggaatcaagttagaccaaggaggtgctcctcttgcaggagaacaaacaaagaaaccaccattcaagggcttgatggcctctcagagcgctgtgctcagtacaagaaagatggtgttgactttgggaagtggcgtgctgtgctgaggattgccgaccagtgtccatccagcctcgctatccaaatggactggtacctattgttgaaccagaggtaattcctgatggagaccatgacctggaacactgccagtatgttactgagaaggtcctggctgctgtctacaaggccctgaatgaccatcatgtttacctggagggcaccctgctaaagcccaacatggtgactgctggacatgcctgcaccaagaagtatactccagaacaagtagctatggccaccgtaacagctctccaccgtactgttcctgcagctgttcctggcatctgctttttgtctggtggcatgagtgaagaggatgccactctcaacctcaatgctatcaacctttgccctctaccaaagccctggaaactaagtttctcttatggacgggccctgcaggccagtgcactggctgcctggggtggcaaggctgcaaacaaggaggcaacccaggaggcttttatgaagcgggccatggctaactgccaggcggccaaaggacagtatgttcacacgggttcttctggggctgcttccacccagtcgctcttcacagcctgctatacctactagggtccaatgccctccaatcctggaaattcgacacaattagatttgaactgctggaaatacaacacatgttaaatcttaagtacaagggggaaaaaataaatcagttattgaaacataaaaatgaataccaaggacctgatcaaatttcacacagcagtttccttgcaacactttcagctccccatgctccagaatacccacccaagaaaataataggctttaaaacaatatcggctcctcatccaaagaacaactgctgattgaaacacctcattagctgagtgtagagaagtgcatcttatgaaacagtcttagcagtggtaggttgggaaggagatagctgcaaccaaaaaagaaataaatattctataaaccttca

SEQ ID NO: 438946 - DNA, 1412 bp, Homo sapiens
ccgagttccaatccaaataattctttggaggatggtgaccagatgctaaagtttccaacacatactaaaatgtctctgggtccgagttaagtttgattttcttctgtgagtactatgttggggttactagagttgtggacagctggagatccccaattagaactctaaacactgcttgaatttcttcattaacccaacttagagacatctttcttaatgatttatgcttagatgccctaaaaaggcagtagctaggttctgaggcagctagaataatctctagaaagaaatacagtaattacgggtttgtatttattttttatctcattctgatttataccaattgcaactgttgaatctcctcctaaggaaaggataacagtgagcacagcttcacttttgcttccttgattttcctttttagaatggactggtacctattgttgaaccagaggtaattcctgatggagaccatgacctggaacactgccagtatgttactgagaaggtcctggctgctgtctacaaggccctgaatgaccatcatgtttacctggagggcaccctgctaaagcccaacatggtgactgctggacatgcctgcaccaagaagtatactccagaacaagtagctatggccaccgtaacagctctccaccgtactgttcctgcagctgttcctggcatctgctttttgtctggtggcatgagtgaagaggatgccactctcaacctcaatgctatcaacctttgccctctaccaaagccctggaaactaagtttctcttatggacgggccctgcaggccagtgcactggctgcctggggtggcaaggctgcaaacaaggaggcaacccaggaggcttttatgaagcgggccatggctaactgccaggcggccaaaggacagtatgttcacacgggttcttctggggctgcttccacccagtcgctcttcacagcctgctatacctactagggtccaatgcccgccagcctagctccagtgcttctagtaggagggctgaaagggagcaacttttcctccaatcctggaaattcgacacaattagatttgaactgctggaaatacaacacatgttaaatcttaagtacaagggggaaaaaataaatcagttattgaaacataaaaatgaataccaaggacctgatcaaatttcacacagcagtttccttgcaacactttcagctccccatgctccagaatacccacccaagaaaataataggctttaaaacaatatcggctcctcatccaaagaacaactgctgattgaaacacctcattagctgagtgtagagaagtgcatcttatgaaacagtcttagcagtggtaggttgggaaggagatagctgcaaccaaaaaagaaataaatattctataaaccttca

SEQ ID NO: 438947 - DNA, 1499 bp, Homo sapiens
aaaaacatgatgagaagtctataaaaattgtgtgctaccaaagatctgtcttatttggcagctgctgcctcacccacagcttttgatatctaggaggactcttctctcccaaactacctgtcaccatggcccaccgatttccagccctcacccaggagcagaagaaggagctctcagaaattgcccagagcattgttgccaatggaaaggggatcctggctgcagatgaatctgtaggtaccatggggaaccgcctgcagaggatcaaggtggaaaacactgaagagaaccgccggcagttccgagaaatcctcttctctgtggacagttccatcaaccagagcatcgggggtgtgatccttttccacgagaccctctaccagaaggacagccagggaaagctgttcagaaacatcctcaaggaaaaggggatcgtggtgggaatcaagttagaccaaggaggtgctcctcttgcaggagaacaaacaaagaaaccaccattcaagggcttgatggcctctcagagcgctgtgctcagtacaagaaagatggtgttgactttgggaagtggcgtgctgtgctgaggattgccgaccagtgtccatccagcctcgctatccaaatggactggtacctattgttgaaccagaggtaattcctgatggagaccatgacctggaacactgccagtatgttactgagaaggtcctggctgctgtctacaaggccctgaatgaccatcatgtttacctggagggcaccctgctaaagcccaacatggtgactgctggacatgcctgcaccaagaagtatactccagaacaagtagctatggccaccgtaacagctctccaccgtactgttcctgcagctgttcctggcatctgctttttgtctggtggcatgagtgaagaggatgccactctcaacctcaatgctatcaacctttgccctctaccaaagccctggaaactaagtttctcttatggacgggccctgcaggccagtgcactggctgcctggggtggcaaggcagtcgctcttcacagcctgctatacctactagggtccaatgcccgccagcctagctccagtgcttctagtaggagggctgaaagggagcaacttttcctccaatcctggaaattcgacacaattagatttgaactgctggaaatacaacacatgttaaatcttaagtacaagggggaaaaaataaatcagttattgaaacataaaaatgaataccaaggacctgatcaaatttcacacagcagtttccttgcaacactttcagctccccatgctccagaatacccacccaagaaaataataggctttaaaacaatatcggctcctcatccaaagaacaactgctgattgaaacacctcattagctgagtgtagagaagtgcatcttatgaaacagtcttagcagtggtaggttgggaaggagatagctgcaaccaaaaaagaaataaatattctataaaccttca

SEQ ID NO: 438948 - DNA, 2740 bp, Homo sapiens
aaaaacatgatgagaagtctataaaaattgtgtgctaccaaagatctgtcttatttggcagctgctgcctcacccacagcttttgatatctaggaggactcttctctcccaaactacctgtcaccatggcccaccgatttccagccctcacccaggagcagaagaaggagctctcagaaattgcccagagcattgttgccaatggaaaggggatcctggctgcagatgaatctgtaggtaccatggggaaccgcctgcagaggatcaaggtggaaaacactgaagagaaccgccggcagttccgagaaatcctcttctctgtggacagttccatcaaccagagcatcgggggtgtgatccttttccacgagaccctctaccagaaggacagccagggaaagctgttcagaaacatcctcaaggaaaaggggatcgtggtgggaatcaagttagaccaaggaggtgctcctcttgcaggagaacaaacaaagaaaccaccattcaagggcttgatggcctctcagagcgctgtgctcagtacaagaaagatggtgttgactttgggaagtggcgtgctgtgctgaggattgccgaccagtgtccatccagcctcgctatccaaatggactggtacctattgttgaaccagaggtaattcctgatggagaccatgacctggaacactgccagtatgttactgagaaggtcctggctgctgtctacaaggccctgaatgaccatcatgtttacctggagggcaccctgctaaagcccaacatggtgactgctggacatgcctgcaccaagaagtatactccagaacaagtagctatggccaccgtaacagctctccaccgtactgttcctgcagctgttcctggcatctgctttttgtctggtggcatgagtgaagaggatgccactctcaacctcaatgctatcaacctttgccctctaccaaagccctggaaactaagtttctcttatggacgggccctgcaggccagtgcactggctgcctggggtggcaaggcagtcgctcttcacagcctgctatacctactagggtccaatgcccgccagcctagctccagtgcttctagtaggagggctgaaagggagcaacttttcctccaatcctggaaattcgacacaattagatttgaactgctggaaatacaacacatgttaaatcttaagtacaagggggaaaaaataaatcagttattgaaacataaaaatgaataccaaggacctgatcaaatttcacacagcagtttccttgcaacactttcagctccccatgctccagaatacccacccaagaaaataataggctcattagctgagtgtagagaagtgcatcttatgaaacagtcttagcagtggtaggttgggaaggagatagctgcaaccaaaaaagaaataaatattctataaaccttcagctgctatcgggtttcacttttctgctcttgctgtccaaagactcagtgtatttcattacttttgactctactagacatgactgggtttcaacagtaaaggtcttcaactcttgctagtcattggaatcaagccgcaaaattttaaaaactgagatgctcaggccacaccccagctcaattaaatcagaaaccctagacttgggatcctctaactattagatttcttaaagctccctcagtaattccaatgtacagtcaagtttgagaactaccaatctaaatttcaagtttgagggtatttgaaaattaaagccattcacaatacgaagccagctaaaaatgtagaatgattttgagcaacttgtggagtataataagagaattaatgtgacttcaatgcttggagcattcttgttcaagtggcccaggtttggtgaaacaggactaccttgtcatctgcacgtccaggcatatttcgtagttttgcagtaaataatattcacataatgatactgtattgactttcaattttcagaattaacctatagttacagcacttaagacaaccagagttataaaagagaatttaaatattataactttggacaatataaaagtgatgatttaactgacagaagctaggaaatataagggggaggagaagtggaagaaagcaaagagagtcaggaatactacttaaaactgatgggttaagaaatagtgctttaattctatttaagtaataaaagaaatggatgtaaatcataaaaatatatatctaaaattaaaatattgatggtagtatgctaaatttcttaccttgaataatacaaagacaaatggtattgtgtagattaacaaatgaagaaacagagacttaacatattatttagaggaataagacagaattagccaaaggggcttactctaagacctgggagaaagacctgggagtcagggcacaggaaagatgacatttccttattacctgccctctacagtatttgaatatttatttccatgtacttgtcattacttttctaaaaacaactacagacagtcatacaagcaactcaagcctatatgagagatctattaagcccacggttttcattttacaggtgataaaaccaagtccagagaagtaaaattacttactgaggatcccacatttatagcagagctgagagattaaaattcaggtcttctgaactcaagtctcttgctcaaaaagtggatacacagccagagatcttacagggcaaggtgacaggctgtgttcaatatctctg

SEQ ID NO: 438949 - DNA, 1218 bp, Homo sapiens
aggaatgacattgaccaagggagtaatggaaataaaggaatgaagggcttctaggaagcagagccatgcctgtcattcatgcagtgaatgagaagctagattaggggtgatgaagacaggccagtttagttgtgctcagtggctatggattgcaacacattggtctaatgaggcctggagattggttcagaagcttttgccaagcaacaaataagaattccttcatcctgcctccctgcagtgtaaatgtgccaaggtcaagtggctctatgactagctttgagtttcacctggtgggacctcttgtccttcaggtcctggctgctgtctacaaggccctgaatgaccatcatgtttacctggagggcaccctgctaaagcccaacatggtgactgctggacatgcctgcaccaagaagtatactccagaacaagtagctatggccaccgtaacagctctccaccgtactgttcctgcagctgttcctggcatctgctttttgtctggtggcatgagtgaagaggatgccactctcaacctcaatgctatcaacctttgccctctaccaaagccctggaaactaagtttctcttatggacgggccctgcaggccagtgcactggctgcctggggtggcaaggctgcaaacaaggaggcaacccaggaggcttttatgaagcgggccatggctaactgccaggcggccaaaggacagtatgttcacacgggttcttctggggctgcttccacccagtcgctcttcacagcctgctatacctactagggtccaatgcccgccagcctagctccagtgcttctagtaggagggctgaaagggagcaacttttcctccaatcctggaaattcgacacaattagatttgaactgctggaaatacaacacatgttaaatcttaagtacaagggggaaaaaataaatcagttattgaaacataaaaatgaataccaaggacctgatcaaatttcacacagcagtttccttgcaacactttcagctccccatgctccagaatacccacccaagaaaataataggctttaaaacaatatcggctcctcatccaaagaacaactgctgattgaaacacctcattagctgagtgtagagaagtgcatcttatgaaacagtcttagcagtggtaggttgggaaggagatagctgcaaccaaaaaagaaataaatattctataaaccttca

SEQ ID NO: 438950 - DNA, 1592 bp, Homo sapiens
aaaaacatgatgagaagtctataaaaattgtgtgctaccaaagatctgtcttatttggcagctgctgcctcacccacagcttttgatatctaggaggactcttctctcccaaactacctgtcaccatggcccaccgatttccagccctcacccaggagcagaagaaggagctctcagaaattgcccagagcattgttgccaatggaaaggggatcctggctgcagatgaatctgtaggtaccatggggaaccgcctgcagaggatcaaggtggaaaacactgaagagaaccgccggcagttccgagaaatcctcttctctgtggacagttccatcaaccagagcatcgggggtgtgatccttttccacgagaccctctaccagaaggacagccagggaaagctgttcagaaacatcctcaaggaaaaggggatcgtggtgggaatcaagttagaccaaggaggtgctcctcttgcaggagaacaaacaaagaaaccaccattcaagggcttgatggcctctcagagcgctgtgctcagtacaagaaagatggtgttgactttgggaagtggcgtgctgtgctgaggattgccgaccagtgtccatccagcctcgctatccaggaaaacgccaacgccctggctcgctacgccagcatctgtcagcagaatggactggtacctattgttgaaccagaggtaattcctgatggagaccatgacctggaacactgccagtatgttactgagaaggtcctggctgctgtctacaaggccctgaatgaccatcatgtttacctggagggcaccctgctaaagcccaacatggtgactgctggacatgcctgcaccaagaagtatactccagaacaagtagctatggccaccgtaacagctctccaccgtactgttcctgcagctgttcctggcatctgctttttgtctggtggcatgagtgaagaggatgccactctcaacctcaatgctatcaacctttgccctctaccaaagccctggaaactaagtttctcttatggacgggccctgcaggccagtgcactggctgcctggggtggcaaggctgcaaacaaggaggcaacccaggaggcttttatgaagcgggccatgcagtcgctcttcacagcctgctatacctactagggtccaatgcccgccagcctagctccagtgcttctagtaggagggctgaaagggagcaacttttcctccaatcctggaaattcgacacaattagatttgaactgctggaaatacaacacatgttaaatcttaagtacaagggggaaaaaataaatcagttattgaaacataaaaatgaataccaaggacctgatcaaatttcacacagcagtttccttgcaacactttcagctccccatgctccagaatacccacccaagaaaataataggctttaaaacaatatcggctcctcatccaaagaacaactgctgattgaaacacctcattagctgagtgtagagaagtgcatcttatgaaacagtcttagcagtggtaggttgggaaggagatagctgcaaccaaaaaagaaataaatattctataaaccttca

SEQ ID NO: 438951 - DNA, 751 bp, Homo sapiens
gaaatggcttctctcctaccaggcatctgctttttgtctggtggcatgagtgaagaggatgccactctcaacctcaatgctatcaacctttgccctctaccaaagccctggaaactaagtttctcttatggacgggccctgcaggccagtgcactggctgcctggggtggcaaggctgcaaacaaggaggcaacccaggaggcttttatgaagcgggccatggctaactgccaggcggccaaaggacagtatgttcacacgggttcttctggggctgcttccacccagtcgctcttcacagcctgctatacctactagggtccaatgcccgccagcctagctccagtgcttctagtaggagggctgaaagggagcaacttttcctccaatcctggaaattcgacacaattagatttgaactgctggaaatacaacacatgttaaatcttaagtacaagggggaaaaaataaatcagttattgaaacataaaaatgaataccaaggacctgatcaaatttcacacagcagtttccttgcaacactttcagctccccatgctccagaatacccacccaagaaaataataggctttaaaacaatatcggctcctcatccaaagaacaactgctgattgaaacacctcattagctgagtgtagagaagtgcatcttatgaaacagtcttagcagtggtaggttgggaaggagatagctgcaaccaaaaaagaaataaatattctataaaccttca

SEQ ID NO: 438952 - DNA, 774 bp, Homo sapiens
ggcacgagaatttttcaactttagtttctagtactgttgctgcaatattgttggtactgaacagagatttccccagtaactgacacaaacctcaagcttaccaaagaaatgctcagaaaactgggataaaaaggggagatactttatagaaggggatggtatccccagcaatattcagcaacattgctgtagaagtggggtcacatttactctaaccagtctcctctctcatatttgtcttctaggctaactgccaggcggccaaaggacagtatgttcacacgggttcttctggggctgcttccacccagtcgctcttcacagcctgctatacctactagggtccaatgcccgccagcctagctccagtgcttctagtaggagggctgaaagggagcaacttttcctccaatcctggaaattcgacacaattagatttgaactgctggaaatacaacacatgttaaatcttaagtacaagggggaaaaaataaatcagttattgaaacataaaaatgaataccaaggacctgatcaaatttcacacagcagtttccttgcaacactttcagctccccatgctccagaatacccacccaagaaaataataggctttaaaacaatatcggctcctcatccaaagaacaactgctgattgaaacacctcattagctgagtgtagagaagtgcatcttatgaaacagtcttagcagtggtaggttgggaaggagatagctgcaaccaaaaaagaaataaatattctataaaccttca

SEQ ID NO: 438953 - DNA, 1232 bp, Homo sapiens
  misc_feature (43)..(43): n is a, c, g, or t
  misc_feature (45)..(45): n is a, c, g, or t
  misc_feature (47)..(47): n is a, c, g, or t
gggggggggagggggggggggcggggaccgggagacgtccttncnancgcgagctgcctcacccacagcttttgatatctaggaggactcttctctcccaaactacctgtcaccatggcccaccgatttccagccctcacccaggagcagaagaaggagcagggaaagctgttcagaaacatcctcaaggaaaaggggatcgtggtgggaatcaagttagaccaaggaggtgctcctcttgcaggagaacaaacaaagaaaccaccattcaagggcttgatggcctctcagagcgctgtgctcagtacaagaaagatggtgttgactttgggaagtggcgtgctgtgctgaggattgccgaccagtgtccatccagcctcgctatccaggaaaacgccaacgccctggctcgctacgccagcatctgtcagcagaatggactggtacctattgttgaaccagaggtaattcctgatggagaccatgacctggaacactgccagtatgttactgagaaggtcctggctgctgtctacaaggccctgaatgaccatcatgtttacctggagggcaccctgctaaagcccaacatggtgactgctggacatgcctgcaccaagaagtatactccagaacaagtagctatggccaccgtaacagctctccaccgtactgttcctgcagctgttcctggcatctgctttttgtctggtggcatgagtgaagaggatgccactctcaacctcaatgctatcaacctttgccccagtcgctcttcacagcctgctatacctactagggtccaatgcccgccagcctagctccagtgcttctagtaggagggctgaaagggagcaacttttcctccaatcctggaaattcgacacaattagatttgaactgctggaaatacaacacatgttaaatcttaagtacaagggggaaaaaataaatcagttattgaaacataaaaatgaataccaaggacctgatcaaatttcacacagcagtttccttgcaacactttcagctccccatgctccagaatacccacccaagaaaataataggctttaaaacaatatcggctcctcatccaaagaacaactgctgattgaaacacctcattagctgagtgtagagaagtgcatcttatgaaacagtcttagcagtggtaggttgggaaggagatagctgcaaccaaaaaagaaataaatattctataaaccttca

SEQ ID NO: 438954 - DNA, 2015 bp, Homo sapiens
ggcacgagaatttttcaactttagtttctagtactgttgctgcaatattgttggtactgaacagagatttccccagtaactgacacaaacctcaagcttaccaaagaaatgctcagaaaactgggataaaaaggggagatactttatagaaggggatggtatccccagcaatattcagcaacattgctgtagaagtggggtcacatttactctaaccagtctcctctctcatatttgtcttctaggctaactgccaggcggccaaaggacagtatgttcacacgggttcttctggggctgcttccacccagtcgctcttcacagcctgctatacctactagggtccaatgcccgccagcctagctccagtgcttctagtaggagggctgaaagggagcaacttttcctccaatcctggaaattcgacacaattagatttgaactgctggaaatacaacacatgttaaatcttaagtacaagggggaaaaaataaatcagttattgaaacataaaaatgaataccaaggacctgatcaaatttcacacagcagtttccttgcaacactttcagctccccatgctccagaatacccacccaagaaaataataggctcattagctgagtgtagagaagtgcatcttatgaaacagtcttagcagtggtaggttgggaaggagatagctgcaaccaaaaaagaaataaatattctataaaccttcagctgctatcgggtttcacttttctgctcttgctgtccaaagactcagtgtatttcattacttttgactctactagacatgactgggtttcaacagtaaaggtcttcaactcttgctagtcattggaatcaagccgcaaaattttaaaaactgagatgctcaggccacaccccagctcaattaaatcagaaaccctagacttgggatcctctaactattagatttcttaaagctccctcagtaattccaatgtacagtcaagtttgagaactaccaatctaaatttcaagtttgagggtatttgaaaattaaagccattcacaatacgaagccagctaaaaatgtagaatgattttgagcaacttgtggagtataataagagaattaatgtgacttcaatgcttggagcattcttgttcaagtggcccaggtttggtgaaacaggactaccttgtcatctgcacgtccaggcatatttcgtagttttgcagtaaataatattcacataatgatactgtattgactttcaattttcagaattaacctatagttacagcacttaagacaaccagagttataaaagagaatttaaatattataactttggacaatataaaagtgatgatttaactgacagaagctaggaaatataagggggaggagaagtggaagaaagcaaagagagtcaggaatactacttaaaactgatgggttaagaaatagtgctttaattctatttaagtaataaaagaaatggatgtaaatcataaaaatatatatctaaaattaaaatattgatggtagtatgctaaatttcttaccttgaataatacaaagacaaatggtattgtgtagattaacaaatgaagaaacagagacttaacatattatttagaggaataagacagaattagccaaaggggcttactctaagacctgggagaaagacctgggagtcagggcacaggaaagatgacatttccttattacctgccctctacagtatttgaatatttatttccatgtacttgtcattacttttctaaaaacaactacagacagtcatacaagcaactcaagcctatatgagagatctattaagcccacggttttcattttacaggtgataaaaccaagtccagagaagtaaaattacttactgaggatcccacatttatagcagagctgagagattaaaattcaggtcttctgaactcaagtctcttgctcaaaaagtggatacacagccagagatcttacagggcaaggtgacaggctgtgttcaatatctctg

SEQ ID NO: 438955 - DNA, 384 bp, Homo sapiens
caacctccacctcctggattcaagcaattcttctgcctcagcctcccaagtagctgggactagaggcatgcgccaccatacctggctaatttctgtatattttagtaaagatggggtttcaccatgttggccaggctggtctcaaactcctgacctcaggtgatctgcccacctcaacctcccaaagtgctgagattacagacatgagccaccacacccagccgggtaaacaatttcaaagggccaataataacatgctatagagagattcaaaagaaaggccaagaaaagaccctgagattggcatttaggagcataccagtgaccctcactgaaacagtttcaataaagaggaaaggaaaggtgcccactcaagaagttttt

SEQ ID NO: 438956 - DNA, 154 bp, Homo sapiens
gctgcccttggccctcccaccataggtaccatggggaaccgcctgcagaggatcaaggtggaaaacactgaagagaaccgccggcagttccgagaaatcctcttctctgtggacagttccatcaaccagagcatcgggggtgtgatccttttcc

SEQ ID NO: 438957 - DNA, 324 bp, Homo sapiens
gtggggtcacatttactctaaccagtctcctctctcatatttgtcttctaggctaactgccaggcggccaaaggacagtatgttcacacgggttcttctggggctgcttccacccagtcgctcttcacagcctgctatacctactagggtccaatgcccgccagcctagctccagtgcttctagtaggagggctgaaagggagcaacttttcctccaatcctggaaattcgacacaattagatttgaactgctggaaatacaacacatgttaaatcttaagtacaagggggaaaaaataaatcagttattgaaacataaaaatg

SEQ ID NO: 438958 - DNA, 1655 bp, Homo sapiens
aaaaacatgatgagaagtctataaaaattgtgtgctaccaaagatctgtcttatttggcagctgctgcctcacccacagcttttgatatctaggaggactcttctctcccaaactacctgtcaccatggcccaccgatttccagccctcacccaggagcagaagaaggagctctcagaaattgcccagagcattgttgccaatggaaaggggatcctggctgcagatgaatctgtaggtaccatggggaaccgcctgcagaggatcaaggtggaaaacactgaagagaaccgccggcagttccgagaaatcctcttctctgtggacagttccatcaaccagagcatcgggggtgtgatccttttccacgagaccctctaccagaaggacagccagggaaagctgttcagaaacatcctcaaggaaaaggggatcgtggtgggaatcaagttagaccaaggaggtgctcctcttgcaggagaacaaacaaagaaaccaccattcaagggcttgatggcctctcagagcgctgtgctcagtacaagaaagatggtgttgactttgggaagtggcgtgctgtgctgaggattgccgaccagtgtccatccagcctcgctatccaggaaaacgccaacgccctggctcgctacgccagcatctgtcagcagaatggactggtacctattgttgaaccagaggtaattcctgatggagaccatgacctggaacactgccagtatgttactgagaaggtcctggctgctgtctacaaggccctgaatgaccatcatgtttacctggagggcaccctgctaaagcccaacatggtgactgctggacatgcctgcaccaagaagtatactccagaacaagtagctatggccaccgtaacagctctccaccgtactgttcctgcagctgttcctggcatctgctttttgtctggtggcatgagtgaagaggatgccactctcaacctcaatgctatcaacctttgccctctaccaaagccctggaaactaagtttctcttatggacgggccctgcaggccagtgcactggctgcctggggtggcaaggctgcaaacaaggaggcaacccaggaggcttttatgaagcgggccatggctaactgccaggcggccaaaggacagtatgttcacacgggttcttctggggctgcttccacccagtcgctcttcacagcctgctatacctactagggtccaatgcccgccagcctagctccagtgcttctagtaggagggctgaaagggagcaacttttcctccaatcctggaaattcgacacaattagatttgaactgctggaaatacaacacatgttaaatcttaagtacaagggggaaaaaataaatcagttattgaaacataaaaatgaataccaaggacctgatcaaatttcacacagcagtttccttgcaacactttcagctccccatgctccagaatacccacccaagaaaataataggctttaaaacaatatcggctcctcatccaaagaacaactgctgattgaaacacctcattagctgagtgtagagaagtgcatcttatgaaacagtcttagcagtggtaggttgggaaggagatagctgcaaccaaaaaagaaataaatattctataaaccttca

SEQ ID NO: 438959 - DNA, 648 bp, Homo sapiens
  misc_feature (522)..(522): n is a, c, g, or t
ggatccccgggctgcaggattcggcacgaggtgcctcacccacagcttttgatatctaggaggactcttctctcccaaactacctgtcaccatggcccaccgatttccagccctcacccaggagcagaagaaggagctctcagaaattgcccagagcattgttgccaatggaaaggggatcctggctgcagatgaatctgtaggtaccatggggaaccgcctgcagaggatcaaggtgggttccatcaaccagagcatcgggggtgtgatccttttccacgagaccctctaccagaaggacagccagggaaagctgttcagaaacatcctcaaggaaaaggggatcgtggtgggaatcaagttagaccaaggaggtgctcctcttgcaggagaacaaacaaagaaaccaccattcaagggcttgatggcctctcagagcgctgtgctcagtacaagaaagatggtgttgactttgggaagtggcgtgctgtgctgaggattgccgaccagtgtcatcagctngtatcagaaacgcacgcctgctcgtcgcagattgcacagatgctgtctatgtgacaagtatctgtggactgctgacatgcgtgtctgaagctgtgtgtcagctatgctagtactgagacttagcac

SEQ ID NO: 438960 - DNA, 1599 bp, Homo sapiens
aaaaacatgatgagaagtctataaaaattgtgtgctaccaaagatctgtcttatttggcagctgctgcctcacccacagcttttgatatctaggaggactcttctctcccaaactacctgtcaccatggcccaccgatttccagccctcacccaggagcagaagaaggagctctcagaaattgcccagagcattgttgccaatggaaaggggatcctggctgcagatgaatctgtaggtaccatggggaaccgcctgcagaggatcaaggtggaaaacactgaagagaaccgccggcagttccgagaaatcctcttctctgtggacagttccatcaaccagagcatcgggggtgtgatccttttccacgagaccctctaccagaaggacagccagggaaagctgttcagaaacatcctcaagggaacaaacaaagaaaccaccattcaagggcttgatggcctctcagagcgctgtgctcagtacaagaaagatggtgttgactttgggaagtggcgtgctgtgctgaggattgccgaccagtgtccatccagcctcgctatccaggaaaacgccaacgccctggctcgctacgccagcatctgtcagcagaatggactggtacctattgttgaaccagaggtaattcctgatggagaccatgacctggaacactgccagtatgttactgagaaggtcctggctgctgtctacaaggccctgaatgaccatcatgtttacctggagggcaccctgctaaagcccaacatggtgactgctggacatgcctgcaccaagaagtatactccagaacaagtagctatggccaccgtaacagctctccaccgtactgttcctgcagctgttcctggcatctgctttttgtctggtggcatgagtgaagaggatgccactctcaacctcaatgctatcaacctttgccctctaccaaagccctggaaactaagtttctcttatggacgggccctgcaggccagtgcactggctgcctggggtggcaaggctgcaaacaaggaggcaacccaggaggcttttatgaagcgggccatggctaactgccaggcggccaaaggacagtatgttcacacgggttcttctggggctgcttccacccagtcgctcttcacagcctgctatacctactagggtccaatgcccgccagcctagctccagtgcttctagtaggagggctgaaagggagcaacttttcctccaatcctggaaattcgacacaattagatttgaactgctggaaatacaacacatgttaaatcttaagtacaagggggaaaaaataaatcagttattgaaacataaaaatgaataccaaggacctgatcaaatttcacacagcagtttccttgcaacactttcagctccccatgctccagaatacccacccaagaaaataataggctttaaaacaatatcggctcctcatccaaagaacaactgctgattgaaacacctcattagctgagtgtagagaagtgcatcttatgaaacagtcttagcagtggtaggttgggaaggagatagctgcaaccaaaaaagaaataaatattctataaaccttca

SEQ ID NO: 438961 - DNA, 1593 bp, Homo sapiens
aaaaacatgatgagaagtctataaaaattgtgtgctaccaaagatctgtcttatttggcagctgctgcctcacccacagcttttgatatctaggaggactcttctctcccaaactacctgtcaccatggcccaccgatttccagccctcacccaggagcagaagaaggagctctcagaaattgcccagagcattgttgccaatggaaaggggatcctggctgcagatgaatctgtaggtaccatggggaaccgcctgcagaggatcaaggtggaaaacactgaagagaaccgccggcagttccgagaaatcctcttctctgtggacagttccatcaaccagagcatcgggggtgtgatccttttccacgagaccctctaccagaaggacagccagggaaagctgttcagaaacatcctcaaggaaaaggggatcgtggtgggaatcaagttagaccaaggaggtgctcctcttgcaggaaagaaagatggtgttgactttgggaagtggcgtgctgtgctgaggattgccgaccagtgtccatccagcctcgctatccaggaaaacgccaacgccctggctcgctacgccagcatctgtcagcagaatggactggtacctattgttgaaccagaggtaattcctgatggagaccatgacctggaacactgccagtatgttactgagaaggtcctggctgctgtctacaaggccctgaatgaccatcatgtttacctggagggcaccctgctaaagcccaacatggtgactgctggacatgcctgcaccaagaagtatactccagaacaagtagctatggccaccgtaacagctctccaccgtactgttcctgcagctgttcctggcatctgctttttgtctggtggcatgagtgaagaggatgccactctcaacctcaatgctatcaacctttgccctctaccaaagccctggaaactaagtttctcttatggacgggccctgcaggccagtgcactggctgcctggggtggcaaggctgcaaacaaggaggcaacccaggaggcttttatgaagcgggccatggctaactgccaggcggccaaaggacagtatgttcacacgggttcttctggggctgcttccacccagtcgctcttcacagcctgctatacctactagggtccaatgcccgccagcctagctccagtgcttctagtaggagggctgaaagggagcaacttttcctccaatcctggaaattcgacacaattagatttgaactgctggaaatacaacacatgttaaatcttaagtacaagggggaaaaaataaatcagttattgaaacataaaaatgaataccaaggacctgatcaaatttcacacagcagtttccttgcaacactttcagctccccatgctccagaatacccacccaagaaaataataggctttaaaacaatatcggctcctcatccaaagaacaactgctgattgaaacacctcattagctgagtgtagagaagtgcatcttatgaaacagtcttagcagtggtaggttgggaaggagatagctgcaaccaaaaaagaaataaatattctataaaccttca

SEQ ID NO: 438962 - DNA, 2848 bp, Homo sapiens
aaaaacatgatgagaagtctataaaaattgtgtgctaccaaagatctgtcttatttggcagctgctgcctcacccacagcttttgatatctaggaggactcttctctcccaaactacctgtcaccatggcccaccgatttccagccctcacccaggagcagaagaaggagctctcagaaattgcccagagcattgttgccaatggaaaggggatcctggctgcagatgaatctgtaggtaccatggggaaccgcctgcagaggatcaaggtggaaaacactgaagagaaccgccggcagttccgagaaatcctcttctctgtggacagttccatcaaccagagcatcgggggtgtgatccttttccacgagaccctctaccagaaggacagccagggaaagctgttcagaaacatcctcaaggaaaaggggatcgtggtgggaatcaagttagaccaaggaggtgctcctcttgcaggagaacaaacaaagaaaccaccattcaagggcttgatggcctctcagagcgctgtgctcagtacaagaaagatggtgttgactttgggaagtggcgtgctgtgctgaggattgccgaccagtgtccatccagcctcgctatccaaatggactggtacctattgttgaaccagaggtaattcctgatggagaccatgacctggaacactgccagtatgttactgagaaggtcctggctgctgtctacaaggccctgaatgaccatcatgtttacctggagggcaccctgctaaagcccaacatggtgactgctggacatgcctgcaccaagaagtatactccagaacaagtagctatggccaccgtaacagctctccaccgtactgttcctgcagctgttcctggcatctgctttttgtctggtggcatgagtgaagaggatgccactctcaacctcaatgctatcaacctttgccctctaccaaagccctggaaactaagtttctcttatggacgggccctgcaggccagtgcactggctgcctggggtggcaaggctgcaaacaaggaggcaacccaggaggcttttatgaagcgggccatggctaactgccaggcggccaaaggacagtatgttcacacgggttcttctggggctgcttccacccagtcgctcttcacagcctgctatacctactagggtccaatgcccgccagcctagctccagtgcttctagtaggagggctgaaagggagcaacttttcctccaatcctggaaattcgacacaattagatttgaactgctggaaatacaacacatgttaaatcttaagtacaagggggaaaaaataaatcagttattgaaacatatttcagctccccatgctccagaatacccacccaagaaaataataggctttaaaacaatatcggctcctcatccaaagaacaactgctgattgaaacacctcattagctgagtgtagagaagtgcatcttatgaaacagtcttagcagtggtaggttgggaaggagatagctgcaaccaaaaaagaaataaatattctataaaccttcagctgctatcgggtttcacttttctgctcttgctgtccaaagactcagtgtatttcattacttttgactctactagacatgactgggtttcaacagtaaaggtcttcaactcttgctagtcattggaatcaagccgcaaaattttaaaaactgagatgctcaggccacaccccagctcaattaaatcagaaaccctagacttgggatcctctaactattagatttcttaaagctccctcagtaattccaatgtacagtcaagtttgagaactaccaatctaaatttcaagtttgagggtatttgaaaattaaagccattcacaatacgaagccagctaaaaatgtagaatgattttgagcaacttgtggagtataataagagaattaatgtgacttcaatgcttggagcattcttgttcaagtggcccaggtttggtgaaacaggactaccttgtcatctgcacgtccaggcatatttcgtagttttgcagtaaataatattcacataatgatactgtattgactttcaattttcagaattaacctatagttacagcacttaagacaaccagagttataaaagagaatttaaatattataactttggacaatataaaagtgatgatttaactgacagaagctaggaaatataagggggaggagaagtggaagaaagcaaagagagtcaggaatactacttaaaactgatgggttaagaaatagtgctttaattctatttaagtaataaaagaaatggatgtaaatcataaaaatatatatctaaaattaaaatattgatggtagtatgctaaatttcttaccttgaataatacaaagacaaatggtattgtgtagattaacaaatgaagaaacagagacttaacatattatttagaggaataagacagaattagccaaaggggcttactctaagacctgggagaaagacctgggagtcagggcacaggaaagatgacatttccttattacctgccctctacagtatttgaatatttatttccatgtacttgtcattacttttctaaaaacaactacagacagtcatacaagcaactcaagcctatatgagagatctattaagcccacggttttcattttacaggtgataaaaccaagtccagagaagtaaaattacttactgaggatcccacatttatagcagagctgagagattaaaattcaggtcttctgaactcaagtctcttgctcaaaaagtggatacacagccagagatcttacagggcaaggtgacaggctgtgttcaatatctctg

SEQ ID NO: 438963 - DNA, 1570 bp, Homo sapiens
cgcacacacagcacacacacgagcacataacacacaaacgcacagcacacgcacacacatgcacacccaggagcagaagaaggagctctcagaaattgcccagagcattgttgccaatggaaaggggatcctggctgcagatgaatctgtaggtaccatggggaaccgcctgcagaggatcaaggtggaaaacactgaagagaaccgccggcagttccgagaaatcctcttctctgtggacagttccatcaaccagagcatcgggggtgtgatccttttccacgagaccctctaccagaaggacagccagggaaagctgttcagaaacatcctcaaggaaaaggggatcgtggtgggaatcaagttagaccaaggaggtgctcctcttgcaggagaacaaacaaagaaaccaccattcaagggcttgatggcctctcagagcgctgtgctcagtacaagaaagatggtgttgactttgggaagtggcgtgctgtgctgaggattgccgaccagtgtccatccagcctcgctatccaggaaaacgccaacgccctggctcgctacgccagcatctgtcagcagaatggactggtacctattgttgaaccagaggtaattcctgatggagaccatgacctggaacactgccagtatgttactgagaaggtcctggctgctgtctacaaggccctgaatgaccatcatgtttacctggagggcaccctgctaaagcccaacatggtgactgctggacatgcctgcaccaagaagtatactccagaacaagtagctatggccaccgtaacagctctccaccgtactgttcctgcagctgttcctggcatctgctttttgtctggtggcatgagtgaagaggatgccactctcaacctcaatgctatcaacctttgccctctaccaaagccctggaaactaagtttctcttatggacgggccctgcaggccagtgcactggctgcctggggtggcaaggctgcaaacaaggaggcaacccaggaggcttttatgaagcgggccatggctaactgccaggcggccaaaggacagtatgttcacacgggttcttctggggctgcttccacccagtcgctcttcacagcctgctatacctactagggtccaatgcccgccagcctagctccagtgcttctagtaggagggctgaaagggagcaacttttcctccaatcctggaaattcgacacaattagatttgaactgctggaaatacaacacatgttaaatcttaagtacaagggggaaaaaataaatcagttattgaaacataaaaatgaataccaaggacctgatcaaatttcacacagcagtttccttgcaacactttcagctccccatgctccagaatacccacccaagaaaataataggctttaaaacaatatcggctcctcatccaaagaacaactgctgattgaaacacctcattagctgagtgtagagaagtgcatcttatgaaacagtcttagcagtggtaggttgggaaggagatagctgcaaccaaaaaagaaataaatattctataaaccttca

SEQ ID NO: 438964 - DNA, 1326 bp, Homo sapiens
aaaaacatgatgagaagtctataaaaattgtgtgctaccaaagatctgtcttatttggcagctgctgcctcacccacagcttttgatatctaggaggactcttctctcccaaactacctgtcaccatggcccaccgatttccagccctcacccaggagcagaagaaggagctctcagaaattgcccagagcattgttgccaatggaaaggggatcctggctgcagatgaatctgtaggtaccatggggaaccgcctgcagaggatcaaggtgggttccatcaaccagagcatcgggggtgtgatccttttccacgagaccctctaccagaaggacagcaatggactggtacctattgttgaaccagaggtaattcctgatggagaccatgacctggaacactgccagtatgttactgagaaggtcctggctgctgtctacaaggccctgaatgaccatcatgtttacctggagggcaccctgctaaagcccaacatggtgactgctggacatgcctgcaccaagaagtatactccagaacaagtagctatggccaccgtaacagctctccaccgtactgttcctgcagctgttcctggcatctgctttttgtctggtggcatgagtgaagaggatgccactctcaacctcaatgctatcaacctttgccctctaccaaagccctggaaactaagtttctcttatggacgggccctgcaggccagtgcactggctgcctggggtggcaaggctgcaaacaaggaggcaacccaggaggcttttatgaagcgggccatggctaactgccaggcggccaaaggacagtatgttcacacgggttcttctggggctgcttccacccagtcgctcttcacagcctgctatacctactagggtccaatgcccgccagcctagctccagtgcttctagtaggagggctgaaagggagcaacttttcctccaatcctggaaattcgacacaattagatttgaactgctggaaatacaacacatgttaaatcttaagtacaagggggaaaaaataaatcagttattgaaacataaaaatgaataccaaggacctgatcaaatttcacacagcagtttccttgcaacactttcagctccccatgctccagaatacccacccaagaaaataataggctttaaaacaatatcggctcctcatccaaagaacaactgctgattgaaacacctcattagctgagtgtagagaagtgcatcttatgaaacagtcttagcagtggtaggttgggaaggagatagctgcaaccaaaaaagaaataaatattctataaaccttca

SEQ ID NO: 438965 - DNA, 1546 bp, Homo sapiens
aaaaacatgatgagaagtctataaaaattgtgtgctaccaaagatctgtcttatttggcagctgctgcctcacccacagcttttgatatctaggaggactcttctctcccaaactacctgtcaccatggcccaccgatttccagccctcacccaggagcagaagaaggagctctcagaaattgcccagagcattgttgccaatggaaaggggatcctggctgcagatgaatctgtaggtaccatggggaaccgcctgcagaggatcaaggtggaaaacactgaagagaaccgccggcagttccgagaaatcctcttctctgtggacagttccatcaaccagagcatcgggggtgtgatccttttccacgagaccctctaccagaaggacagccagggaaagctgttcagaaacatcctcaaggaaaaggggatcgtggtgggaatcaagttagaccaaggaggtgctcctcttgcaggagaacaaacaaagaaaccaccattcaagggcttgatggcctctcagagcgctgtgctcagtacaagaaagatggtgttgactttgggaagtggcgtgctgtgctgaggattgccgaccagtgtccatccagcctcgctatccaaatggactggtacctattgttgaaccagaggtaattcctgatggagaccatgacctggaacactgccagtatgttactgagaaggtcctggctgctgtctacaaggccctgaatgaccatcatgtttacctggagggcaccctgctaaagcccaacatggtgactgctggacatgcctgcaccaagaagtatactccagaacaagtagctatggccaccgtaacagctctccaccgtactgttcctgcagctgttcctggcatctgctttttgtctggtggcatgagtgaagaggatgccactctcaacctcaatgctatcaacctttgccctctaccaaagccctggaaactaagtttctcttatggacgggccctgcaggccagtgcactggctgcctggggtggcaaggctgcaaacaaggaggcaacccaggaggcttttatgaagcgggccatgcagtcgctcttcacagcctgctatacctactagggtccaatgcccgccagcctagctccagtgcttctagtaggagggctgaaagggagcaacttttcctccaatcctggaaattcgacacaattagatttgaactgctggaaatacaacacatgttaaatcttaagtacaagggggaaaaaataaatcagttattgaaacataaaaatgaataccaaggacctgatcaaatttcacacagcagtttccttgcaacactttcagctccccatgctccagaatacccacccaagaaaataataggctttaaaacaatatcggctcctcatccaaagaacaactgctgattgaaacacctcattagctgagtgtagagaagtgcatcttatgaaacagtcttagcagtggtaggttgggaaggagatagctgcaaccaaaaaagaaataaatattctataaaccttca

SEQ ID NO: 438966 - DNA, 2646 bp, Homo sapiens
aaaaacatgatgagaagtctataaaaattgtgtgctaccaaagatctgtcttatttggcagctgctgcctcacccacagcttttgatatctaggaggactcttctctcccaaactacctgtcaccatggcccaccgatttccagccctcacccaggagcagaagaaggagctctcagaaattgcccagagcattgttgccaatggaaaggggatcctggctgcagatgaatctgtaggtaccatggggaaccgcctgcagaggatcaaggtggaaaacactgaagagaaccgccggcagttccgagaaatcctcttctctgtggacagttccatcaaccagagcatcgggggtgtgatccttttccacgagaccctctaccagaaggacagccagggaaagctgttcagaaacatcctcaaggaaaaggggatcgtggtgggaatcaagttagaccaaggaggtgctcctcttgcaggagaacaaacaaagaaaccaccattcaagggcttgatggcctctcagagcgctgtgctcagtacaagaaagatggtgttgactttgggaagtggcgtgctgtgctgaggattgccgaccagtgtccatccagcctcgctatccaaatggactggtacctattgttgaaccagaggtaattcctgatggagaccatgacctggaacactgccagtatgttactgagaaggtcctggctgctgtctacaaggccctgaatgaccatcatgtttacctggagggcaccctgctaaagcccaacatggtgactgctggacatgcctgcaccaagaagtatactccagaacaagtagctatggccaccgtaacagctctccaccgtactgttcctgcagctgttcctggcatctgctttttgtctggtggcatgagtgaagaggatgccactctcaacctcaatgctatcaacctttgcccctagtaggagggctgaaagggagcaacttttcctccaatcctggaaattcgacacaattagatttgaactgctggaaatacaacacatgttaaatcttaagtacaagggggaaaaaataaatcagttattgaaacataaaaatgaataccaaggacctgatcaaatttcacacagcagtttccttgcaacactttcagctccccatgctccagaatacccacccaagaaaataataggctttaaaacaatatcggctcctcatccaaagaacaactgctgattgaaacacctcattagctgagtgtagagaagtgcatcttatgaaacagtcttagcagtggtaggttgggaaggagatagctgcaaccaaaaaagaaataaatattctataaaccttcagctgctatcgggtttcacttttctgctcttgctgtccaaagactcagtgtatttcattacttttgactctactagacatgactgggtttcaacagtaaaggtcttcaactcttgctagtcattggaatcaagccgcaaaattttaaaaactgagatgctcaggccacaccccagctcaattaaatcagaaaccctagacttgggatcctctaactattagatttcttaaagctccctcagtaattccaatgtacagtcaagtttgagaactaccaatctaaatttcaagtttgagggtatttgaaaattaaagccattcacaatacgaagccagctaaaaatgtagaatgattttgagcaacttgtggagtataataagagaattaatgtgacttcaatgcttggagcattcttgttcaagtggcccaggtttggtgaaacaggactaccttgtcatctgcacgtccaggcatatttcgtagttttgcagtaaataatattcacataatgatactgtattgactttcaattttcagaattaacctatagttacagcacttaagacaaccagagttataaaagagaatttaaatattataactttggacaatataaaagtgatgatttaactgacagaagctaggaaatataagggggaggagaagtggaagaaagcaaagagagtcaggaatactacttaaaactgatgggttaagaaatagtgctttaattctatttaagtaataaaagaaatggatgtaaatcataaaaatatatatctaaaattaaaatattgatggtagtatgctaaatttcttaccttgaataatacaaagacaaatggtattgtgtagattaacaaatgaagaaacagagacttaacatattatttagaggaataagacagaattagccaaaggggcttactctaagacctgggagaaagacctgggagtcagggcacaggaaagatgacatttccttattacctgccctctacagtatttgaatatttatttccatgtacttgtcattacttttctaaaaacaactacagacagtcatacaagcaactcaagcctatatgagagatctattaagcccacggttttcattttacaggtgataaaaccaagtccagagaagtaaaattacttactgaggatcccacatttatagcagagctgagagattaaaattcaggtcttctgaactcaagtctcttgctcaaaaagtggatacacagccagagatcttacagggcaaggtgacaggctgtgttcaatatctctg

SEQ ID NO: 438967 - DNA, 1938 bp, Homo sapiens
aaaaacatgatgagaagtctataaaaattgtgtgctaccaaagatctgtcttatttggcagctgctgcctcacccacagcttttgatatctaggaggactcttctctcccaaactacctgtcaccatggcccaccgatttccagccctcacccaggagcagaagaaggagctctcagaaattgcccagagcattgttgccaatggaaaggggatcctggctgcagatgaatctgtaggtaccatggggaaccgcctgcagaggatcaaggtggaaaacactgaagagaaccgccggcagttccgagaaatcctcttctctgtggacagttccatcaaccagagcatcgggggtgtgatccttttccacgagaccctctaccagaaggacagccagggaaagctgttcagaaacatcctcaaggaaaaggggatcgtggtgggaatcaagttagaccaaggaggtgctcctcttgcaggagaacaaacaaagaaaccaccattcaagggcttgatggcctctcagagcgctgtgctcagtacaagaaagatggtgttgactttgggaagtggcgtgctgtgctgaggattgccgaccagtgtccatccagcctcgctatccaaatggactggtacctattgttgaaccagaggtaattcctgatggagaccatgacctggaacactgccagtatgttactgagaaggtcctggctgctgtctacaaggccctgaatgaccatcatgtttacctggagggcaccctgctaaagcccaacatggtgactgctggacatgcctgcaccaagaagtatactccagaacaagtagctatggccaccgtaacagctctccaccgtactgttcctgcagctgttcctggcatctgctttttgtctggtggcatgagtgaagaggatgccactctcaacctcaatgctatcaacctttgccctctaccaaagccctggaaactaagtttctcttatggacgggccctgcaggccagtgcactggctgcctggggtggcaaggctgcaaacaaggaggcaacccaggaggcttttatgaagcgggccatggtaagatgctgccacctcttatctacttgatgatgttcacatttggggcttgactttccaacacggagaagcattgttttcttcgggccaagaaggtatctaccaatagtgtctattaggcatttgaaaatgtggcagtagaggtcagtatgaggattgaggctagagagaattttgaattatccacactagagtatagttgatgacaggagactgaaggacaatttcaacagaaacacttcagagggaaggagataagaggaccaagaactgaacctaggatactttttattttgggaagatgaagaagagaagcaaccaagaaaagcagcgattatattgtagggtgaaccaagcattctgggaataaagacagaagaatttctttctttcatgtttatttgtttgtttgtttgtttgttttgagatggagtgttactctgtcacccaggctggagtacagtggcacaatctcggctcactgcaacctccacctcctggattcaagcaattcttctgcctcagcctcccaagtagctgggactagaggcatgcgccaccatacctggctaatttctgtatattttagtaaagatggggtttcaccatgttggccaggctggtctcaaactcctgacctcaggtgatctgcccacctcaacctcccaaagtgctgagattacagacatgagccaccacacccagccgggtaaacaatttcaaagggccaataataacatgctatagagagattcaaaagaaaggccatttcaataaagaggaaaggaaaggtgcccactcaagaagtttttcagaaaaagacccagaaaggttgccaggagaaatgaggaccaacaa

SEQ ID NO: 438968 - DNA, 1015 bp, Homo sapiens
aaaaacatgatgagaagtctataaaaattgtgtgctaccaaagatctgtcttatttggcagctgctgcctcacccacagcttttgatatctaggaggactcttctctcccaaactacctgtcaccatggcccaccgatttccagccctcacccaggagcagaagaaggagctctcagaaattgcccagagcattgttgccaatggaaaggggatcctggctgcagatgaatctgtaggtaccatggggaaccgcctgcagaggatcaaggtggaaaacactgaagagaaccgccggcagttccgagaaatcctcttctctgtggacagttccatcaaccagagcatcgggggtgtgatccttttccacgagaccctctaccagaaggacagccagggaaagctgttcagaaacatcctcaaggaaaaggggatcgtggtgggaatcaagttagaccaaggaggtgctcctcttgcaggagaacaaacaaagaaaccaccattcaagggcttgatggcctctcagagcgctgtgctcagtacaagaaagatggtgttgactttgggaagtggcgtgctgtgctgaggattgccgaccagtgtccatccagcctcgctatccaaatggactggtacctattgttgaaccagaggtaattcctgatggagaccatgacctggaacactgccagtatgttactgagaaggtcctggctgctgtctacaaggccctgaatgaccatcatgtttacctggagggcaccctgctaaagcccaacatggtgactgctggacatgcctgcaccaagaagtatactccagaacaagtagctatggccaccgtaacagctctccaccgtactgttcctgcagctgttcctggcatctgctttttgtctggtggcatgagtgaagaggatgccactctcaacctcaatgctatcaacctttgcccttgccaaggttccaaccaaggaggcacccaagaaggctttaatccggcccatggttcctgcg

SEQ ID NO: 438969 - DNA, 848 bp, Homo sapiens
aaaaacatgatgagaagtctataaaaattgtgtgctaccaaagatctgtcttatttggcagctgctgcctcacccacagcttttgatatctaggaggactcttctctcccaaactacctgtcaccatggcccaccgatttccagccctcacccaggagcagaagaaggagctctcagaaattgcccagagcattgttgccaatggaaaggggatcctggctgcagatgaatctgtaggtaccatggggaaccgcctgcagaggatcaaggtggaaaacactgaagagaaccgccggcagttccgagaaatcctcttctctgtggacagttccatcaaccagagcatcgggggtgtgatccttttccacgagaccctctaccagaaggacagccagggaaagctgttcagaaacatcctcaaggaaaaggggatcgtggtgggaatcaagttagaccaaggaggtgctcctcttgcaggagaacaaacaaagaaaccaccattcaagggcttgatggcctctcagagcgctgtgctcagtacaagaaagatggtgttgactttgggaagtggcgtgctgtgctgaggattgccgaccagtgtccatccagcctcgctatccaggaaaacgccaacgccctggctcgctacgccagcatctgtcagcagtctgcgagcacaatggacttggaccctattgtttacaccagagggtaattcctgaggggagaacattaacctggggcacttggcagttcgttacctaagaagggcttggcctgcttgatgccggtgccctgagatgaccattgaggtgagccttgaaggataccttccatgggccctcgtc

SEQ ID NO: 438970 - DNA, 760 bp, Homo sapiens
gttccaagtaggggagaccagctgcccctgaaccccagaacaaccagctggatcagttctcacaggagctacagcgcggagactgggaaacatggttccaaaactgttcacttcccaaatttgtctgcttcttctgttggggcttctggctgtggagggctcactccatgtcaaacctccacagtttacctgggctcaatggtttgaaacccagcacatcaatatgacctcccagcaatgcaccaatgcaatgcaggtcattaacaattatcaacggcgatgcaaaaaccaaaatactttccttcttacaacttttgctaacgtagttaatgtttgtggtaacccaaatatgacctgtcctagtaacaaaactcgcaaaaattgtcaccacagtggaagccaggtgcctttaatccactgtaacctcacaactccaagtccacagaatatttcaaactgcaggtatgcgcagacaccagcaaacatgttctatatagttgcatgtgacaacagagatcaacgacgagaccctccacagtatccggtggttccagttcacctggatagaatcatctaagctcctgtatcagcactcctcatcatcactcatctgccaagctcctcaatcatagccaagatcccatctctccatatactttgggtatcagcatctgtcctcatcagtctccataccccttcagctttcctgagctgaagtgccttgtgaaccctgcaataaactgctttgcaaattcaaaaa

SEQ ID NO: 438971 - DNA, 503 bp, Homo sapiens
caatgacacggtgatgctcactacgcaacagatacttaccttcttacactataggctaccttcgtgcatgtaagttgtgtaccccggactatgatctgatcctagtgcgaataggcgaaacactgtgtgaccacagtggaagccaggtgcctttaatccactgtaacctcacaactccaagtccacagaatatttcaaactgcaggtatgcgcagacaccagcaaacatgttctatatagttgcatgtgacaacagagatcaacgacgagaccctccacagtatccggtggttccagttcacctggatagaatcatctaagctcctgtatcagcactcctcatcatcactcatctgccaagctcctcaatcatagccaagatcccatctctccatatactttgggtatcagcatctgtcctcatcagtctccataccccttcagctttcctgagctgaagtgccttgtgaaccctgcaataaactgctttgcaaattcaaaaa

SEQ ID NO: 438972 - DNA, 309 bp, Homo sapiens
aatgcagagaatatacaagatcctcctctggcagtagggggaccaggaactatgttctgctcttgtgcccttctgagcccacaataaaggctgagctcttatcttgcaaaaaaggctgctggtgcactgtgtcgtagggctgagatggcaacggtgggcaggggctgagttctgagaccggttctgaggaaggaagcacaggccccatctgcaagcctcagtgtcagtgtgagatactgccaacttctggggaagagtgatgtctttgcctccaggggtgggaaaggcatagcatggggtaggcctctt

SEQ ID NO: 438973 - DNA, 8832 bp, Homo sapiens
gcagctcacagctattgtggtgggaaagggagggtggttggtggatgtcacagcttgggctttatctcccccagcagtggggactccacagcccctgggctacataacagcaagacagtccggagctgtagcagacctgattgagcctttgcagcagctgagagcatggcctagggtgggcggcaccattgtccagcagctgagtttcccagggaccttggagatagccgcagccctcatttgcaggggaagatgattcctgccagatttgccggggtgctgcttgctctggccctcattttgccagggaccctttgtgcagaaggaactcgcggcaggtcatccacggcccgatgcagccttttcggaagtgacttcgtcaacacctttgatgggagcatgtacagctttgcgggatactgcagttacctcctggcagggggctgccagaaacgctccttctcgattattggggacttccagaatggcaagagagtgagcctctccgtgtatcttggggaattttttgacatccatttgtttgtcaatggtaccgtgacacagggggaccaaagagtctccatgccctatgcctccaaagggctgtatctagaaactgaggctgggtactacaagctgtccggtgaggcctatggctttgtggccaggatcgatggcagcggcaactttcaagtcctgctgtcagacagatacttcaacaagacctgcgggctgtgtggcaactttaacatctttgctgaagatgactttatgacccaagaagggaccttgacctcggacccttatgactttgccaactcatgggctctgagcagtggagaacagtggtgtgaacgggcatctcctcccagcagctcatgcaacatctcctctggggaaatgcagaagggcctgtgggagcagtgccagcttctgaagagcacctcggtgtttgcccgctgccaccctctggtggaccccgagccttttgtggccctgtgtgagaagactttgtgtgagtgtgctggggggctggagtgcgcctgccctgccctcctggagtacgcccggacctgtgcccaggagggaatggtgctgtacggctggaccgaccacagcgcgtgcagcccagtgtgccctgctggtatggagtataggcagtgtgtgtccccttgcgccaggacctgccagagcctgcacatcaaagaaatgtgtcaggagcgatgcgtggatggctgcagctgccctgagggacagctcctggatgaaggcctctgcgtggagagcaccgagtgtccctgcgtgcattccggaaagcgctaccctcccggcacctccctctctcgagactgcaacacctgcatttgccgaaacagccagtggatctgcagcaatgaagaatgtccaggggagtgccttgtcacaggtcaatcacacttcaagagctttgacaacagatacttcaccttcagtgggatctgccagtacctgctggcccgggattgccaggaccactccttctccattgtcattgagactgtccagtgtgctgatgaccgcgacgctgtgtgcacccgctccgtcaccgtccggctgcctggcctgcacaacagccttgtgaaactgaagcatggggcaggagttgccatggatggccaggacgtccagctccccctcctgaaaggtgacctccgcatccagcatacagtgacggcctccgtgcgcctcagctacggggaggacctgcagatggactgggatggccgcgggaggctgctggtgaagctgtcccccgtctatgccgggaagacctgcggcctgtgtgggaattacaatggcaaccagggcgacgacttccttaccccctctgggctggcggagccccgggtggaggacttcgggaacgcctggaagctgcacggggactgccaggacctgcagaagcagcacagcgatccctgcgccctcaacccgcgcatgaccaggttctccgaggaggcgtgcgcggtcctgacgtcccccacattcgaggcctgccatcgtgccgtcagcccgctgccctacctgcggaactgccgctacgacgtgtgctcctgctcggacggccgcgagtgcctgtgcggcgccctggccagctatgccgcggcctgcgcggggagaggcgtgcgcgtcgcgtggcgcgagccaggccgctgtgagctgaactgcccgaaaggccaggtgtacctgcagtgcgggaccccctgcaacctgacctgccgctctctctcttacccggatgaggaatgcaatgaggcctgcctggagggctgcttctgccccccagggctctacatggatgagaggggggactgcgtgcccaaggcccagtgcccctgttactatgacggtgagatcttccagccagaagacatcttctcagaccatcacaccatgtgctactgtgaggatggcttcatgcactgtaccatgagtggagtccccggaagcttgctgcctgacgctgtcctcagcagtcccctgtctcatcgcagcaaaaggagcctatcctgtcggccccccatggtcaagctggtgtgtcccgctgacaacctgcgggctgaagggctcgagtgtaccaaaacgtgccagaactatgacctggagtgcatgagcatgggctgtgtctctggctgcctctgccccccgggcatggtccggcatgagaacagatgtgtggccctggaaaggtgtccctgcttccatcagggcaaggagtatgcccctggagaaacagtgaagattggctgcaacacttgtgtctgtcgggaccggaagtggaactgcacagaccatgtgtgtgatgccacgtgctccacgatcggcatggcccactacctcaccttcgacgggctcaaatacctgttccccggggagtgccagtacgttctggtgcaggattactgcggcagtaaccctgggacctttcggatcctagtggggaataagggatgcagccacccctcagtgaaatgcaagaaacgggtcaccatcctggtggagggaggagagattgagctgtttgacggggaggtgaatgtgaagaggcccatgaaggatgagactcactttgaggtggtggagtctggccggtacatcattctgctgctgggcaaagccctctccgtggtctgggaccgccacctgagcatctccgtggtcctgaagcagacataccaggagaaagtgtgtggcctgtgtgggaattttgatggcatccagaacaatgacctcaccagcagcaacctccaagtggaggaagaccctgtggactttgggaactcctggaaagtgagctcgcagtgtgctgacaccagaaaagtgcctctggactcatcccctgccacctgccataacaacatcatgaagcagacgatggtggattcctcctgtagaatccttaccagtgacgtcttccaggactgcaacaagctggtggaccccgagccatatctggatgtctgcatttacgacacctgctcctgtgagtccattggggactgcgcctgcttctgcgacaccattgctgcctatgcccacgtgtgtgcccagcatggcaaggtggtgacctggaggacggccacattgtgcccccagagctgcgaggagaggaatctccgggagaacgggtatgagtgtgagtggcgctataacagctgtgcacctgcctgtcaagtcacgtgtcagcaccctgagccactggcctgccctgtgcagtgtgtggagggctgccatgcccactgccctccagggaaaatcctggatgagcttttgcagacctgcgttgaccctgaagactgtccagtgtgtgaggtggctggccggcgttttgcctcaggaaagaaagtcaccttgaatcccagtgaccctgagcactgccagatttgccactgtgatgttgtcaacctcacctgtgaagcctgccaggagccgggaggcctggtggtgcctcccacagatgccccggtgagccccaccactctgtatgtggaggacatctcggaaccgccgttgcacgatttctactgcagcaggctactggacctggtcttcctgctggatggctcctccaggctgtccgaggctgagtttgaagtgctgaaggcctttgtggtggacatgatggagcggctgcgcatctcccagaagtgggtccgcgtggccgtggtggagtaccacgacggctcccacgcctacatcgggctcaaggaccggaagcgaccgtcagagctgcggcgcattgccagccaggtgaagtatgcgggcagccaggtggcctccaccagcgaggtcttgaaatacacactgttccaaatcttcagcaagatcgaccgccctgaagcctcccgcatcgccctgctcctgatggccagccaggagccccaacggatgtcccggaactttgtccgctacgtccagggcctgaagaagaagaaggtcattgtgatcccggtgggcattgggccccatgccaacctcaagcagatccgcctcatcgagaagcaggcccctgagaacaaggccttcgtgctgagcagtgtggatgagctggagcagcaaagggacgagatcgttagctacctctgtgaccttgcccctgaagcccctcctcctactctgccccccgacatggcacaagtcactgtgggcccggggctcttgggggtttcgaccctggggcccaagaggaactccatggttctggatgtggcgttcgtcctggaaggatcggacaaaattggtgaagccgacttcaacaggagcaaggagttcatggaggaggtgattcagcggatggatgtgggccaggacagcatccacgtcacggtgctgcagtactcctacatggtgaccgtggagtaccccttcagcgaggcacagtccaaaggggacatcctgcagcgggtgcgagagatccgctaccagggcggcaacaggaccaacactgggctggccctgcggtacctctctgaccacagcttcttggtcagccagggtgaccgggagcaggcgcccaacctggtctacatggtcaccggaaatcctgcctctgatgagatcaagaggctgcctggagacatccaggtggtgcccattggagtgggccctaatgccaacgtgcaggagctggagaggattggctggcccaatgcccctatcctcatccaggactttgagacgctcccccgagaggctcctgacctggtgctgcagaggtgctgctccggagaggggctgcagatccccaccctctcccctgcacctgactgcagccagcccctggacgtgatccttctcctggatggctcctccagtttcccagcttcttattttgatgaaatgaagagtttcgccaaggctttcatttcaaaagccaatatagggcctcgtctcactcaggtgtcagtgctgcagtatggaagcatcaccaccattgacgtgccatggaacgtggtcccggagaaagcccatttgctgagccttgtggacgtcatgcagcgggagggaggccccagccaaatcggggatgccttgggctttgctgtgcgatacttgacttcagaaatgcatggtgccaggccgggagcctcaaaggcggtggtcatcctggtcacggacgtctctgtggattcagtggatgcagcagctgatgccgccaggtccaacagagtgacagtgttccctattggaattggagatcgctacgatgcagcccagctacggatcttggcaggcccagcaggcgactccaacgtggtgaagctccagcgaatcgaagacctccctaccatggtcaccttgggcaattccttcctccacaaactgtgctctggatttgttaggatttgcatggatgaggatgggaatgagaagaggcccggggacgtctggaccttgccagaccagtgccacaccgtgacttgccagccagatggccagaccttgctgaagagtcatcgggtcaactgtgaccgggggctgaggccttcgtgccctaacagccagtcccctgttaaagtggaagagacctgtggctgccgctggacctgcccctgtgtgtgcacaggcagctccactcggcacatcgtgacctttgatgggcagaatttcaagctgactggcagctgttcttatgtcctatttcaaaacaaggagcaggacctggaggtgattctccataatggtgcctgcagccctggagcaaggcagggctgcatgaaatccatcgaggtgaagcacagtgccctctccgtcgagctgcacagtgacatggaggtgacggtgaatgggagactggtctctgttccttacgtgggtgggaacatggaagtcaacgtttatggtgccatcatgcatgaggtcagattcaatcaccttggtcacatcttcacattcactccacaaaacaatgagttccaactgcagctcagccccaagacttttgcttcaaagacgtatggtctgtgtgggatctgtgatgagaacggagccaatgacttcatgctgagggatggcacagtcaccacagactggaaaacacttgttcaggaatggactgtgcagcggccagggcagacgtgccagcccatcctggaggagcagtgtcttgtccccgacagctcccactgccaggtcctcctcttaccactgtttgctgaatgccacaaggtcctggctccagccacattctatgccatctgccagcaggacagttgccaccaggagcaagtgtgtgaggtgatcgcctcttatgcccacctctgtcggaccaacggggtctgcgttgactggaggacacctgatttctgtgctatgtcatgcccaccatctctggtctacaaccactgtgagcatggctgtccccggcactgtgatggcaacgtgagctcctgtggggaccatccctccgaaggctgtttctgccctccagataaagtcatgttggaaggcagctgtgtccctgaagaggcctgcactcagtgcattggtgaggatggagtccagcaccagttcctggaagcctgggtcccggaccaccagccctgtcagatctgcacatgcctcagcgggcggaaggtcaactgcacaacgcagccctgccccacggccaaagctcccacgtgtggcctgtgtgaagtagcccgcctccgccagaatgcagaccagtgctgccccgagtatgagtgtgtgtgtgacccagtgagctgtgacctgcccccagtgcctcactgtgaacgtggcctccagcccacactgaccaaccctggcgagtgcagacccaacttcacctgcgcctgcaggaaggaggagtgcaaaagagtgtccccaccctcctgccccccgcaccgtttgcccacccttcggaagacccagtgctgtgatgagtatgagtgtgcctgcaactgtgtcaactccacagtgagctgtccccttgggtacttggcctcaaccgccaccaatgactgtggctgtaccacaaccacctgccttcccgacaaggtgtgtgtccaccgaagcaccatctaccctgtgggccagttctgggaggagggctgcgatgtgtgcacctgcaccgacatggaggatgccgtgatgggcctccgcgtggcccagtgctcccagaagccctgtgaggacagctgtcggtcgggcttcacttacgttctgcatgaaggcgagtgctgtggaaggtgcctgccatctgcctgtgaggtggtgactggctcaccgcggggggactcccagtcttcctggaagagtgtcggctcccagtgggcctccccggagaacccctgcctcatcaatgagtgtgtccgagtgaaggaggaggtctttatacaacaaaggaacgtctcctgcccccagctggaggtccctgtctgcccctcgggctttcagctgagctgtaagacctcagcgtgctgcccaagctgtcgctgtgagcgcatggaggcctgcatgctcaatggcactgtcattgggcccgggaagactgtgatgatcgatgtgtgcacgacctgccgctgcatggtgcaggtgggggtcatctctggattcaagctggagtgcaggaagaccacctgcaacccctgccccctgggttacaaggaagaaaataacacaggtgaatgttgtgggagatgtttgcctacggcttgcaccattcagctaagaggaggacagatcatgacactgaagcgtgatgagacgctccaggatggctgtgatactcacttctgcaaggtcaatgagagaggagagtacttctgggagaagagggtcacaggctgcccaccctttgatgaacacaagtgtctggctgagggaggtaaaattatgaaaattccaggcacctgctgtgacacatgtgaggagcctgagtgcaacgacatcactgccaggctgcagtatgtcaaggtgggaagctgtaagtctgaagtagaggtggatatccactactgccagggcaaatgtgccagcaaagccatgtactccattgacatcaacgatgtgcaggaccagtgctcctgctgctctccgacacggacggagcccatgcaggtggccctgcactgcaccaatggctctgttgtgtaccatgaggttctcaatgccatggagtgcaaatgctcccccaggaagtgcagcaagtgaggctgctgcagctgcatgggtgcctgctgctgcctgccttggcctgatggccaggccagagtgctgccagtcctctgcatgttctgctcttgtgcccttctgagcccacaataaaggctgagctcttatcttgcaaaa

SEQ ID NO: 438974 - DNA, 9074 bp, Homo sapiens
gcagctcacagctattgtggtgggaaagggagggtggttggtggatgtcacagcttgggctttatctcccccagcagtggggactccacagcccctgggctacataacagcaagacagtccggagctgtagcagacctgattgagcctttgcagcagctgagagcatggcctagggtgggcggcaccattgtccagcagctgagtttcccagggaccttggagatagccgcagccctcatttgcaggggaagatgattcctgccagatttgccggggtgctgcttgctctggccctcattttgccagagaccaggtgcctgcaaatgccatctcctgttggggaattaagaagcataaaggtggcacagaactgtcctatattatgggggcacaggatgaggaggaaggaatccaagacttggatggattattagttttcgataagattgtggaggtcaccttgttgaacctcccatggtacaatgaagagactgagggtcagagaggagaaatgactgctccaaagtctcctagagccaaaatcagagggaccctttgtgcagaaggaactcgcggcaggtcatccacggcccgatgcagccttttcggaagtgacttcgtcaacacctttgatgggagcatgtacagctttgcgggatactgcagttacctcctggcagggggctgccagaaacgctccttctcgattattggggacttccagaatggcaagagagtgagcctctccgtgtatcttggggaattttttgacatccatttgtttgtcaatggtaccgtgacacagggggaccaaagagtctccatgccctatgcctccaaagggctgtatctagaaactgaggctgggtactacaagctgtccggtgaggcctatggctttgtggccaggatcgatggcagcggcaactttcaagtcctgctgtcagacagatacttcaacaagacctgcgggctgtgtggcaactttaacatctttgctgaagatgactttatgacccaagaagggaccttgacctcggacccttatgactttgccaactcatgggctctgagcagtggagaacagtggtgtgaacgggcatctcctcccagcagctcatgcaacatctcctctggggaaatgcagaagggcctgtgggagcagtgccagcttctgaagagcacctcggtgtttgcccgctgccaccctctggtggaccccgagccttttgtggccctgtgtgagaagactttgtgtgagtgtgctggggggctggagtgcgcctgccctgccctcctggagtacgcccggacctgtgcccaggagggaatggtgctgtacggctggaccgaccacagcgcgtgcagcccagtgtgccctgctggtatggagtataggcagtgtgtgtccccttgcgccaggacctgccagagcctgcacatcaaagaaatgtgtcaggagcgatgcgtggatggctgcagctgccctgagggacagctcctggatgaaggcctctgcgtggagagcaccgagtgtccctgcgtgcattccggaaagcgctaccctcccggcacctccctctctcgagactgcaacacctgcatttgccgaaacagccagtggatctgcagcaatgaagaatgtccaggggagtgccttgtcacaggtcaatcacacttcaagagctttgacaacagatacttcaccttcagtgggatctgccagtacctgctggcccgggattgccaggaccactccttctccattgtcattgagactgtccagtgtgctgatgaccgcgacgctgtgtgcacccgctccgtcaccgtccggctgcctggcctgcacaacagccttgtgaaactgaagcatggggcaggagttgccatggatggccaggacgtccagctccccctcctgaaaggtgacctccgcatccagcatacagtgacggcctccgtgcgcctcagctacggggaggacctgcagatggactgggatggccgcgggaggctgctggtgaagctgtcccccgtctatgccgggaagacctgcggcctgtgtgggaattacaatggcaaccagggcgacgacttccttaccccctctgggctggcggagccccgggtggaggacttcgggaacgcctggaagctgcacggggactgccaggacctgcagaagcagcacagcgatccctgcgccctcaacccgcgcatgaccaggttctccgaggaggcgtgcgcggtcctgacgtcccccacattcgaggcctgccatcgtgccgtcagcccgctgccctacctgcggaactgccgctacgacgtgtgctcctgctcggacggccgcgagtgcctgtgcggcgccctggccagctatgccgcggcctgcgcggggagaggcgtgcgcgtcgcgtggcgcgagccaggccgctgtgagctgaactgcccgaaaggccaggtgtacctgcagtgcgggaccccctgcaacctgacctgccgctctctctcttacccggatgaggaatgcaatgaggcctgcctggagggctgcttctgccccccagggctctacatggatgagaggggggactgcgtgcccaaggcccagtgcccctgttactatgacggtgagatcttccagccagaagacatcttctcagaccatcacaccatgtgctactgtgaggatggcttcatgcactgtaccatgagtggagtccccggaagcttgctgcctgacgctgtcctcagcagtcccctgtctcatcgcagcaaaaggagcctatcctgtcggccccccatggtcaagctggtgtgtcccgctgacaacctgcgggctgaagggctcgagtgtaccaaaacgtgccagaactatgacctggagtgcatgagcatgggctgtgtctctggctgcctctgccccccgggcatggtccggcatgagaacagatgtgtggccctggaaaggtgtccctgcttccatcagggcaaggagtatgcccctggagaaacagtgaagattggctgcaacacttgtgtctgtcgggaccggaagtggaactgcacagaccatgtgtgtgatgccacgtgctccacgatcggcatggcccactacctcaccttcgacgggctcaaatacctgttccccggggagtgccagtacgttctggtgcaggattactgcggcagtaaccctgggacctttcggatcctagtggggaataagggatgcagccacccctcagtgaaatgcaagaaacgggtcaccatcctggtggagggaggagagattgagctgtttgacggggaggtgaatgtgaagaggcccatgaaggatgagactcactttgaggtggtggagtctggccggtacatcattctgctgctgggcaaagccctctccgtggtctgggaccgccacctgagcatctccgtggtcctgaagcagacataccaggagaaagtgtgtggcctgtgtgggaattttgatggcatccagaacaatgacctcaccagcagcaacctccaagtggaggaagaccctgtggactttgggaactcctggaaagtgagctcgcagtgtgctgacaccagaaaagtgcctctggactcatcccctgccacctgccataacaacatcatgaagcagacgatggtggattcctcctgtagaatccttaccagtgacgtcttccaggactgcaacaagctggtggaccccgagccatatctggatgtctgcatttacgacacctgctcctgtgagtccattggggactgcgcctgcttctgcgacaccattgctgcctatgcccacgtgtgtgcccagcatggcaaggtggtgacctggaggacggccacattgtgcccccagagctgcgaggagaggaatctccgggagaacgggtatgagtgtgagtggcgctataacagctgtgcacctgcctgtcaagtcacgtgtcagcaccctgagccactggcctgccctgtgcagtgtgtggagggctgccatgcccactgccctccagggaaaatcctggatgagcttttgcagacctgcgttgaccctgaagactgtccagtgtgtgaggtggctggccggcgttttgcctcaggaaagaaagtcaccttgaatcccagtgaccctgagcactgccagatttgccactgtgatgttgtcaacctcacctgtgaagcctgccaggagccgggaggcctggtggtgcctcccacagatgccccggtgagccccaccactctgtatgtggaggacatctcggaaccgccgttgcacgatttctactgcagcaggctactggacctggtcttcctgctggatggctcctccaggctgtccgaggctgagtttgaagtgctgaaggcctttgtggtggacatgatggagcggctgcgcatctcccagaagtgggtccgcgtggccgtggtggagtaccacgacggctcccacgcctacatcgggctcaaggaccggaagcgaccgtcagagctgcggcgcattgccagccaggtgaagtatgcgggcagccaggtggcctccaccagcgaggtcttgaaatacacactgttccaaatcttcagcaagatcgaccgccctgaagcctcccgcatcgccctgctcctgatggccagccaggagccccaacggatgtcccggaactttgtccgctacgtccagggcctgaagaagaagaaggtcattgtgatcccggtgggcattgggccccatgccaacctcaagcagatccgcctcatcgagaagcaggcccctgagaacaaggccttcgtgctgagcagtgtggatgagctggagcagcaaagggacgagatcgttagctacctctgtgaccttgcccctgaagcccctcctcctactctgccccccgacatggcacaagtcactgtgggcccggggctcttgggggtttcgaccctggggcccaagaggaactccatggttctggatgtggcgttcgtcctggaaggatcggacaaaattggtgaagccgacttcaacaggagcaaggagttcatggaggaggtgattcagcggatggatgtgggccaggacagcatccacgtcacggtgctgcagtactcctacatggtgaccgtggagtaccccttcagcgaggcacagtccaaaggggacatcctgcagcgggtgcgagagatccgctaccagggcggcaacaggaccaacactgggctggccctgcggtacctctctgaccacagcttcttggtcagccagggtgaccgggagcaggcgcccaacctggtctacatggtcaccggaaatcctgcctctgatgagatcaagaggctgcctggagacatccaggtggtgcccattggagtgggccctaatgccaacgtgcaggagctggagaggattggctggcccaatgcccctatcctcatccaggactttgagacgctcccccgagaggctcctgacctggtgctgcagaggtgctgctccggagaggggctgcagatccccaccctctcccctgcacctgactgcagccagcccctggacgtgatccttctcctggatggctcctccagtttcccagcttcttattttgatgaaatgaagagtttcgccaaggctttcatttcaaaagccaatatagggcctcgtctcactcaggtgtcagtgctgcagtatggaagcatcaccaccattgacgtgccatggaacgtggtcccggagaaagcccatttgctgagccttgtggacgtcatgcagcgggagggaggccccagccaaatcggggatgccttgggctttgctgtgcgatacttgacttcagaaatgcatggtgccaggccgggagcctcaaaggcggtggtcatcctggtcacggacgtctctgtggattcagtggatgcagcagctgatgccgccaggtccaacagagtgacagtgttccctattggaattggagatcgctacgatgcagcccagctacggatcttggcaggcccagcaggcgactccaacgtggtgaagctccagcgaatcgaagacctccctaccatggtcaccttgggcaattccttcctccacaaactgtgctctggatttgttaggatttgcatggatgaggatgggaatgagaagaggcccggggacgtctggaccttgccagaccagtgccacaccgtgacttgccagccagatggccagaccttgctgaagagtcatcgggtcaactgtgaccgggggctgaggccttcgtgccctaacagccagtcccctgttaaagtggaagagacctgtggctgccgctggacctgcccctgtgtgtgcacaggcagctccactcggcacatcgtgacctttgatgggcagaatttcaagctgactggcagctgttcttatgtcctatttcaaaacaaggagcaggacctggaggtgattctccataatggtgcctgcagccctggagcaaggcagggctgcatgaaatccatcgaggtgaagcacagtgccctctccgtcgagctgcacagtgacatggaggtgacggtgaatgggagactggtctctgttccttacgtgggtgggaacatggaagtcaacgtttatggtgccatcatgcatgaggtcagattcaatcaccttggtcacatcttcacattcactccacaaaacaatgagttccaactgcagctcagccccaagacttttgcttcaaagacgtatggtctgtgtgggatctgtgatgagaacggagccaatgacttcatgctgagggatggcacagtcaccacagactggaaaacacttgttcaggaatggactgtgcagcggccagggcagacgtgccagcccatcctggaggagcagtgtcttgtccccgacagctcccactgccaggtcctcctcttaccactgtttgctgaatgccacaaggtcctggctccagccacattctatgccatctgccagcaggacagttgccaccaggagcaagtgtgtgaggtgatcgcctcttatgcccacctctgtcggaccaacggggtctgcgttgactggaggacacctgatttctgtgctatgtcatgcccaccatctctggtctacaaccactgtgagcatggctgtccccggcactgtgatggcaacgtgagctcctgtggggaccatccctccgaaggctgtttctgccctccagataaagtcatgttggaaggcagctgtgtccctgaagaggcctgcactcagtgcattggtgaggatggagtccagcaccagttcctggaagcctgggtcccggaccaccagccctgtcagatctgcacatgcctcagcgggcggaaggtcaactgcacaacgcagccctgccccacggccaaagctcccacgtgtggcctgtgtgaagtagcccgcctccgccagaatgcagaccagtgctgccccgagtatgagtgtgtgtgtgacccagtgagctgtgacctgcccccagtgcctcactgtgaacgtggcctccagcccacactgaccaaccctggcgagtgcagacccaacttcacctgcgcctgcaggaaggaggagtgcaaaagagtgtccccaccctcctgccccccgcaccgtttgcccacccttcggaagacccagtgctgtgatgagtatgagtgtgcctgcaactgtgtcaactccacagtgagctgtccccttgggtacttggcctcaaccgccaccaatgactgtggctgtaccacaaccacctgccttcccgacaaggtgtgtgtccaccgaagcaccatctaccctgtgggccagttctgggaggagggctgcgatgtgtgcacctgcaccgacatggaggatgccgtgatgggcctccgcgtggcccagtgctcccagaagccctgtgaggacagctgtcggtcgggcttcacttacgttctgcatgaaggcgagtgctgtggaaggtgcctgccatctgcctgtgaggtggtgactggctcaccgcggggggactcccagtcttcctggaagagtgtcggctcccagtgggcctccccggagaacccctgcctcatcaatgagtgtgtccgagtgaaggaggaggtctttatacaacaaaggaacgtctcctgcccccagctggaggtccctgtctgcccctcgggctttcagctgagctgtaagacctcagcgtgctgcccaagctgtcgctgtgagcgcatggaggcctgcatgctcaatggcactgtcattgggcccgggaagactgtgatgatcgatgtgtgcacgacctgccgctgcatggtgcaggtgggggtcatctctggattcaagctggagtgcaggaagaccacctgcaacccctgccccctgggttacaaggaagaaaataacacaggtgaatgttgtgggagatgtttgcctacggcttgcaccattcagctaagaggaggacagatcatgacactgaagcgtgatgagacgctccaggatggctgtgatactcacttctgcaaggtcaatgagagaggagagtacttctgggagaagagggtcacaggctgcccaccctttgatgaacacaagtgtctggctgagggaggtaaaattatgaaaattccaggcacctgctgtgacacatgtgaggagcctgagtgcaacgacatcactgccaggctgcagtatgtcaaggtgggaagctgtaagtctgaagtagaggtggatatccactactgccagggcaaatgtgccagcaaagccatgtactccattgacatcaacgatgtgcaggaccagtgctcctgctgctctccgacacggacggagcccatgcaggtggccctgcactgcaccaatggctctgttgtgtaccatgaggttctcaatgccatggagtgcaaatgctcccccaggaagtgcagcaagtgaggctgctgcagctgcatgggtgcctgctgctgcctgccttggcctgatggccaggccagagtgctgccagtcctctgcatgttctgctcttgtgcccttctgagcccacaataaaggctgagctcttatcttgcaaaa

SEQ ID NO: 438975 - DNA, 8667 bp, Homo sapiens
gcagctcacagctattgtggtgggaaagggagggtggttggtggatgtcacagcttgggctttatctcccccagcagtggggactccacagcccctgggctacataacagcaagacagtccggagctgtagcagacctgattgagcctttgcagcagctgagagcatggcctagggtgggcggcaccattgtccagcagctgagtttcccagggaccttggagatagccgcagccctcatttgcaggggaagatgattcctgccagatttgccggggtgctgcttgctctggccctcattttgccagggaccctttgtgcagaaggaactcgcggcaggtcatccacggcccgatgcagccttttcggaagtgacttcgtcaacacctttgatgggagcatgtacagctttgcgggatactgcagttacctcctggcagggggctgccagaaacgctccttctcgattattggggacttccagaatggcaagagagtgagcctctccgtgtatcttggggaattttttgacatccatttgtttgtcaatggtaccgtgacacagggggaccaaagagtctccatgccctatgcctccaaagggctgtatctagaaactgaggctgggtactacaagctgtccggtgaggcctatggctttgtggccaggatcgatggcagcggcaactttcaagtcctgctgtcagacagatacttcaacaagacctgcgggctgtgtggcaactttaacatctttgctgaagatgactttatgacccaagaagggaccttgacctcggacccttatgactttgccaactcatgggctctgagcagtggagaacagtggtgtgaacgggcatctcctcccagcagctcatgcaacatctcctctggggaaatgcagaagggcctgtgggagcagtgccagcttctgaagagcacctcggtgtttgcccgctgccaccctctggtggaccccgagccttttgtggccctgtgtgagaagactttgtgtgagtgtgctggggggctggagtgcgcctgccctgccctcctggagtacgcccggacctgtgcccaggagggaatggtgctgtacggctggaccgaccacagcgcgtgcagcccagtgtgccctgctggtatggagtataggcagtgtgtgtccccttgcgccaggacctgccagagcctgcacatcaaagaaatgtgtcaggagcgatgcgtggatggctgcagctgccctgagggacagctcctggatgaaggcctctgcgtggagagcaccgagtgtccctgcgtgcattccggaaagcgctaccctcccggcacctccctctctcgagactgcaacacctgcatttgccgaaacagccagtggatctgcagcaatgaagaatgtccaggggagtgccttgtcacaggtcaatcacacttcaagagctttgacaacagatacttcaccttcagtgggatctgccagtacctgctggcccgggattgccaggaccactccttctccattgtcattgagactgtccagtgtgctgatgaccgcgacgctgtgtgcacccgctccgtcaccgtccggctgcctggcctgcacaacagccttgtgaaactgaagcatggggcaggagttgccatggatggccaggacgtccagctccccctcctgaaaggtgacctccgcatccagcatacagtgacggcctccgtgcgcctcagctacggggaggacctgcagatggactgggatggccgcgggaggctgctggtgaagctgtcccccgtctatgccgggaagacctgcggcctgtgtgggaattacaatggcaaccagggcgacgacttccttaccccctctgggctggcggagccccgggtggaggacttcgggaacgcctggaagctgcacggggactgccaggacctgcagaagcagcacagcgatccctgcgccctcaacccgcgcatgaccaggttctccgaggaggcgtgcgcggtcctgacgtcccccacattcgaggcctgccatcgtgccgtcagcccgctgccctacctgcggaactgccgctacgacgtgtgctcctgctcggacggccgcgagtgcctgtgcggcgccctggccagctatgccgcggcctgcgcggggagaggcgtgcgcgtcgcgtggcgcgagccaggccgctgtgagctgaactgcccgaaaggccaggtgtacctgcagtgcgggaccccctgcaacctgacctgccgctctctctcttacccggatgaggaatgcaatgaggcctgcctggagggctgcttctgccccccagggctctacatggatgagaggggggactgcgtgcccaaggcccagtgcccctgttactatgacggtgagatcttccagccagaagacatcttctcagaccatcacaccatgtgctactgtgaggatggcttcatgcactgtaccatgagtggagtccccggaagcttgctgcctgacgctgtcctcagcagtcccctgtctcatcgcagcaaaaggagcctatcctgtcggccccccatggtcaagctggtgtgtcccgctgacaacctgcgggctgaagggctcgagtgtaccaaaacgtgccagaactatgacctggagtgcatgagcatgggctgtgtctctggctgcctctgccccccgggcatggtccggcatgagaacagatgtgtggccctggaaaggtgtccctgcttccatcagggcaaggagtatgcccctggagaaacagtgaagattggctgcaacacttgtgtctgtcgggaccggaagtggaactgcacagaccatgtgtgtgatgccacgtgctccacgatcggcatggcccactacctcaccttcgacgggctcaaatacctgttccccggggagtgccagtacgttctggtgcaggattactgcggcagtaaccctgggacctttcggatcctagtggggaataagggatgcagccacccctcagtgaaatgcaagaaacgggtcaccatcctggtggagggaggagagattgagctgtttgacggggaggtgaatgtgaagaggcccatgaaggatgagactcactttgaggtggtggagtctggccggtacatcattctgctgctgggcaaagccctctccgtggtctgggaccgccacctgagcatctccgtggtcctgaagcagacataccaggagaaagtgtgtggcctgtgtgggaattttgatggcatccagaacaatgacctcaccagcagcaacctccaagtggaggaagaccctgtggactttgggaactcctggaaagtgagctcgcagtgtgctgacaccagaaaagtgcctctggactcatcccctgccacctgccataacaacatcatgaagcagacgatggtggattcctcctgtagaatccttaccagtgacgtcttccaggactgcaacaagctggtggaccccgagccatatctggatgtctgcatttacgacacctgctcctgtgagtccattggggactgcgcctgcttctgcgacaccattgctgcctatgcccacgtgtgtgcccagcatggcaaggtggtgacctggaggacggccacattgtgcccccagagctgcgaggagaggaatctccgggagaacgggtatgagtgtgagtggcgctataacagctgtgcacctgcctgtcaagtcacgtgtcagcaccctgagccactggcctgccctgtgcagtgtgtggagggctgccatgcccactgccctccagggaaaatcctggatgagcttttgcagacctgcgttgaccctgaagactgtccagtgtgtgaggtggctggccggcgttttgcctcaggaaagaaagtcaccttgaatcccagtgaccctgagcactgccagatttgccactgtgatgttgtcaacctcacctgtgaagcctgccaggagccgggaggcctggtggtgcctcccacagatgccccggtgagccccaccactctgtatgtggaggacatctcggaaccgccgttgcacgatttctactgcagcaggctactggacctggtcttcctgctggatggctcctccaggctgtccgaggctgagtttgaagtgctgaaggcctttgtggtggacatgatggagcggctgcgcatctcccagaagtgggtccgcgtggccgtggtggagtaccacgacggctcccacgcctacatcgggctcaaggaccggaagcgaccgtcagagctgcggcgcattgccagccaggtgaagtatgcgggcagccaggtggcctccaccagcgaggtcttgaaatacacactgttccaaatcttcagcaagatcgaccgccctgaagcctcccgcatcgccctgctcctgatggccagccaggagccccaacggatgtcccggaactttgtccgctacgtccagggcctgaagaagaagaaggtcattgtgatcccggtgggcattgggccccatgccaacctcaagcagatccgcctcatcgagaagcaggcccctgagaacaaggccttcgtgctgagcagtgtggatgagctggagcagcaaagggacgagatcgttagctacctctgtgaccttgcccctgaagcccctcctcctactctgccccccgacatggcacaagtcactgtgggcccggggctcttgggggtttcgaccctggggcccaagaggaactccatggttctggatgtggcgttcgtcctggaaggatcggacaaaattggtgaagccgacttcaacaggagcaaggagttcatggaggaggtgattcagcggatggatgtgggccaggacagcatccacgtcacggtgctgcagtactcctacatggtgaccgtggagtaccccttcagcgaggcacagtccaaaggggacatcctgcagcgggtgcgagagatccgctaccagggcggcaacaggaccaacactgggctggccctgcggtacctctctgaccacagcttcttggtcagccagggtgaccgggagcaggcgcccaacctggtctacatggtcaccggaaatcctgcctctgatgagatcaagaggctgcctggagacatccaggtggtgcccattggagtgggccctaatgccaacgtgcaggagctggagaggattggctggcccaatgcccctatcctcatccaggactttgagacgctcccccgagaggctcctgacctggtgctgcagaggtgctgctccggagaggggctgcagatccccaccctctcccctgcacctgactgcagccagcccctggacgtgatccttctcctggatggctcctccagtttcccagcttcttattttgatgaaatgaagagtttcgccaaggctttcatttcaaaagccaatatagggcctcgtctcactcaggtgtcagtgctgcagtatggaagcatcaccaccattgacgtgccatggaacgtggtcccggagaaagcccatttgctgagccttgtggacgtcatgcagcgggagggaggccccagccaaatcggggatgccttgggctttgctgtgcgatacttgacttcagaaatgcatggtgccaggccgggagcctcaaaggcggtggtcatcctggtcacggacgtctctgtggattcagtggatgcagcagctgatgccgccaggtccaacagagtgacagtgttccctattggaattggagatcgctacgatgcagcccagctacggatcttggcaggcccagcaggcgactccaacgtggtgaagctccagcgaatcgaagacctccctaccatggtcaccttgggcaattccttcctccacaaactgtgctctggatttgttaggatttgcatggatgaggatgggaatgagaagaggcccggggacgtctggaccttgccagaccagtgccacaccgtgacttgccagccagatgggcagaatttcaagctgactggcagctgttcttatgtcctatttcaaaacaaggagcaggacctggaggtgattctccataatggtgcctgcagccctggagcaaggcagggctgcatgaaatccatcgaggtgaagcacagtgccctctccgtcgagctgcacagtgacatggaggtgacggtgaatgggagactggtctctgttccttacgtgggtgggaacatggaagtcaacgtttatggtgccatcatgcatgaggtcagattcaatcaccttggtcacatcttcacattcactccacaaaacaatgagttccaactgcagctcagccccaagacttttgcttcaaagacgtatggtctgtgtgggatctgtgatgagaacggagccaatgacttcatgctgagggatggcacagtcaccacagactggaaaacacttgttcaggaatggactgtgcagcggccagggcagacgtgccagcccatcctggaggagcagtgtcttgtccccgacagctcccactgccaggtcctcctcttaccactgtttgctgaatgccacaaggtcctggctccagccacattctatgccatctgccagcaggacagttgccaccaggagcaagtgtgtgaggtgatcgcctcttatgcccacctctgtcggaccaacggggtctgcgttgactggaggacacctgatttctgtgctatgtcatgcccaccatctctggtctacaaccactgtgagcatggctgtccccggcactgtgatggcaacgtgagctcctgtggggaccatccctccgaaggctgtttctgccctccagataaagtcatgttggaaggcagctgtgtccctgaagaggcctgcactcagtgcattggtgaggatggagtccagcaccagttcctggaagcctgggtcccggaccaccagccctgtcagatctgcacatgcctcagcgggcggaaggtcaactgcacaacgcagccctgccccacggccaaagctcccacgtgtggcctgtgtgaagtagcccgcctccgccagaatgcagaccagtgctgccccgagtatgagtgtgtgtgtgacccagtgagctgtgacctgcccccagtgcctcactgtgaacgtggcctccagcccacactgaccaaccctggcgagtgcagacccaacttcacctgcgcctgcaggaaggaggagtgcaaaagagtgtccccaccctcctgccccccgcaccgtttgcccacccttcggaagacccagtgctgtgatgagtatgagtgtgcctgcaactgtgtcaactccacagtgagctgtccccttgggtacttggcctcaaccgccaccaatgactgtggctgtaccacaaccacctgccttcccgacaaggtgtgtgtccaccgaagcaccatctaccctgtgggccagttctgggaggagggctgcgatgtgtgcacctgcaccgacatggaggatgccgtgatgggcctccgcgtggcccagtgctcccagaagccctgtgaggacagctgtcggtcgggcttcacttacgttctgcatgaaggcgagtgctgtggaaggtgcctgccatctgcctgtgaggtggtgactggctcaccgcggggggactcccagtcttcctggaagagtgtcggctcccagtgggcctccccggagaacccctgcctcatcaatgagtgtgtccgagtgaaggaggaggtctttatacaacaaaggaacgtctcctgcccccagctggaggtccctgtctgcccctcgggctttcagctgagctgtaagacctcagcgtgctgcccaagctgtcgctgtgagcgcatggaggcctgcatgctcaatggcactgtcattgggcccgggaagactgtgatgatcgatgtgtgcacgacctgccgctgcatggtgcaggtgggggtcatctctggattcaagctggagtgcaggaagaccacctgcaacccctgccccctgggttacaaggaagaaaataacacaggtgaatgttgtgggagatgtttgcctacggcttgcaccattcagctaagaggaggacagatcatgacactgaagcgtgatgagacgctccaggatggctgtgatactcacttctgcaaggtcaatgagagaggagagtacttctgggagaagagggtcacaggctgcccaccctttgatgaacacaagtgtctggctgagggaggtaaaattatgaaaattccaggcacctgctgtgacacatgtgaggagcctgagtgcaacgacatcactgccaggctgcagtatgtcaaggtgggaagctgtaagtctgaagtagaggtggatatccactactgccagggcaaatgtgccagcaaagccatgtactccattgacatcaacgatgtgcaggaccagtgctcctgctgctctccgacacggacggagcccatgcaggtggccctgcactgcaccaatggctctgttgtgtaccatgaggttctcaatgccatggagtgcaaatgctcccccaggaagtgcagcaagtgaggctgctgcagctgcatgggtgcctgctgctgcctgccttggcctgatggccaggccagagtgctgccagtcctctgcatgttctgctcttgtgcccttctgagcccacaataaaggctgagctcttatcttgcaaaa

SEQ ID NO: 438976 - DNA, 9277 bp, Homo sapiens
gcagctcacagctattgtggtgggaaagggagggtggttggtggatgtcacagcttgggctttatctcccccagcagtggggactccacagcccctgggctacataacagcaagacagtccggagctgtagcagacctgattgagcctttgcagcagctgagagcatggcctagggtgggcggcaccattgtccagcagctgagtttcccagggaccttggagatagccgcagccctcatttgcaggggaagatgattcctgccagatttgccggggtgctgcttgctctggccctcattttgccagggaccctttgtgcagaaggaactcgcggcaggtcatccacggcccgatgcagccttttcggaagtgacttcgtcaacacctttgatgggagcatgtacagctttgcgggatactgcagttacctcctggcagggggctgccagaaacgctccttctcgattattggggacttccagaatggcaagagagtgagcctctccgtgtatcttggggaattttttgacatccatttgtttgtcaatggtaccgtgacacagggggaccaaagagtctccatgccctatgcctccaaagggctgtatctagaaactgaggctgggtactacaagctgtccggtgaggcctatggctttgtggccaggatcgatggcagcggcaactttcaagtcctgctgtcagacagatacttcaacaagacctgcgggctgtgtggcaactttaacatctttgctgaagatgactttatgacccaagaagggaccttgacctcggacccttatgactttgccaactcatgggctctgagcagtggagaacagtggtgtgaacgggcatctcctcccagcagctcatgcaacatctcctctggggaaatgcagaagggcctgtgggagcagtgccagcttctgaagagcacctcggtgtttgcccgctgccaccctctggtggaccccgagccttttgtggccctgtgtgagaagactttgtgtgagtgtgctggggggctggagtgcgcctgccctgccctcctggagtacgcccggacctgtgcccaggagggaatggtgctgtacggctggaccgaccacagcgcgtgcagcccagtgtgccctgctggtatggagtataggcagtgtgtgtccccttgcgccaggacctgccagagcctgcacatcaaagaaatgtgtcaggagcgatgcgtggatggctgcagctgccctgagggacagctcctggatgaaggcctctgcgtggagagcaccgagtgtccctgcgtgcattccggaaagcgctaccctcccggcacctccctctctcgagactgcaacacctgcatttgccgaaacagccagtggatctgcagcaatgaagaatgtccaggggagtgccttgtcacaggtcaatcacacttcaagagctttgacaacagatacttcaccttcagtgggatctgccagtacctgctggcccgggattgccaggaccactccttctccattgtcattgagactgtccagtgtgctgatgaccgcgacgctgtgtgcacccgctccgtcaccgtccggctgcctggcctgcacaacagccttgtgaaactgaagcatggggcaggagttgccatggatggccaggacgtccagctccccctcctgaaaggtgacctccgcatccagcatacagtgacggcctccgtgcgcctcagctacggggaggacctgcagatggactgggatggccgcgggaggctgctggtgaagctgtcccccgtctatgccgggaagacctgcggcctgtgtgggaattacaatggcaaccagggcgacgacttccttaccccctctgggctggcggagccccgggtggaggacttcgggaacgcctggaagctgcacggggactgccaggacctgcagaagcagcacagcgatccctgcgccctcaacccgcgcatgaccaggttctccgaggaggcgtgcgcggtcctgacgtcccccacattcgaggcctgccatcgtgccgtcagcccgctgccctacctgcggaactgccgctacgacgtgtgctcctgctcggacggccgcgagtgcctgtgcggcgccctggccagctatgccgcggcctgcgcggggagaggcgtgcgcgtcgcgtggcgcgagccaggccgctgtgagctgaactgcccgaaaggccaggtgtacctgcagtgcgggaccccctgcaacctgacctgccgctctctctcttacccggatgaggaatgcaatgaggcctgcctggagggctgcttctgccccccagggctctacatggatgagaggggggactgcgtgcccaaggcccagtgcccctgttactatgacggtgagatcttccagccagaagacatcttctcagaccatcacaccatgtgctactgtgaggatggcttcatgcactgtaccatgagtggagtccccggaagcttgctgcctgacgctgtcctcagcagtcccctgtctcatcgcagcaaaaggagcctatcctgtcggccccccatggtcaagctggtgtgtcccgctgacaacctgcgggctgaagggctcgagtgtaccaaaacgtgccagaactatgacctggagtgcatgagcatgggctgtgtctctggctgcctctgccccccgggcatggtccggcatgagaacagatgtgtggccctggaaaggtgtccctgcttccatcagggcaaggagtatgcccctggagaaacagtgaagattggctgcaacacttgtgtctgtcgggaccggaagtggaactgcacagaccatgtgtgtgatgccacgtgctccacgatcggcatggcccactacctcaccttcgacgggctcaaatacctgttccccggggagtgccagtacgttctggtgcaggattactgcggcagtaaccctgggacctttcggatcctagtggggaataagggatgcagccacccctcagtgaaatgcaagaaacgggtcaccatcctggtggagggaggagagattgagctgtttgacggggaggtgaatgtgaagaggcccatgaaggatgagactcactttgaggtggtggagtctggccggtacatcattctgctgctgggcaaagccctctccgtggtctgggaccgccacctgagcatctccgtggtcctgaagcagacataccaggagaaagtgtgtggcctgtgtgggaattttgatggcatccagaacaatgacctcaccagcagcaacctccaagtggaggaagaccctgtggactttgggaactcctggaaagtgagctcgcagtgtgctgacaccagaaaagtgcctctggactcatcccctgccacctgccataacaacatcatgaagcagacgatggtggattcctcctgtagaatccttaccagtgacgtcttccaggactgcaacaagctggtggaccccgagccatatctggatgtctgcatttacgacacctgctcctgtgagtccattggggactgcgcctgcttctgcgacaccattgctgcctatgcccacgtgtgtgcccagcatggcaaggtggtgacctggaggacggccacattgtgcccccagagctgcgaggagaggaatctccgggagaacgggtatgagtgtgagtggcgctataacagctgtgcacctgcctgtcaagtcacgtgtcagcaccctgagccactggcctgccctgtgcagtgtgtggagggctgccatgcccactgccctccagggaaaatcctggatgagcttttgcagacctgcgttgaccctgaagactgtccagtgtgtgaggtggctggccggcgttttgcctcaggaaagaaagtcaccttgaatcccagtgaccctgagcactgccagatttggtcatgactagtctgagcacaggtgtccatatactggaggtggggactcaggagaggaaagtgagatggaacccagggccctcaggtaacatgaacgtcgtgggggccatagtcaaggtggcagggtgtggctgtcataatggggagggaaggtgctcgttgctctcaccctggcttctcactggacttgcctctgggaaactggcctttggggaggtgagaaggagtcctcagggtgagctctgagccctctgaagtcctgctcataagtagggagcatttattaaaatccagatctattcaacaccactccctgacactaatcaagccttctgggagcttaaacttgagaacgtaaattcgctggggaggggctatggtcacagctgctagagtcagatcctgccgccaccatctgtacaaacaagaatgaacactgcctgggccactgtgatgttgtcaacctcacctgtgaagcctgccaggagccgggaggcctggtggtgcctcccacagatgccccggtgagccccaccactctgtatgtggaggacatctcggaaccgccgttgcacgatttctactgcagcaggctactggacctggtcttcctgctggatggctcctccaggctgtccgaggctgagtttgaagtgctgaaggcctttgtggtggacatgatggagcggctgcgcatctcccagaagtgggtccgcgtggccgtggtggagtaccacgacggctcccacgcctacatcgggctcaaggaccggaagcgaccgtcagagctgcggcgcattgccagccaggtgaagtatgcgggcagccaggtggcctccaccagcgaggtcttgaaatacacactgttccaaatcttcagcaagatcgaccgccctgaagcctcccgcatcgccctgctcctgatggccagccaggagccccaacggatgtcccggaactttgtccgctacgtccagggcctgaagaagaagaaggtcattgtgatcccggtgggcattgggccccatgccaacctcaagcagatccgcctcatcgagaagcaggcccctgagaacaaggccttcgtgctgagcagtgtggatgagctggagcagcaaagggacgagatcgttagctacctctgtgaccttgcccctgaagcccctcctcctactctgccccccgacatggcacaagtcactgtgggcccggggctcttgggggtttcgaccctggggcccaagaggaactccatggttctggatgtggcgttcgtcctggaaggatcggacaaaattggtgaagccgacttcaacaggagcaaggagttcatggaggaggtgattcagcggatggatgtgggccaggacagcatccacgtcacggtgctgcagtactcctacatggtgaccgtggagtaccccttcagcgaggcacagtccaaaggggacatcctgcagcgggtgcgagagatccgctaccagggcggcaacaggaccaacactgggctggccctgcggtacctctctgaccacagcttcttggtcagccagggtgaccgggagcaggcgcccaacctggtctacatggtcaccggaaatcctgcctctgatgagatcaagaggctgcctggagacatccaggtggtgcccattggagtgggccctaatgccaacgtgcaggagctggagaggattggctggcccaatgcccctatcctcatccaggactttgagacgctcccccgagaggctcctgacctggtgctgcagaggtgctgctccggagaggggctgcagatccccaccctctcccctgcacctgactgcagccagcccctggacgtgatccttctcctggatggctcctccagtttcccagcttcttattttgatgaaatgaagagtttcgccaaggctttcatttcaaaagccaatatagggcctcgtctcactcaggtgtcagtgctgcagtatggaagcatcaccaccattgacgtgccatggaacgtggtcccggagaaagcccatttgctgagccttgtggacgtcatgcagcgggagggaggccccagccaaatcggggatgccttgggctttgctgtgcgatacttgacttcagaaatgcatggtgccaggccgggagcctcaaaggcggtggtcatcctggtcacggacgtctctgtggattcagtggatgcagcagctgatgccgccaggtccaacagagtgacagtgttccctattggaattggagatcgctacgatgcagcccagctacggatcttggcaggcccagcaggcgactccaacgtggtgaagctccagcgaatcgaagacctccctaccatggtcaccttgggcaattccttcctccacaaactgtgctctggatttgttaggatttgcatggatgaggatgggaatgagaagaggcccggggacgtctggaccttgccagaccagtgccacaccgtgacttgccagccagatggccagaccttgctgaagagtcatcgggtcaactgtgaccgggggctgaggccttcgtgccctaacagccagtcccctgttaaagtggaagagacctgtggctgccgctggacctgcccctgtgtgtgcacaggcagctccactcggcacatcgtgacctttgatgggcagaatttcaagctgactggcagctgttcttatgtcctatttcaaaacaaggagcaggacctggaggtgattctccataatggtgcctgcagccctggagcaaggcagggctgcatgaaatccatcgaggtgaagcacagtgccctctccgtcgagctgcacagtgacatggaggtgacggtgaatgggagactggtctctgttccttacgtgggtgggaacatggaagtcaacgtttatggtgccatcatgcatgaggtcagattcaatcaccttggtcacatcttcacattcactccacaaaacaatgagttccaactgcagctcagccccaagacttttgcttcaaagacgtatggtctgtgtgggatctgtgatgagaacggagccaatgacttcatgctgagggatggcacagtcaccacagactggaaaacacttgttcaggaatggactgtgcagcggccagggcagacgtgccagcccatcctggaggagcagtgtcttgtccccgacagctcccactgccaggtcctcctcttaccactgtttgctgaatgccacaaggtcctggctccagccacattctatgccatctgccagcaggacagttgccaccaggagcaagtgtgtgaggtgatcgcctcttatgcccacctctgtcggaccaacggggtctgcgttgactggaggacacctgatttctgtgctatgtcatgcccaccatctctggtctacaaccactgtgagcatggctgtccccggcactgtgatggcaacgtgagctcctgtggggaccatccctccgaaggctgtttctgccctccagataaagtcatgttggaaggcagctgtgtccctgaagaggcctgcactcagtgcattggtgaggatggagtccagcaccagttcctggaagcctgggtcccggaccaccagccctgtcagatctgcacatgcctcagcgggcggaaggtcaactgcacaacgcagccctgccccacggccaaagctcccacgtgtggcctgtgtgaagtagcccgcctccgccagaatgcagaccagtgctgccccgagtatgagtgtgtgtgtgacccagtgagctgtgacctgcccccagtgcctcactgtgaacgtggcctccagcccacactgaccaaccctggcgagtgcagacccaacttcacctgcgcctgcaggaaggaggagtgcaaaagagtgtccccaccctcctgccccccgcaccgtttgcccacccttcggaagacccagtgctgtgatgagtatgagtgtgcctgcaactgtgtcaactccacagtgagctgtccccttgggtacttggcctcaaccgccaccaatgactgtggctgtaccacaaccacctgccttcccgacaaggtgtgtgtccaccgaagcaccatctaccctgtgggccagttctgggaggagggctgcgatgtgtgcacctgcaccgacatggaggatgccgtgatgggcctccgcgtggcccagtgctcccagaagccctgtgaggacagctgtcggtcgggcttcacttacgttctgcatgaaggcgagtgctgtggaaggtgcctgccatctgcctgtgaggtggtgactggctcaccgcggggggactcccagtcttcctggaagagtgtcggctcccagtgggcctccccggagaacccctgcctcatcaatgagtgtgtccgagtgaaggaggaggtctttatacaacaaaggaacgtctcctgcccccagctggaggtccctgtctgcccctcgggctttcagctgagctgtaagacctcagcgtgctgcccaagctgtcgctgtgagcgcatggaggcctgcatgctcaatggcactgtcattgggcccgggaagactgtgatgatcgatgtgtgcacgacctgccgctgcatggtgcaggtgggggtcatctctggattcaagctggagtgcaggaagaccacctgcaacccctgccccctgggttacaaggaagaaaataacacaggtgaatgttgtgggagatgtttgcctacggcttgcaccattcagctaagaggaggacagatcatgacactgaagcgtgatgagacgctccaggatggctgtgatactcacttctgcaaggtcaatgagagaggagagtacttctgggagaagagggtcacaggctgcccaccctttgatgaacacaagtgtctggctgagggaggtaaaattatgaaaattccaggcacctgctgtgacacatgtgaggagcctgagtgcaacgacatcactgccaggctgcagtatgtcaaggtgggaagctgtaagtctgaagtagaggtggatatccactactgccagggcaaatgtgccagcaaagccatgtactccattgacatcaacgatgtgcaggaccagtgctcctgctgctctccgacacggacggagcccatgcaggtggccctgcactgcaccaatggctctgttgtgtaccatgaggttctcaatgccatggagtgcaaatgctcccccaggaagtgcagcaagtgaggctgctgcagctgcatgggtgcctgctgctgcctgccttggcctgatggccaggccagagtgctgccagtcctctgcatgttctgctcttgtgcccttctgagcccacaataaaggctgagctcttatcttgcaaaa

SEQ ID NO: 438977 - DNA, 5509 bp, Homo sapiens
attccctctttgagaccattgagctacatttctccttctacctggacccccttatccttaaattgaccatcagaacatttgcacccagactaagagccagagttcctgacacctggccataggcctgggccacctgaggctgcctttgcaggtggaccccgagccatatctggatgtctgcatttacgacacctgctcctgtgagtccattggggactgcgcctgcttctgcgacaccattgctgcctatgcccacgtgtgtgcccagcatggcaaggtggtgacctggaggacggccacattgtgcccccagagctgcgaggagaggaatctccgggagaacgggtatgagtgtgagtggcgctataacagctgtgcacctgcctgtcaagtcacgtgtcagcaccctgagccactggcctgccctgtgcagtgtgtggagggctgccatgcccactgccctccagggaaaatcctggatgagcttttgcagacctgcgttgaccctgaagactgtccagtgtgtgaggtggctggccggcgttttgcctcaggaaagaaagtcaccttgaatcccagtgaccctgagcactgccagatttgccactgtgatgttgtcaacctcacctgtgaagcctgccaggagccgggaggcctggtggtgcctcccacagatgccccggtgagccccaccactctgtatgtggaggacatctcggaaccgccgttgcacgatttctactgcagcaggctactggacctggtcttcctgctggatggctcctccaggctgtccgaggctgagtttgaagtgctgaaggcctttgtggtggacatgatggagcggctgcgcatctcccagaagtgggtccgcgtggccgtggtggagtaccacgacggctcccacgcctacatcgggctcaaggaccggaagcgaccgtcagagctgcggcgcattgccagccaggtgaagtatgcgggcagccaggtggcctccaccagcgaggtcttgaaatacacactgttccaaatcttcagcaagatcgaccgccctgaagcctcccgcatcgccctgctcctgatggccagccaggagccccaacggatgtcccggaactttgtccgctacgtccagggcctgaagaagaagaaggtcattgtgatcccggtgggcattgggccccatgccaacctcaagcagatccgcctcatcgagaagcaggcccctgagaacaaggccttcgtgctgagcagtgtggatgagctggagcagcaaagggacgagatcgttagctacctctgtgaccttgcccctgaagcccctcctcctactctgccccccgacatggcacaagtcactgtgggcccggggctcttgggggtttcgaccctggggcccaagaggaactccatggttctggatgtggcgttcgtcctggaaggatcggacaaaattggtgaagccgacttcaacaggagcaaggagttcatggaggaggtgattcagcggatggatgtgggccaggacagcatccacgtcacggtgctgcagtactcctacatggtgaccgtggagtaccccttcagcgaggcacagtccaaaggggacatcctgcagcgggtgcgagagatccgctaccagggcggcaacaggaccaacactgggctggccctgcggtacctctctgaccacagcttcttggtcagccagggtgaccgggagcaggcgcccaacctggtctacatggtcaccggaaatcctgcctctgatgagatcaagaggctgcctggagacatccaggtggtgcccattggagtgggccctaatgccaacgtgcaggagctggagaggattggctggcccaatgcccctatcctcatccaggactttgagacgctcccccgagaggctcctgacctggtgctgcagaggtgctgctccggagaggggctgcagatccccaccctctcccctgcacctgactgcagccagcccctggacgtgatccttctcctggatggctcctccagtttcccagcttcttattttgatgaaatgaagagtttcgccaaggctttcatttcaaaagccaatatagggcctcgtctcactcaggtgtcagtgctgcagtatggaagcatcaccaccattgacgtgccatggaacgtggtcccggagaaagcccatttgctgagccttgtggacgtcatgcagcgggagggaggccccagccaaatcggggatgccttgggctttgctgtgcgatacttgacttcagaaatgcatggtgccaggccgggagcctcaaaggcggtggtcatcctggtcacggacgtctctgtggattcagtggatgcagcagctgatgccgccaggtccaacagagtgacagtgttccctattggaattggagatcgctacgatgcagcccagctacggatcttggcaggcccagcaggcgactccaacgtggtgaagctccagcgaatcgaagacctccctaccatggtcaccttgggcaattccttcctccacaaactgtgctctggatttgttaggatttgcatggatgaggatgggaatgagaagaggcccggggacgtctggaccttgccagaccagtgccacaccgtgacttgccagccagatggccagaccttgctgaagagtcatcgggtcaactgtgaccgggggctgaggccttcgtgccctaacagccagtcccctgttaaagtggaagagacctgtggctgccgctggacctgcccctgtgtgtgcacaggcagctccactcggcacatcgtgacctttgatgggcagaatttcaagctgactggcagctgttcttatgtcctatttcaaaacaaggagcaggacctggaggtgattctccataatggtgcctgcagccctggagcaaggcagggctgcatgaaatccatcgaggtgaagcacagtgccctctccgtcgagctgcacagtgacatggaggtgacggtgaatgggagactggtctctgttccttacgtgggtgggaacatggaagtcaacgtttatggtgccatcatgcatgaggtcagattcaatcaccttggtcacatcttcacattcactccacaaaacaatgagttccaactgcagctcagccccaagacttttgcttcaaagacgtatggtctgtgtgggatctgtgatgagaacggagccaatgacttcatgctgagggatggcacagtcaccacagactggaaaacacttgttcaggaatggactgtgcagcggccagggcagacgtgccagcccatcctggaggagcagtgtcttgtccccgacagctcccactgccaggtcctcctcttaccactgtttgctgaatgccacaaggtcctggctccagccacattctatgccatctgccagcaggacagttgccaccaggagcaagtgtgtgaggtgatcgcctcttatgcccacctctgtcggaccaacggggtctgcgttgactggaggacacctgatttctgtgctatgtcatgcccaccatctctggtctacaaccactgtgagcatggctgtccccggcactgtgatggcaacgtgagctcctgtggggaccatccctccgaaggctgtttctgccctccagataaagtcatgttggaaggcagctgtgtccctgaagaggcctgcactcagtgcattggtgaggatggagtccagcaccagttcctggaagcctgggtcccggaccaccagccctgtcagatctgcacatgcctcagcgggcggaaggtcaactgcacaacgcagccctgccccacggccaaagctcccacgtgtggcctgtgtgaagtagcccgcctccgccagaatgcagaccagtgctgccccgagtatgagtgtgtgtgtgacccagtgagctgtgacctgcccccagtgcctcactgtgaacgtggcctccagcccacactgaccaaccctggcgagtgcagacccaacttcacctgcgcctgcaggaaggaggagtgcaaaagagtgtccccaccctcctgccccccgcaccgtttgcccacccttcggaagacccagtgctgtgatgagtatgagtgtgcctgcaactgtgtcaactccacagtgagctgtccccttgggtacttggcctcaaccgccaccaatgactgtggctgtaccacaaccacctgccttcccgacaaggtgtgtgtccaccgaagcaccatctaccctgtgggccagttctgggaggagggctgcgatgtgtgcacctgcaccgacatggaggatgccgtgatgggcctccgcgtggcccagtgctcccagaagccctgtgaggacagctgtcggtcgggcttcacttacgttctgcatgaaggcgagtgctgtggaaggtgcctgccatctgcctgtgaggtggtgactggctcaccgcggggggactcccagtcttcctggaagagtgtcggctcccagtgggcctccccggagaacccctgcctcatcaatgagtgtgtccgagtgaaggaggaggtctttatacaacaaaggaacgtctcctgcccccagctggaggtccctgtctgcccctcgggctttcagctgagctgtaagacctcagcgtgctgcccaagctgtcgctgtgagcgcatggaggcctgcatgctcaatggcactgtcattgggcccgggaagactgtgatgatcgatgtgtgcacgacctgccgctgcatggtgcaggtgggggtcatctctggattcaagctggagtgcaggaagaccacctgcaacccctgccccctgggttacaaggaagaaaataacacaggtgaatgttgtgggagatgtttgcctacggcttgcaccattcagctaagaggaggacagatcatgacactgaagcgtgatgagacgctccaggatggctgtgatactcacttctgcaaggtcaatgagagaggagagtacttctgggagaagagggtcacaggctgcccaccctttgatgaacacaagtgtctggctgagggaggtaaaattatgaaaattccaggcacctgctgtgacacatgtgaggagcctgagtgcaacgacatcactgccaggctgcagtatgtcaaggtgggaagctgtaagtctgaagtagaggtggatatccactactgccagggcaaatgtgccagcaaagccatgtactccattgacatcaacgatgtgcaggaccagtgctcctgctgctctccgacacggacggagcccatgcaggtggccctgcactgcaccaatggctctgttgtgtaccatgaggttctcaatgccatggagtgcaaatgctcccccaggaagtgcagcaagtgaggctgctgcagctgcatgggtgcctgctgctgcctgccttggcctgatggccaggccagagtgctgccagtcctctgcatgttctgctcttgtgcccttctgagcccacaataaaggctgagctcttatcttgcaaaa

SEQ ID NO: 438978 - DNA, 1847 bp, Homo sapiens
tggacagccaaggagagcgggcgagtgtagggctggcgctgccggacgcggtgctagtcgccggatgaagtgagggcctcaccccaacgcagccttagcctcctctgtgctgtccggacagcacagaggaggtcaactgcacaacgcagccctgccccacggccaaagctcccacgtgtggcctgtgtgaagtagcccgcctccgccagaatgcagaccagtgctgccccgagtatgagtgtgtgtgtgacccagtgagctgtgacctgcccccagtgcctcactgtgaacgtggcctccagcccacactgaccaaccctggcgagtgcagacccaacttcacctgcgcctgcaggaaggaggagtgcaaaagagtgtccccaccctcctgccccccgcaccgtttgcccacccttcggaagacccagtgctgtgatgagtatgagtgtgcctgcaactgtgtcaactccacagtgagctgtccccttgggtacttggcctcaaccgccaccaatgactgtggctgtaccacaaccacctgccttcccgacaaggtgtgtgtccaccgaagcaccatctaccctgtgggccagttctgggaggagggctgcgatgtgtgcacctgcaccgacatggaggatgccgtgatgggcctccgcgtggcccagtgctcccagaagccctgtgaggacagctgtcggtcgggcttcacttacgttctgcatgaaggcgagtgctgtggaaggtgcctgccatctgcctgtgaggtggtgactggctcaccgcggggggactcccagtcttcctggaagagtgtcggctcccagtgggcctccccggagaacccctgcctcatcaatgagtgtgtccgagtgaaggaggaggtctttatacaacaaaggaacgtctcctgcccccagctggaggtccctgtctgcccctcgggctttcagctgagctgtaagacctcagcgtgctgcccaagctgtcgctgtgagcgcatggaggcctgcatgctcaatggcactgtcattgggcccgggaagactgtgatgatcgatgtgtgcacgacctgccgctgcatggtgcaggtgggggtcatctctggattcaagctggagtgcaggaagaccacctgcaacccctgccccctgggttacaaggaagaaaataacacaggtgaatgttgtgggagatgtttgcctacggcttgcaccattcagctaagaggaggacagatcatgacactgaagcgtgatgagacgctccaggatggctgtgatactcacttctgcaaggtcaatgagagaggagagtacttctgggagaagagggtcacaggctgcccaccctttgatgaacacaagtgtctggctgagggaggtaaaattatgaaaattccaggcacctgctgtgacacatgtgaggagcctgagtgcaacgacatcactgccaggctgcagtatgtcaaggtgggaagctgtaagtctgaagtagaggtggatatccactactgccagggcaaatgtgccagcaaagccatgtactccattgacatcaacgatgtgcaggaccagtgctcctgctgctctccgacacggacggagcccatgcaggtggccctgcactgcaccaatggctctgttgtgtaccatgaggttctcaatgccatggagtgcaaatgctcccccaggaagtgcagcaagtgaggctgctgcagctgcatgggtgcctgctgctgcctgccttggcctgatggccaggccagagtgctgccagtcctctgcatgttctgctcttgtgcccttctgagcccacaataaaggctgagctcttatcttgcaaaa

SEQ ID NO: 438979 - DNA, 1351 bp, Homo sapiens
ccaccctttgatgaacacaagtgtctggctgagggaggtaaaattatgaaagttccaggcacctgctgtgacacatgtgaggagcctgagtgcaacgacatcactgccaggctgcgatgtgtgcacctgcaccgacatggaggatgccgtgatgggcctccgcgtggcccagtgctcccagaagccctgtgaggacagctgtcggtcgggcttcacttacgttctgcatgaaggcgagtgctgtggaaggtgcctgccatctgcctgtgaggtggtgactggctcaccgcggggggactcccagtcttcctggaagagtgtcggctcccagtgggcctccccggagaacccctgcctcatcaatgagtgtgtccgagtgaaggaggaggtctttatacaacaaaggaacgtctcctgcccccagctggaggtccctgtctgcccctcgggctttcagctgagctgtaagacctcagcgtgctgcccaagctgtcgctgtgagcgcatggaggcctgcatgctcaatggcactgtcattgggcccgggaagactgtgatgatcgatgtgtgcacgacctgccgctgcatggtgcaggtgggggtcatctctggattcaagctggagtgcaggaagaccacctgcaacccctgccccctgggttacaaggaagaaaataacacaggtgaatgttgtgggagatgtttgcctacggcttgcaccattcagctaagaggaggacagatcatgacactgaagcgtgatgagacgctccaggatggctgtgatactcacttctgcaaggtcaatgagagaggagagtacttctgggagaagagggtcacaggctgcccaccctttgatgaacacaagtgtctggctgagggaggtaaaattatgaaaattccaggcacctgctgtgacacatgtgaggagcctgagtgcaacgacatcactgccaggctgcagtatgtcaaggtgggaagctgtaagtctgaagtagaggtggatatccactactgccagggcaaatgtgccagcaaagccatgtactccattgacatcaacgatgtgcaggaccagtgctcctgctgctctccgacacggacggagcccatgcaggtggccctgcactgcaccaatggctctgttgtgtaccatgaggttctcaatgccatggagtgcaaatgctcccccaggaagtgcagcaagtgaggctgctgcagctgcatgggtgcctgctgctgcctgccttggcctgatggccaggccagagtgctgccagtcctctgcatgttctgctcttgtgcccttctgagcccacaataaaggctgagctcttatcttgcaaaa

SEQ ID NO: 438980 - DNA, 8312 bp, Homo sapiens
  misc_feature (8058)..(8058): n is a, c, g, or t
  misc_feature (8088)..(8088): n is a, c, g, or t
gcagctcacagctattgtggtgggaaagggagggtggttggtggatgtcacagcttgggctttatctcccccagcagtggggactccacagcccctgggctacataacagcaagacagtccggagctgtagcagacctgattgagcctttgcagcagctgagagcatggcctagggtgggcggcaccattgtccagcagctgagtttcccagggaccttggagatagccgcagccctcatttgcaggggaagatgattcctgccagatttgccggggtgctgcttgctctggccctcattttgccagggaccctttgtgcagaaggaactcgcggcaggtcatccacggcccgatgcagccttttcggaagtgacttcgtcaacacctttgatgggagcatgtacagctttgcgggatactgcagttacctcctggcagggggctgccagaaacgctccttctcgattattggggacttccagaatggcaagagagtgagcctctccgtgtatcttggggaattttttgacatccatttgtttgtcaatggtaccgtgacacagggggaccaaagagtctccatgccctatgcctccaaagggctgtatctagaaactgaggctgggtactacaagctgtccggtgaggcctatggctttgtggccaggatcgatggcagcggcaactttcaagtcctgctgtcagacagatacttcaacaagacctgcgggctgtgtggcaactttaacatctttgctgaagatgactttatgacccaagaagggaccttgacctcggacccttatgactttgccaactcatgggctctgagcagtggagaacagtggtgtgaacgggcatctcctcccagcagctcatgcaacatctcctctggggaaatgcagaagggcctgtgggagcagtgccagcttctgaagagcacctcggtgtttgcccgctgccaccctctggtggaccccgagccttttgtggccctgtgtgagaagactttgtgtgagtgtgctggggggctggagtgcgcctgccctgccctcctggagtacgcccggacctgtgcccaggagggaatggtgctgtacggctggaccgaccacagcgcgtgcagcccagtgtgccctgctggtatggagtataggcagtgtgtgtccccttgcgccaggacctgccagagcctgcacatcaaagaaatgtgtcaggagcgatgcgtggatggctgcagctgccctgagggacagctcctggatgaaggcctctgcgtggagagcaccgagtgtccctgcgtgcattccggaaagcgctaccctcccggcacctccctctctcgagactgcaacacctgcatttgccgaaacagccagtggatctgcagcaatgaagaatgtccaggggagtgccttgtcacaggtcaatcacacttcaagagctttgacaacagatacttcaccttcagtgggatctgccagtacctgctggcccgggattgccaggaccactccttctccattgtcattgagactgtccagtgtgctgatgaccgcgacgctgtgtgcacccgctccgtcaccgtccggctgcctggcctgcacaacagccttgtgaaactgaagcatggggcaggagttgccatggatggccaggacgtccagctccccctcctgaaaggtgacctccgcatccagcatacagtgacggcctccgtgcgcctcagctacggggaggacctgcagatggactgggatggccgcgggaggctgctggtgaagctgtcccccgtctatgccgggaagacctgcggcctgtgtgggaattacaatggcaaccagggcgacgacttccttaccccctctgggctggcggagccccgggtggaggacttcgggaacgcctggaagctgcacggggactgccaggacctgcagaagcagcacagcgatccctgcgccctcaacccgcgcatgaccaggttctccgaggaggcgtgcgcggtcctgacgtcccccacattcgaggcctgccatcgtgccgtcagcccgctgccctacctgcggaactgccgctacgacgtgtgctcctgctcggacggccgcgagtgcctgtgcggcgccctggccagctatgccgcggcctgcgcggggagaggcgtgcgcgtcgcgtggcgcgagccaggccgctgtgagctgaactgcccgaaaggccaggtgtacctgcagtgcgggaccccctgcaacctgacctgccgctctctctcttacccggatgaggaatgcaatgaggcctgcctggagggctgcttctgccccccagggctctacatggatgagaggggggactgcgtgcccaaggcccagtgcccctgttactatgacggtgagatcttccagccagaagacatcttctcagaccatcacaccatgtgctactgtgaggatggcttcatgcactgtaccatgagtggagtccccggaagcttgctgcctgacgctgtcctcagcagtcccctgtctcatcgcagcaaaaggagcctatcctgtcggccccccatggtcaagctggtgtgtcccgctgacaacctgcgggctgaagggctcgagtgtaccaaaacgtgccagaactatgacctggagtgcatgagcatgggctgtgtctctggctgcctctgccccccgggcatggtccggcatgagaacagatgtgtggccctggaaaggtgtccctgcttccatcagggcaaggagtatgcccctggagaaacagtgaagattggctgcaacacttgtgtctgtcgggaccggaagtggaactgcacagaccatgtgtgtgatgccacgtgctccacgatcggcatggcccactacctcaccttcgacgggctcaaatacctgttccccggggagtgccagtacgttctggtgcaggattactgcggcagtaaccctgggacctttcggatcctagtggggaataagggatgcagccacccctcagtgaaatgcaagaaacgggtcaccatcctggtggagggaggagagattgagctgtttgacggggaggtgaatgtgaagaggcccatgaaggatgagactcactttgaggtggtggagtctggccggtacatcattctgctgctgggcaaagccctctccgtggtctgggaccgccacctgagcatctccgtggtcctgaagcagacataccaggagaaagtgtgtggcctgtgtgggaattttgatggcatccagaacaatgacctcaccagcagcaacctccaagtggaggaagaccctgtggactttgggaactcctggaaagtgagctcgcagtgtgctgacaccagaaaagtgcctctggactcatcccctgccacctgccataacaacatcatgaagcagacgatggtggattcctcctgtagaatccttaccagtgacgtcttccaggactgcaacaagctggtggaccccgagccatatctggatgtctgcatttacgacacctgctcctgtgagtccattggggactgcgcctgcttctgcgacaccattgctgcctatgcccacgtgtgtgcccagcatggcaaggtggtgacctggaggacggccacattgtgcccccagagctgcgaggagaggaatctccgggagaacgggtatgagtgtgagtggcgctataacagctgtgcacctgcctgtcaagtcacgtgtcagcaccctgagccactggcctgccctgtgcagtgtgtggagggctgccatgcccactgccctccagggaaaatcctggatgagcttttgcagacctgcgttgaccctgaagactgtccagtgtgtgaggtggctggccggcgttttgcctcaggaaagaaagtcaccttgaatcccagtgaccctgagcactgccagatttgccactgtgatgttgtcaacctcacctgtgaagcctgccaggagccgggaggcctggtggtgcctcccacagatgccccggtgagccccaccactctgtatgtggaggacatctcggaaccgccgttgcacgatttctactgcagcaggctactggacctggtcttcctgctggatggctcctccaggctgtccgaggctgagtttgaagtgctgaaggcctttgtggtggacatgatggagcggctgcgcatctcccagaagtgggtccgcgtggccgtggtggagtaccacgacggctcccacgcctacatcgggctcaaggaccggaagcgaccgtcagagctgcggcgcattgccagccaggtgaagtatgcgggcagccaggtggcctccaccagcgaggtcttgaaatacacactgttccaaatcttcagcaagatcgaccgccctgaagcctcccgcatcgccctgctcctgatggccagccaggagccccaacggatgtcccggaactttgtccgctacgtccagggcctgaagaagaagaaggtcattgtgatcccggtgggcattgggccccatgccaacctcaagcagatccgcctcatcgagaagcaggcccctgagaacaaggccttcgtgctgagcagtgtggatgagctggagcagcaaagggacgagatcgttagctacctctgtgaccttgcccctgaagcccctcctcctactctgccccccgacatggcacaagtcactgtgggcccggggctcttgggggtttcgaccctggggcccaagaggaactccatggttctggatgtggcgttcgtcctggaaggatcggacaaaattggtgaagccgacttcaacaggagcaaggagttcatggaggaggtgattcagcggatggatgtgggccaggacagcatccacgtcacggtgctgcagtactcctacatggtgaccgtggagtaccccttcagcgaggcacagtccaaaggggacatcctgcagcgggtgcgagagatccgctaccagggcggcaacaggaccaacactgggctggccctgcggtacctctctgaccacagcttcttggtcagccagggtgaccgggagcaggcgcccaacctggtctacatggtcaccggaaatcctgcctctgatgagatcaagaggctgcctggagacatccaggtggtgcccattggagtgggccctaatgccaacgtgcaggagctggagaggattggctggcccaatgcccctatcctcatccaggactttgagacgctcccccgagaggctcctgacctggtgctgcagaggtgctgctccggagaggggctgcagatccccaccctctcccctgcacctgactgcagccagcccctggacgtgatccttctcctggatggctcctccagtttcccagcttcttattttgatgaaatgaagagtttcgccaaggctttcatttcaaaagccaatatagggcctcgtctcactcaggtgtcagtgctgcagtatggaagcatcaccaccattgacgtgccatggaacgtggtcccggagaaagcccatttgctgagccttgtggacgtcatgcagcgggagggaggccccagccaaatcggggatgccttgggctttgctgtgcgatacttgacttcagaaatgcatggtgccaggccgggagcctcaaaggcggtggtcatcctggtcacggacgtctctgtggattcagtggatgcagcagctgatgccgccaggtccaacagagtgacagtgttccctattggaattggagatcgctacgatgcagcccagctacggatcttggcaggcccagcaggcgactccaacgtggtgaagctccagcgaatcgaagacctccctaccatggtcaccttgggcaattccttcctccacaaactgtgctctggatttgttaggatttgcatggatgaggatgggaatgagaagaggcccggggacgtctggaccttgccagaccagtgccacaccgtgacttgccagccagatggccagaccttgctgaagagtcatcgggtcaactgtgaccgggggctgaggccttcgtgccctaacagccagtcccctgttaaagtggaagagacctgtggctgccgctggacctgcccctgtgtgtgcacaggcagctccactcggcacatcgtgacctttgatgggcagaatttcaagctgactggcagctgttcttatgtcctatttcaaaacaaggagcaggacctggaggtgattctccataatggtgcctgcagccctggagcaaggcagggctgcatgaaatccatcgaggtgaagcacagtgccctctccgtcgagctgcacagtgacatggaggtgacggtgaatgggagactggtctctgttccttacgtgggtgggaacatggaagtcaacgtttatggtgccatcatgcatgaggtcagattcaatcaccttggtcacatcttcacattcactccacaaaacaatgagttccaactgcagctcagccccaagacttttgcttcaaagacgtatggtctgtgtgggatctgtgatgagaacggagccaatgacttcatgctgagggatggcacagtcaccacagactggaaaacacttgttcaggaatggactgtgcagcggccagggcagacgtgccagcccatcctggaggagcagtgtcttgtccccgacagctcccactgccaggtcctcctcttaccactgtttgctgaatgccacaaggtcctggctccagccacattctatgccatctgccagcaggacagttgccaccaggagcaagtgtgtgaggtgatcgcctcttatgcccacctctgtcggaccaacggggtctgcgttgactggaggacacctgatttctgtgctatgtcatgcccaccatctctggtctacaaccactgtgagcatggctgtccccggcactgtgatggcaacgtgagctcctgtggggaccatccctccgaaggctgtttctgccctccagataaagtcatgttggaaggcagctgtgtccctgaagaggcctgcactcagtgcattggtgaggatggagtccagcaccagttcctggaagcctgggtcccggaccaccagccctgtcagatctgcacatgcctcagcgggcggaaggtcaactgcacaacgcagccctgccccacggccaaagctcccacgtgtggcctgtgtgaagtagcccgcctccgccagaatgcagaccagtgctgccccgagtatgagtgtgtgtgtgacccagtgagctgtgacctgcccccagtgcctcactgtgaacgtggcctccagcccacactgaccaaccctggcgagtgcagacccaacttcacctgcgcctgcaggaaggaggagtgcaaaagagtgtccccaccctcctgccccccgcaccgtttgcccacccttcggaagacccagtgctgtgatgagtatgagtgtgcctgcaactgtgtcaactccacagtgagctgtccccttgggtacttggcctcaaccgccaccaatgactgtggctgtaccacaaccacctgccttcccgacaaggtgtgtgtccaccgaagcaccatctaccctgtgggccagttctgggaggagggctgcgatgtgtgcacctgcaccgacatggaggatgccgtgatgggcctccgcgtggcccagtgctcccagaagccctgtgaggacagctgtcggtcgggcttcacttacgttctgcatgaaggcgagtgctgtggaaggtgcctgccatctgcctgtgaggtggtgactggctcaccgcggggggactcccagtcttcctggaagagtgtcggctcccagtgggcctccccggagaacccctgcctcatcaatgagtgtgtccgagtgaaggaggaggtctttatacaacaaaggaacgtctcctgcccccagctggaggtccctgtctgcccctcgggctttcagctgagctgtaagacctcagcgtgctgcccaagctgtcgctgtgagcgcatggaggcctgcatgctcaatggcactgtcattgggcccgggaagactgtgatgatcgatgtgtgcaggcancgtgttacgatgatgggaagacataccacntaggagaacagtggcagaaggaatatctcggtgccatttgctcctgcacatgctttggaggccagcggggctggcgctgtgacaactgccgcagaccctggggtgaacccagttcccgaggcactactggccagtcctaccaccagttttcttagagattccatcagagaacaaccctaaggttaatggccaattgagggcttatgccttagatggacagctgg

SEQ ID NO: 438981 - DNA, 7599 bp, Homo sapiens
  misc_feature (7292)..(7292): n is a, c, g, or t
  misc_feature (7308)..(7308): n is a, c, g, or t
  misc_feature (7374)..(7374): n is a, c, g, or t
gcagctcacagctattgtggtgggaaagggagggtggttggtggatgtcacagcttgggctttatctcccccagcagtggggactccacagcccctgggctacataacagcaagacagtccggagctgtagcagacctgattgagcctttgcagcagctgagagcatggcctagggtgggcggcaccattgtccagcagctgagtttcccagggaccttggagatagccgcagccctcatttgcaggggaagatgattcctgccagatttgccggggtgctgcttgctctggccctcattttgccagggaccctttgtgcagaaggaactcgcggcaggtcatccacggcccgatgcagccttttcggaagtgacttcgtcaacacctttgatgggagcatgtacagctttgcgggatactgcagttacctcctggcagggggctgccagaaacgctccttctcgattattggggacttccagaatggcaagagagtgagcctctccgtgtatcttggggaattttttgacatccatttgtttgtcaatggtaccgtgacacagggggaccaaagagtctccatgccctatgcctccaaagggctgtatctagaaactgaggctgggtactacaagctgtccggtgaggcctatggctttgtggccaggatcgatggcagcggcaactttcaagtcctgctgtcagacagatacttcaacaagacctgcgggctgtgtggcaactttaacatctttgctgaagatgactttatgacccaagaagggaccttgacctcggacccttatgactttgccaactcatgggctctgagcagtggagaacagtggtgtgaacgggcatctcctcccagcagctcatgcaacatctcctctggggaaatgcagaagggcctgtgggagcagtgccagcttctgaagagcacctcggtgtttgcccgctgccaccctctggtggaccccgagccttttgtggccctgtgtgagaagactttgtgtgagtgtgctggggggctggagtgcgcctgccctgccctcctggagtacgcccggacctgtgcccaggagggaatggtgctgtacggctggaccgaccacagcgcgtgcagcccagtgtgccctgctggtatggagtataggcagtgtgtgtccccttgcgccaggacctgccagagcctgcacatcaaagaaatgtgtcaggagcgatgcgtggatggctgcagctgccctgagggacagctcctggatgaaggcctctgcgtggagagcaccgagtgtccctgcgtgcattccggaaagcgctaccctcccggcacctccctctctcgagactgcaacacctgcatttgccgaaacagccagtggatctgcagcaatgaagaatgtccaggggagtgccttgtcacaggtcaatcacacttcaagagctttgacaacagatacttcaccttcagtgggatctgccagtacctgctggcccgggattgccaggaccactccttctccattgtcattgagactgtccagtgtgctgatgaccgcgacgctgtgtgcacccgctccgtcaccgtccggctgcctggcctgcacaacagccttgtgaaactgaagcatggggcaggagttgccatggatggccaggacgtccagctccccctcctgaaaggtgacctccgcatccagcatacagtgacggcctccgtgcgcctcagctacggggaggacctgcagatggactgggatggccgcgggaggctgctggtgaagctgtcccccgtctatgccgggaagacctgcggcctgtgtgggaattacaatggcaaccagggcgacgacttccttaccccctctgggctggcggagccccgggtggaggacttcgggaacgcctggaagctgcacggggactgccaggacctgcagaagcagcacagcgatccctgcgccctcaacccgcgcatgaccaggttctccgaggaggcgtgcgcggtcctgacgtcccccacattcgaggcctgccatcgtgccgtcagcccgctgccctacctgcggaactgccgctacgacgtgtgctcctgctcggacggccgcgagtgcctgtgcggcgccctggccagctatgccgcggcctgcgcggggagaggcgtgcgcgtcgcgtggcgcgagccaggccgctgtgagctgaactgcccgaaaggccaggtgtacctgcagtgcgggaccccctgcaacctgacctgccgctctctctcttacccggatgaggaatgcaatgaggcctgcctggagggctgcttctgccccccagggctctacatggatgagaggggggactgcgtgcccaaggcccagtgcccctgttactatgacggtgagatcttccagccagaagacatcttctcagaccatcacaccatgtgctactgtgaggatggcttcatgcactgtaccatgagtggagtccccggaagcttgctgcctgacgctgtcctcagcagtcccctgtctcatcgcagcaaaaggagcctatcctgtcggccccccatggtcaagctggtgtgtcccgctgacaacctgcgggctgaagggctcgagtgtaccaaaacgtgccagaactatgacctggagtgcatgagcatgggctgtgtctctggctgcctctgccccccgggcatggtccggcatgagaacagatgtgtggccctggaaaggtgtccctgcttccatcagggcaaggagtatgcccctggagaaacagtgaagattggctgcaacacttgtgtctgtcgggaccggaagtggaactgcacagaccatgtgtgtgatgccacgtgctccacgatcggcatggcccactacctcaccttcgacgggctcaaatacctgttccccggggagtgccagtacgttctggtgcaggattactgcggcagtaaccctgggacctttcggatcctagtggggaataagggatgcagccacccctcagtgaaatgcaagaaacgggtcaccatcctggtggagggaggagagattgagctgtttgacggggaggtgaatgtgaagaggcccatgaaggatgagactcactttgaggtggtggagtctggccggtacatcattctgctgctgggcaaagccctctccgtggtctgggaccgccacctgagcatctccgtggtcctgaagcagacataccaggagaaagtgtgtggcctgtgtgggaattttgatggcatccagaacaatgacctcaccagcagcaacctccaagtggaggaagaccctgtggactttgggaactcctggaaagtgagctcgcagtgtgctgacaccagaaaagtgcctctggactcatcccctgccacctgccataacaacatcatgaagcagacgatggtggattcctcctgtagaatccttaccagtgacgtcttccaggactgcaacaagctggtggaccccgagccatatctggatgtctgcatttacgacacctgctcctgtgagtccattggggactgcgcctgcttctgcgacaccattgctgcctatgcccacgtgtgtgcccagcatggcaaggtggtgacctggaggacggccacattgtgcccccagagctgcgaggagaggaatctccgggagaacgggtatgagtgtgagtggcgctataacagctgtgcacctgcctgtcaagtcacgtgtcagcaccctgagccactggcctgccctgtgcagtgtgtggagggctgccatgcccactgccctccagggaaaatcctggatgagcttttgcagacctgcgttgaccctgaagactgtccagtgtgtgaggtggctggccggcgttttgcctcaggaaagaaagtcaccttgaatcccagtgaccctgagcactgccagatttgccactgtgatgttgtcaacctcacctgtgaagcctgccaggagccgggaggcctggtggtgcctcccacagatgccccggtgagccccaccactctgtatgtggaggacatctcggaaccgccgttgcacgatttctactgcagcaggctactggacctggtcttcctgctggatggctcctccaggctgtccgaggctgagtttgaagtgctgaaggcctttgtggtggacatgatggagcggctgcgcatctcccagaagtgggtccgcgtggccgtggtggagtaccacgacggctcccacgcctacatcgggctcaaggaccggaagcgaccgtcagagctgcggcgcattgccagccaggtgaagtatgcgggcagccaggtggcctccaccagcgaggtcttgaaatacacactgttccaaatcttcagcaagatcgaccgccctgaagcctcccgcatcgccctgctcctgatggccagccaggagccccaacggatgtcccggaactttgtccgctacgtccagggcctgaagaagaagaaggtcattgtgatcccggtgggcattgggccccatgccaacctcaagcagatccgcctcatcgagaagcaggcccctgagaacaaggccttcgtgctgagcagtgtggatgagctggagcagcaaagggacgagatcgttagctacctctgtgaccttgcccctgaagcccctcctcctactctgccccccgacatggcacaagtcactgtgggcccggggctcttgggggtttcgaccctggggcccaagaggaactccatggttctggatgtggcgttcgtcctggaaggatcggacaaaattggtgaagccgacttcaacaggagcaaggagttcatggaggaggtgattcagcggatggatgtgggccaggacagcatccacgtcacggtgctgcagtactcctacatggtgaccgtggagtaccccttcagcgaggcacagtccaaaggggacatcctgcagcgggtgcgagagatccgctaccagggcggcaacaggaccaacactgggctggccctgcggtacctctctgaccacagcttcttggtcagccagggtgaccgggagcaggcgcccaacctggtctacatggtcaccggaaatcctgcctctgatgagatcaagaggctgcctggagacatccaggtggtgcccattggagtgggccctaatgccaacgtgcaggagctggagaggattggctggcccaatgcccctatcctcatccaggactttgagacgctcccccgagaggctcctgacctggtgctgcagaggtgctgctccggagaggggctgcagatccccaccctctcccctgcacctgactgcagccagcccctggacgtgatccttctcctggatggctcctccagtttcccagcttcttattttgatgaaatgaagagtttcgccaaggctttcatttcaaaagccaatatagggcctcgtctcactcaggtgtcagtgctgcagtatggaagcatcaccaccattgacgtgccatggaacgtggtcccggagaaagcccatttgctgagccttgtggacgtcatgcagcgggagggaggccccagccaaatcggggatgccttgggctttgctgtgcgatacttgacttcagaaatgcatggtgccaggccgggagcctcaaaggcggtggtcatcctggtcacggacgtctctgtggattcagtggatgcagcagctgatgccgccaggtccaacagagtgacagtgttccctattggaattggagatcgctacgatgcagcccagctacggatcttggcaggcccagcaggcgactccaacgtggtgaagctccagcgaatcgaagacctccctaccatggtcaccttgggcaattccttcctccacaaactgtgctctggatttgttaggatttgcatggatgaggatgggaatgagaagaggcccggggacgtctggaccttgccagaccagtgccacaccgtgacttgccagccagatggccagaccttgctgaagagtcatcgggtcaactgtgaccgggggctgaggccttcgtgccctaacagccagtcccctgttaaagtggaagagacctgtggctgccgctggacctgcccctgtgtgtgcacaggcagctccactcggcacatcgtgacctttgatgggcagaatttcaagctgactggcagctgttcttatgtcctatttcaaaacaaggagcaggacctggaggtgattctccataatggtgcctgcagccctggagcaaggcagggctgcatgaaatccatcgaggtgaagcacagtgccctctccgtcgagctgcacagtgacatggaggtgacggtgaatgggagactggtctctgttccttacgtgggtgggaacatggaagtcaacgtttatggtgccatcatgcatgaggtcagattcaatcaccttggtcacatcttcacattcactccacaaaacaatgagttccaactgcagctcagccccaagacttttgcttcaaagacgtatggtctgtgtgggatctgtgatgagaacggagccaatgacttcatgctgagggatggcacagtcaccacagactggaaaacacttgttcaggaatggactgtgcagcggccagggcagacgtgccagcccatcctggaggagcagtgtcttgtccccgacagctcccactgccaggtcctcctcttaccactgtttgctgaatgccacaaggtcctggctccagccacattctatgccatctgccagcaggacagttgccaccaggagcaagtgtgtgaggtgatcgcctcttatgcccacctctgtcggaccaacggggtctgcgttgactggaggacacctgatttctgtgctatgtcatgcccaccatctctggtctacaaccactgtgagcatggctgtccccggcactgtgatggcaacgtgagctcctgtggggaccatccctccgaaggctgtttctgccctccagataaagtcatgttggaaggcagctgtgtccctgaagaggcctgcactcagtgcattggtgaggatggagtccagcaccagttcctggaagcctgggtcccggaccaccagccctgtcagatctgcacatgcctcagcgggcggaaggtcaactgcacaacgcagccctgccccacggccaaagctcccacgtgtggcctgtgtgaagtagcccgcctccgccagaatgcagaccagtgctgccccgagtatgagtgtgtgtgtgacccagtgagctgtgacctgcccccagtgcctcacttgcccttcttgtctctgcccanacattcacggcatggngtaactcccacctccggaaggcggggacacagatcgagaacatcgaagaggacttccgggatggcntgaagctcatgctgctgctggaggtcatctcaggtgaggcggaacctggcccaggacgagatactgtctattggtgctgcctgacaccttggcatctgctctgcctatgagcgcagctggttttggtctcttgaaacaagttggggatgacatgtatgaattcatcctaggagcgtgggtctgagttttggttctgctgccagccatccaggtgccttggacatc

SEQ ID NO: 438982 - DNA, 3945 bp, Homo sapiens
gcagctcacagctattgtggtgggaaagggagggtggttggtggatgtcacagcttgggctttatctcccccagcagtggggactccacagcccctgggctacataacagcaagacagtccggagctgtagcagacctgattgagcctttgcagcagctgagagcatggcctagggtgggcggcaccattgtccagcagctgagtttcccagggaccttggagatagccgcagccctcatttgcaggggaagatgattcctgccagatttgccggggtgctgcttgctctggccctcattttgccagggaccctttgtgcagaaggaactcgcggcaggtcatccacggcccgatgcagccttttcggaagtgacttcgtcaacacctttgatgggagcatgtacagctttgcgggatactgcagttacctcctggcagggggctgccagaaacgctccttctcgattattggggacttccagaatggcaagagagtgagcctctccgtgtatcttggggaattttttgacatccatttgtttgtcaatggtaccgtgacacagggggaccaaagagtctccatgccctatgcctccaaagggctgtatctagaaactgaggctgggtactacaagctgtccggtgaggcctatggctttgtggccaggatcgatggcagcggcaactttcaagtcctgctgtcagacagatacttcaacaagacctgcgggctgtgtggcaactttaacatctttgctgaagatgactttatgacccaagaagggaccttgacctcggacccttatgactttgccaactcatgggctctgagcagtggagaacagtggtgtgaacgggcatctcctcccagcagctcatgcaacatctcctctggggaaatgcagaagggcctgtgggagcagtgccagcttctgaagagcacctcggtgtttgcccgctgccaccctctggtggaccccgagccttttgtggccctgtgtgagaagactttgtgtgagtgtgctggggggctggagtgcgcctgccctgccctcctggagtacgcccggacctgtgcccaggagggaatggtgctgtacggctggaccgaccacagcgcgtgcagcccagtgtgccctgctggtatggagtataggcagtgtgtgtccccttgcgccaggacctgccagagcctgcacatcaaagaaatgtgtcaggagcgatgcgtggatggctgcagctgccctgagggacagctcctggatgaaggcctctgcgtggagagcaccgagtgtccctgcgtgcattccggaaagcgctaccctcccggcacctccctctctcgagactgcaacacctgcatttgccgaaacagccagtggatctgcagcaatgaagaatgtccaggggagtgccttgtcacaggtcaatcacacttcaagagctttgacaacagatacttcaccttcagtgggatctgccagtacctgctggcccgggattgccaggaccactccttctccattgtcattgagactgtccagtgtgctgatgaccgcgacgctgtgtgcacccgctccgtcaccgtccggctgcctggcctgcacaacagccttgtgaaactgaagcatggggcaggagttgccatggatggccaggacgtccagctccccctcctgaaaggtgacctccgcatccagcatacagtgacggcctccgtgcgcctcagctacggggaggacctgcagatggactgggatggccgcgggaggctgctggtgaagctgtcccccgtctatgccgggaagacctgcggcctgtgtgggaattacaatggcaaccagggcgacgacttccttaccccctctgggctggcggagccccgggtggaggacttcgggaacgcctggaagctgcacggggactgccaggacctgcagaagcagcacagcgatccctgcgccctcaacccgcgcatgaccaggttctccgaggaggcgtgcgcggtcctgacgtcccccacattcgaggcctgccatcgtgccgtcagcccgctgccctacctgcggaactgccgctacgacgtgtgctcctgctcggacggccgcgagtgcctgtgcggcgccctggccagctatgccgcggcctgcgcggggagaggcgtgcgcgtcgcgtggcgcgagccaggccgctgtgagctgaactgcccgaaaggccaggtgtacctgcagtgcgggaccccctgcaacctgacctgccgctctctctcttacccggatgaggaatgcaatgaggcctgcctggagggctgcttctgccccccagggctctacatggatgagaggggggactgcgtgcccaaggcccagtgcccctgttactatgacggtgagatcttccagccagaagacatcttctcagaccatcacaccatgtgctactgtgaggatggcttcatgcactgtaccatgagtggagtccccggaagcttgctgcctgacgctgtcctcagcagtcccctgtctcatcgcagcaaaaggagcctatcctgtcggccccccatggtcaagctggtgtgtcccgctgacaacctgcgggctgaagggctcgagtgtaccaaaacgtgccagaactatgacctggagtgcatgagcatgggctgtgtctctggctgcctctgccccccgggcatggtccggcatgagaacagatgtgtggccctggaaaggtgtccctgcttccatcagggcaaggagtatgcccctggagaaacagtgaagattggctgcaacacttgtgtctgtcgggaccggaagtggaactgcacagaccatgtgtgtgatgccacgtgctccacgatcggcatggcccactacctcaccttcgacgggctcaaatacctgttccccggggagtgccagtacgttctggtgcaggattactgcggcagtaaccctgggacctttcggatcctagtggggaataagggatgcagccacccctcagtgaaatgcaagaaacgggtcaccatcctggtggagggaggagagattgagctgtttgacggggaggtgaatgtgaagaggcccatgaaggatgagactcactttgaggtggtggagtctggccggtacatcattctgctgctgggcaaagccctctccgtggtctgggaccgccacctgagcatctccgtggtcctgaagcagacataccaggagaaagtgtgtggcctgtgtgggaattttgatggcatccagaacaatgacctcaccagcagcaacctccaagtggaggaagaccctgtggactttgggaactcctggaaagtgagctcgcagtgtgctgacaccagaaaagtgcctctggactcatcccctgccacctgccataacaacatcatgaagcagacgatggtggattcctcctgtagaatccttaccagtgacgtcttccaggactgcaacaagctggtgaggaccttgagggtagtgggaagcagacggtcccaaggcttggcctggtggtatggacacagagtgtgaccttctaacgtggacactaccctcgtgtcttgacatgatctgcaccaagacaccacttcggctttttttcttggctttcaatctgggaaacaaaaagtaaaatcaacagtttctaggggaagcaatgcctggcaaaacatttccttctgcatgagaagtaactccccttggcatgtgccaatgcttctctttcagccccagtcttaggatttgttctcttattgaagtatcttgttttcaacaccagagccagagatttccttttcctgtcactgctgcatttgtccagaccaaaagaccttcctctcccaccccctaaaaccccttggtgcccatttcttgtctcacagaaattcttttctggccttaattttggtgattttgagtcctcgtattatg

SEQ ID NO: 438983 - DNA, 760 bp, Homo sapiens
  misc_feature (37)..(37): n is a, c, g, or t
tgacactaagaaaagtttgtaaaaaaagaggtggtanggtcggaattcccgggatgacctttgcagcagctgagagcatggcctagggtgggcggcaccattgtccagcagctgagtttcccagggaccttggagatagccgcagccctcatttgcaggggaagatgattcctgccagatttgccggggtgctgcttgctctggccctcattttgccaggtaggtacaaaagggcctccatttctcattcctgccccagggccatctggagtgacacctttccgggaatcagcaggtgtgtctggagctcacctgtgtgcccagccctaacttaggctgttggttgcctcctgtgaaggttctgcggagttcccacccttgacttgtattccagagaccaggtgcctgcaaatgccatctcctgttggggaattaagaagcataaaggtggcacagaactgtcctatattatgggggcacaggatgaggaggaaggaatccaagacttggatggattattagttttcgataagattgtggaggtcaccttgttgaacctcccatggtacaatgaagagactgagggtcagagaggagaaatgactgctccaaagtctcctagagccaaaatcagaggtcagtcttcctgggttccaggccaacaccctttccactgcactgcatcatactgctgcccttcccttgctaagattctgggtctgcaaatggcgggaggggacttttgaccttgggcgctttc

SEQ ID NO: 438984 - DNA, 378 bp, Homo sapiens
tcacagctacaaggggtggcaagtcctagaaccacagtccttgctgtccaacattcccgctgaggccttacttcttctcctctctcttctagagctgaactgcccgaaaggccaggtgtacctgcagtgcgggaccccctgcaacctgacctgccgctctctctcttacccggatgaggaatgcaatgaggcctgcctggagggctgcttctgccccccagggctctacatggatgagaggggggactgcgtgcccaaggcccagtgcccctgttactatgacggtgagatcttccagccagaagacatcttctcagaccatcacaccatgtggtaagtgcaggcagcaagtgtcagggacctctaaaaacagcagag

SEQ ID NO: 438985 - DNA, 250 bp, Homo sapiens
ggaccttgacctcggacccttatgactttgccaactcatgggctctgagcagtggagaacagtggtgtgaacgggcatctcctcccagcagctcatgcaacatctcctctggggaaatgcagaaggtgggtgtggactggcctgggtgcacctggatggtgtgtgatttctggatctaaaagacagaaggactcagtctcatatccttccatctgggggaggaatggacttacgcagggccatttcctcc

SEQ ID NO: 438986 - DNA, 379 bp, Homo sapiens
gctgtggcatggctggtgagatgatgcaccggtgggacctgccctgggtagacccctttgatgttccttttcaggcccagtgtgccctgctggtatggagtataggcagtgtgtgtccccttgcgccaggacctgccagagcctgcacatcaaagaaatgtgtcaggagcgatgcgtggatggctgcagctgccctggtaatgaacttcccactttatttacagatcagagaccttgccagcacccttggctttgggaagtgagatgaaggccacttgtgtttgctccccgttgctgaaatcagaagccttttattaagtttttaaatgtctttgtccagcgtgatcaggattgagctggtctttatttttaatgtacg

SEQ ID NO: 438987 - DNA, 659 bp, Homo sapiens
ttccctctttgagaccattgagctacatttctccttctacctggacccccttatccttaaattgaccatcagaacatttgcacccagactaagagccagagttcctgacacctggccataggcctgggccacctgaggctgcctttgcaggtggaccccgagccatatctggatgtctgcatttacgacacctgctcctgtgagtccattggggactgcgcctgcttctgcgacaccattgctgcctatgcccacgtgtgtgcccagcatggcaaggtggtgacctggaggacggccacattgtgccgtgagtactgacgccctcatgttctcagatgccctcccttcttcccatgtgtctatgcttgaagaccttgtgagtgcagggggatatcttcatgggcgagagaagacagagtgttagtagggactggatggccaagggctaaggagggttaagacattggctgtgtaagaagtttatattacgggtgaggtgggacatggattcaaggcatgaacatgtggagacttttcttctggagagattctggcaggggagaagagggaatactgatgaaaagaaggaagtcgatttatgtctttaattaggcgtgattatatttgccaatatgagtgatcaactcatacattcatgt

SEQ ID NO: 438988 - DNA, 8928 bp, Homo sapiens
gcagctcacagctattgtggtgggaaagggagggtggttggtggatgtcacagcttgggctttatctcccccagcagtggggactccacagcccctgggctacataacagcaagacagtccggagctgtagcagacctgattgagcctttgcagcagctgagagcatggcctagggtgggcggcaccattgtccagcagctgagtttcccagggaccttggagatagccgcagccctcatttgcaggggaagcaccattgtccagcagctgagtttcccagggaccttggagatagccgcagccctcatttatgattcctgccagatttgccggggtgctgcttgctctggccctcattttgccagggaccctttgtgcagaaggaactcgcggcaggtcatccacggcccgatgcagccttttcggaagtgacttcgtcaacacctttgatgggagcatgtacagctttgcgggatactgcagttacctcctggcagggggctgccagaaacgctccttctcgattattggggacttccagaatggcaagagagtgagcctctccgtgtatcttggggaattttttgacatccatttgtttgtcaatggtaccgtgacacagggggaccaaagagtctccatgccctatgcctccaaagggctgtatctagaaactgaggctgggtactacaagctgtccggtgaggcctatggctttgtggccaggatcgatggcagcggcaactttcaagtcctgctgtcagacagatacttcaacaagacctgcgggctgtgtggcaactttaacatctttgctgaagatgactttatgacccaagaagggaccttgacctcggacccttatgactttgccaactcatgggctctgagcagtggagaacagtggtgtgaacgggcatctcctcccagcagctcatgcaacatctcctctggggaaatgcagaagggcctgtgggagcagtgccagcttctgaagagcacctcggtgtttgcccgctgccaccctctggtggaccccgagccttttgtggccctgtgtgagaagactttgtgtgagtgtgctggggggctggagtgcgcctgccctgccctcctggagtacgcccggacctgtgcccaggagggaatggtgctgtacggctggaccgaccacagcgcgtgcagcccagtgtgccctgctggtatggagtataggcagtgtgtgtccccttgcgccaggacctgccagagcctgcacatcaaagaaatgtgtcaggagcgatgcgtggatggctgcagctgccctgagggacagctcctggatgaaggcctctgcgtggagagcaccgagtgtccctgcgtgcattccggaaagcgctaccctcccggcacctccctctctcgagactgcaacacctgcatttgccgaaacagccagtggatctgcagcaatgaagaatgtccaggggagtgccttgtcacaggtcaatcacacttcaagagctttgacaacagatacttcaccttcagtgggatctgccagtacctgctggcccgggattgccaggaccactccttctccattgtcattgagactgtccagtgtgctgatgaccgcgacgctgtgtgcacccgctccgtcaccgtccggctgcctggcctgcacaacagccttgtgaaactgaagcatggggcaggagttgccatggatggccaggacgtccagctccccctcctgaaaggtgacctccgcatccagcatacagtgacggcctccgtgcgcctcagctacggggaggacctgcagatggactgggatggccgcgggaggctgctggtgaagctgtcccccgtctatgccgggaagacctgcggcctgtgtgggaattacaatggcaaccagggcgacgacttccttaccccctctgggctggcggagccccgggtggaggacttcgggaacgcctggaagctgcacggggactgccaggacctgcagaagcagcacagcgatccctgcgccctcaacccgcgcatgaccaggttctccgaggaggcgtgcgcggtcctgacgtcccccacattcgaggcctgccatcgtgccgtcagcccgctgccctacctgcggaactgccgctacgacgtgtgctcctgctcggacggccgcgagtgcctgtgcggcgccctggccagctatgccgcggcctgcgcggggagaggcgtgcgcgtcgcgtggcgcgagccaggccgctgtgagctgaactgcccgaaaggccaggtgtacctgcagtgcgggaccccctgcaacctgacctgccgctctctctcttacccggatgaggaatgcaatgaggcctgcctggagggctgcttctgccccccagggctctacatggatgagaggggggactgcgtgcccaaggcccagtgcccctgttactatgacggtgagatcttccagccagaagacatcttctcagaccatcacaccatgtgctactgtgaggatggcttcatgcactgtaccatgagtggagtccccggaagcttgctgcctgacgctgtcctcagcagtcccctgtctcatcgcagcaaaaggagcctatcctgtcggccccccatggtcaagctggtgtgtcccgctgacaacctgcgggctgaagggctcgagtgtaccaaaacgtgccagaactatgacctggagtgcatgagcatgggctgtgtctctggctgcctctgccccccgggcatggtccggcatgagaacagatgtgtggccctggaaaggtgtccctgcttccatcagggcaaggagtatgcccctggagaaacagtgaagattggctgcaacacttgtgtctgtcgggaccggaagtggaactgcacagaccatgtgtgtgatgccacgtgctccacgatcggcatggcccactacctcaccttcgacgggctcaaatacctgttccccggggagtgccagtacgttctggtgcaggattactgcggcagtaaccctgggacctttcggatcctagtggggaataagggatgcagccacccctcagtgaaatgcaagaaacgggtcaccatcctggtggagggaggagagattgagctgtttgacggggaggtgaatgtgaagaggcccatgaaggatgagactcactttgaggtggtggagtctggccggtacatcattctgctgctgggcaaagccctctccgtggtctgggaccgccacctgagcatctccgtggtcctgaagcagacataccaggagaaagtgtgtggcctgtgtgggaattttgatggcatccagaacaatgacctcaccagcagcaacctccaagtggaggaagaccctgtggactttgggaactcctggaaagtgagctcgcagtgtgctgacaccagaaaagtgcctctggactcatcccctgccacctgccataacaacatcatgaagcagacgatggtggattcctcctgtagaatccttaccagtgacgtcttccaggactgcaacaagctggtggaccccgagccatatctggatgtctgcatttacgacacctgctcctgtgagtccattggggactgcgcctgcttctgcgacaccattgctgcctatgcccacgtgtgtgcccagcatggcaaggtggtgacctggaggacggccacattgtgcccccagagctgcgaggagaggaatctccgggagaacgggtatgagtgtgagtggcgctataacagctgtgcacctgcctgtcaagtcacgtgtcagcaccctgagccactggcctgccctgtgcagtgtgtggagggctgccatgcccactgccctccagggaaaatcctggatgagcttttgcagacctgcgttgaccctgaagactgtccagtgtgtgaggtggctggccggcgttttgcctcaggaaagaaagtcaccttgaatcccagtgaccctgagcactgccagatttgccactgtgatgttgtcaacctcacctgtgaagcctgccaggagccgggaggcctggtggtgcctcccacagatgccccggtgagccccaccactctgtatgtggaggacatctcggaaccgccgttgcacgatttctactgcagcaggctactggacctggtcttcctgctggatggctcctccaggctgtccgaggctgagtttgaagtgctgaaggcctttgtggtggacatgatggagcggctgcgcatctcccagaagtgggtccgcgtggccgtggtggagtaccacgacggctcccacgcctacatcgggctcaaggaccggaagcgaccgtcagagctgcggcgcattgccagccaggtgaagtatgcgggcagccaggtggcctccaccagcgaggtcttgaaatacacactgttccaaatcttcagcaagatcgaccgccctgaagcctcccgcatcgccctgctcctgatggccagccaggagccccaacggatgtcccggaactttgtccgctacgtccagggcctgaagaagaagaaggtcattgtgatcccggtgggcattgggccccatgccaacctcaagcagatccgcctcatcgagaagcaggcccctgagaacaaggccttcgtgctgagcagtgtggatgagctggagcagcaaagggacgagatcgttagctacctctgtgaccttgcccctgaagcccctcctcctactctgccccccgacatggcacaagtcactgtgggcccggggctcttgggggtttcgaccctggggcccaagaggaactccatggttctggatgtggcgttcgtcctggaaggatcggacaaaattggtgaagccgacttcaacaggagcaaggagttcatggaggaggtgattcagcggatggatgtgggccaggacagcatccacgtcacggtgctgcagtactcctacatggtgaccgtggagtaccccttcagcgaggcacagtccaaaggggacatcctgcagcgggtgcgagagatccgctaccagggcggcaacaggaccaacactgggctggccctgcggtacctctctgaccacagcttcttggtcagccagggtgaccgggagcaggcgcccaacctggtctacatggtcaccggaaatcctgcctctgatgagatcaagaggctgcctggagacatccaggtggtgcccattggagtgggccctaatgccaacgtgcaggagctggagaggattggctggcccaatgcccctatcctcatccaggactttgagacgctcccccgagaggctcctgacctggtgctgcagaggtgctgctccggagaggggctgcagatccccaccctctcccctgcacctgactgcagccagcccctggacgtgatccttctcctggatggctcctccagtttcccagcttcttattttgatgaaatgaagagtttcgccaaggctttcatttcaaaagccaatatagggcctcgtctcactcaggtgtcagtgctgcagtatggaagcatcaccaccattgacgtgccatggaacgtggtcccggagaaagcccatttgctgagccttgtggacgtcatgcagcgggagggaggccccagccaaatcggggatgccttgggctttgctgtgcgatacttgacttcagaaatgcatggtgccaggccgggagcctcaaaggcggtggtcatcctggtcacggacgtctctgtggattcagtggatgcagcagctgatgccgccaggtccaacagagtgacagtgttccctattggaattggagatcgctacgatgcagcccagctacggatcttggcaggcccagcaggcgactccaacgtggtgaagctccagcgaatcgaagacctccctaccatggtcaccttgggcaattccttcctccacaaactgtgctctggatttgttaggatttgcatggatgaggatgggaatgagaagaggcccggggacgtctggaccttgccagaccagtgccacaccgtgacttgccagccagatggccagaccttgctgaagagtcatcgggtcaactgtgaccgggggctgaggccttcgtgccctaacagccagtcccctgttaaagtggaagagacctgtggctgccgctggacctgcccctgtgtgtgcacaggcagctccactcggcacatcgtgacctttgatgggcagaatttcaagctgactggcagctgttcttatgtcctatttcaaaacaaggagcaggacctggaggtgattctccataatggtgcctgcagccctggagcaaggcagggctgcatgaaatccatcgaggtgaagcacagtgccctctccgtcgagctgcacagtgacatggaggtgacggtgaatgggagactggtctctgttccttacgtgggtgggaacatggaagtcaacgtttatggtgccatcatgcatgaggtcagattcaatcaccttggtcacatcttcacattcactccacaaaacaatgagttccaactgcagctcagccccaagacttttgcttcaaagacgtatggtctgtgtgggatctgtgatgagaacggagccaatgacttcatgctgagggatggcacagtcaccacagactggaaaacacttgttcaggaatggactgtgcagcggccagggcagacgtgccagcccatcctggaggagcagtgtcttgtccccgacagctcccactgccaggtcctcctcttaccactgtttgctgaatgccacaaggtcctggctccagccacattctatgccatctgccagcaggacagttgccaccaggagcaagtgtgtgaggtgatcgcctcttatgcccacctctgtcggaccaacggggtctgcgttgactggaggacacctgatttctgtgctatgtcatgcccaccatctctggtctacaaccactgtgagcatggctgtccccggcactgtgatggcaacgtgagctcctgtggggaccatccctccgaaggctgtttctgccctccagataaagtcatgttggaaggcagctgtgtccctgaagaggcctgcactcagtgcattggtgaggatggagtccagcaccagttcctggaagcctgggtcccggaccaccagccctgtcagatctgcacatgcctcagcgggcggaaggtcaactgcacaacgcagccctgccccacggccaaagctcccacgtgtggcctgtgtgaagtagcccgcctccgccagaatgcagaccagtgctgccccgagtatgagtgtgtgtgtgacccagtgagctgtgacctgcccccagtgcctcactgtgaacgtggcctccagcccacactgaccaaccctggcgagtgcagacccaacttcacctgcgcctgcaggaaggaggagtgcaaaagagtgtccccaccctcctgccccccgcaccgtttgcccacccttcggaagacccagtgctgtgatgagtatgagtgtgcctgcaactgtgtcaactccacagtgagctgtccccttgggtacttggcctcaaccgccaccaatgactgtggctgtaccacaaccacctgccttcccgacaaggtgtgtgtccaccgaagcaccatctaccctgtgggccagttctgggaggagggctgcgatgtgtgcacctgcaccgacatggaggatgccgtgatgggcctccgcgtggcccagtgctcccagaagccctgtgaggacagctgtcggtcgggcttcacttacgttctgcatgaaggcgagtgctgtggaaggtgcctgccatctgcctgtgaggtggtgactggctcaccgcggggggactcccagtcttcctggaagagtgtcggctcccagtgggcctccccggagaacccctgcctcatcaatgagtgtgtccgagtgaaggaggaggtctttatacaacaaaggaacgtctcctgcccccagctggaggtccctgtctgcccctcgggctttcagctgagctgtaagacctcagcgtgctgcccaagctgtcgctgtgagcgcatggaggcctgcatgctcaatggcactgtcattgggcccgggaagactgtgatgatcgatgtgtgcacgacctgccgctgcatggtgcaggtgggggtcatctctggattcaagctggagtgcaggaagaccacctgcaacccctgccccctgggttacaaggaagaaaataacacaggtgaatgttgtgggagatgtttgcctacggcttgcaccattcagctaagaggaggacagatcatgacactgaagcgtgatgagacgctccaggatggctgtgatactcacttctgcaaggtcaatgagagaggagagtacttctgggagaagagggtcacaggctgcccaccctttgatgaacacaagtgtctggctgagggaggtaaaattatgaaaattccaggcacctgctgtgacacatgtgaggagcctgagtgcaacgacatcactgccaggctgcagtatgtcaaggtgggaagctgtaagtctgaagtagaggtggatatccactactgccagggcaaatgtgccagcaaagccatgtactccattgacatcaacgatgtgcaggaccagtgctcctgctgctctccgacacggacggagcccatgcaggtggccctgcactgcaccaatggctctgttgtgtaccatgaggttctcaatgccatggagtgcaaatgctcccccaggaagtgcagcaagtgaggctgctgcagctgcatgggtgcctgctgctgcctgccttggcctgatggccaggccagagtgctgccagtcctctgcatgttctgctcttgtgcccttctgagcccacaataaaggctgagctcttatcttgcaaaatgcatgttctgctcttgtgcccttctgagcccacaat

SEQ ID NO: 438989 - DNA, 8744 bp, Homo sapiens
  misc_feature (37)..(37): n is a, c, g, or t
tgacactaagaaaagtttgtaaaaaaagaggtggtanggtcggaattcccgggatgacctttgcagcagctgagagcatggcctagggtgggcggcaccattgtccagcagctgagtttcccagggaccttggagatagccgcagccctcatttgcaggggaagatgattcctgccagatttgccggggtgctgcttgctctggccctcattttgccagggaccctttgtgcagaaggaactcgcggcaggtcatccacggcccgatgcagccttttcggaagtgacttcgtcaacacctttgatgggagcatgtacagctttgcgggatactgcagttacctcctggcagggggctgccagaaacgctccttctcgattattggggacttccagaatggcaagagagtgagcctctccgtgtatcttggggaattttttgacatccatttgtttgtcaatggtaccgtgacacagggggaccaaagagtctccatgccctatgcctccaaagggctgtatctagaaactgaggctgggtactacaagctgtccggtgaggcctatggctttgtggccaggatcgatggcagcggcaactttcaagtcctgctgtcagacagatacttcaacaagacctgcgggctgtgtggcaactttaacatctttgctgaagatgactttatgacccaagaagggaccttgacctcggacccttatgactttgccaactcatgggctctgagcagtggagaacagtggtgtgaacgggcatctcctcccagcagctcatgcaacatctcctctggggaaatgcagaagggcctgtgggagcagtgccagcttctgaagagcacctcggtgtttgcccgctgccaccctctggtggaccccgagccttttgtggccctgtgtgagaagactttgtgtgagtgtgctggggggctggagtgcgcctgccctgccctcctggagtacgcccggacctgtgcccaggagggaatggtgctgtacggctggaccgaccacagcgcgtgcagcccagtgtgccctgctggtatggagtataggcagtgtgtgtccccttgcgccaggacctgccagagcctgcacatcaaagaaatgtgtcaggagcgatgcgtggatggctgcagctgccctgagggacagctcctggatgaaggcctctgcgtggagagcaccgagtgtccctgcgtgcattccggaaagcgctaccctcccggcacctccctctctcgagactgcaacacctgcatttgccgaaacagccagtggatctgcagcaatgaagaatgtccaggggagtgccttgtcacaggtcaatcacacttcaagagctttgacaacagatacttcaccttcagtgggatctgccagtacctgctggcccgggattgccaggaccactccttctccattgtcattgagactgtccagtgtgctgatgaccgcgacgctgtgtgcacccgctccgtcaccgtccggctgcctggcctgcacaacagccttgtgaaactgaagcatggggcaggagttgccatggatggccaggacgtccagctccccctcctgaaaggtgacctccgcatccagcatacagtgacggcctccgtgcgcctcagctacggggaggacctgcagatggactgggatggccgcgggaggctgctggtgaagctgtcccccgtctatgccgggaagacctgcggcctgtgtgggaattacaatggcaaccagggcgacgacttccttaccccctctgggctggcggagccccgggtggaggacttcgggaacgcctggaagctgcacggggactgccaggacctgcagaagcagcacagcgatccctgcgccctcaacccgcgcatgaccaggttctccgaggaggcgtgcgcggtcctgacgtcccccacattcgaggcctgccatcgtgccgtcagcccgctgccctacctgcggaactgccgctacgacgtgtgctcctgctcggacggccgcgagtgcctgtgcggcgccctggccagctatgccgcggcctgcgcggggagaggcgtgcgcgtcgcgtggcgcgagccaggccgctgtgagctgaactgcccgaaaggccaggtgtacctgcagtgcgggaccccctgcaacctgacctgccgctctctctcttacccggatgaggaatgcaatgaggcctgcctggagggctgcttctgccccccagggctctacatggatgagaggggggactgcgtgcccaaggcccagtgcccctgttactatgacggtgagatcttccagccagaagacatcttctcagaccatcacaccatgtgctactgtgaggatggcttcatgcactgtaccatgagtggagtccccggaagcttgctgcctgacgctgtcctcagcagtcccctgtctcatcgcagcaaaaggagcctatcctgtcggccccccatggtcaagctggtgtgtcccgctgacaacctgcgggctgaagggctcgagtgtaccaaaacgtgccagaactatgacctggagtgcatgagcatgggctgtgtctctggctgcctctgccccccgggcatggtccggcatgagaacagatgtgtggccctggaaaggtgtccctgcttccatcagggcaaggagtatgcccctggagaaacagtgaagattggctgcaacacttgtgtctgtcgggaccggaagtggaactgcacagaccatgtgtgtgatgccacgtgctccacgatcggcatggcccactacctcaccttcgacgggctcaaatacctgttccccggggagtgccagtacgttctggtgcaggattactgcggcagtaaccctgggacctttcggatcctagtggggaataagggatgcagccacccctcagtgaaatgcaagaaacgggtcaccatcctggtggagggaggagagattgagctgtttgacggggaggtgaatgtgaagaggcccatgaaggatgagactcactttgaggtggtggagtctggccggtacatcattctgctgctgggcaaagccctctccgtggtctgggaccgccacctgagcatctccgtggtcctgaagcagacataccaggagaaagtgtgtggcctgtgtgggaattttgatggcatccagaacaatgacctcaccagcagcaacctccaagtggaggaagaccctgtggactttgggaactcctggaaagtgagctcgcagtgtgctgacaccagaaaagtgcctctggactcatcccctgccacctgccataacaacatcatgaagcagacgatggtggattcctcctgtagaatccttaccagtgacgtcttccaggactgcaacaagctggtggaccccgagccatatctggatgtctgcatttacgacacctgctcctgtgagtccattggggactgcgcctgcttctgcgacaccattgctgcctatgcccacgtgtgtgcccagcatggcaaggtggtgacctggaggacggccacattgtgcccccagagctgcgaggagaggaatctccgggagaacgggtatgagtgtgagtggcgctataacagctgtgcacctgcctgtcaagtcacgtgtcagcaccctgagccactggcctgccctgtgcagtgtgtggagggctgccatgcccactgccctccagggaaaatcctggatgagcttttgcagacctgcgttgaccctgaagactgtccagtgtgtgaggtggctggccggcgttttgcctcaggaaagaaagtcaccttgaatcccagtgaccctgagcactgccagatttgccactgtgatgttgtcaacctcacctgtgaagcctgccaggagccgggaggcctggtggtgcctcccacagatgccccggtgagccccaccactctgtatgtggaggacatctcggaaccgccgttgcacgatttctactgcagcaggctactggacctggtcttcctgctggatggctcctccaggctgtccgaggctgagtttgaagtgctgaaggcctttgtggtggacatgatggagcggctgcgcatctcccagaagtgggtccgcgtggccgtggtggagtaccacgacggctcccacgcctacatcgggctcaaggaccggaagcgaccgtcagagctgcggcgcattgccagccaggtgaagtatgcgggcagccaggtggcctccaccagcgaggtcttgaaatacacactgttccaaatcttcagcaagatcgaccgccctgaagcctcccgcatcgccctgctcctgatggccagccaggagccccaacggatgtcccggaactttgtccgctacgtccagggcctgaagaagaagaaggtcattgtgatcccggtgggcattgggccccatgccaacctcaagcagatccgcctcatcgagaagcaggcccctgagaacaaggccttcgtgctgagcagtgtggatgagctggagcagcaaagggacgagatcgttagctacctctgtgaccttgcccctgaagcccctcctcctactctgccccccgacatggcacaagtcactgtgggcccggggctcttgggggtttcgaccctggggcccaagaggaactccatggttctggatgtggcgttcgtcctggaaggatcggacaaaattggtgaagccgacttcaacaggagcaaggagttcatggaggaggtgattcagcggatggatgtgggccaggacagcatccacgtcacggtgctgcagtactcctacatggtgaccgtggagtaccccttcagcgaggcacagtccaaaggggacatcctgcagcgggtgcgagagatccgctaccagggcggcaacaggaccaacactgggctggccctgcggtacctctctgaccacagcttcttggtcagccagggtgaccgggagcaggcgcccaacctggtctacatggtcaccggaaatcctgcctctgatgagatcaagaggctgcctggagacatccaggtggtgcccattggagtgggccctaatgccaacgtgcaggagctggagaggattggctggcccaatgcccctatcctcatccaggactttgagacgctcccccgagaggctcctgacctggtgctgcagaggtgctgctccggagaggggctgcagatccccaccctctcccctgcacctgactgcagccagcccctggacgtgatccttctcctggatggctcctccagtttcccagcttcttattttgatgaaatgaagagtttcgccaaggctttcatttcaaaagccaatatagggcctcgtctcactcaggtgtcagtgctgcagtatggaagcatcaccaccattgacgtgccatggaacgtggtcccggagaaagcccatttgctgagccttgtggacgtcatgcagcgggagggaggccccagccaaatcggggatgccttgggctttgctgtgcgatacttgacttcagaaatgcatggtgccaggccgggagcctcaaaggcggtggtcatcctggtcacggacgtctctgtggattcagtggatgcagcagctgatgccgccaggtccaacagagtgacagtgttccctattggaattggagatcgctacgatgcagcccagctacggatcttggcaggcccagcaggcgactccaacgtggtgaagctccagcgaatcgaagacctccctaccatggtcaccttgggcaattccttcctccacaaactgtgctctggatttgttaggatttgcatggatgaggatgggaatgagaagaggcccggggacgtctggaccttgccagaccagtgccacaccgtgacttgccagccagatggccagaccttgctgaagagtcatcgggtcaactgtgaccgggggctgaggccttcgtgccctaacagccagtcccctgttaaagtggaagagacctgtggctgccgctggacctgcccctgtgtgtgcacaggcagctccactcggcacatcgtgacctttgatgggcagaatttcaagctgactggcagctgttcttatgtcctatttcaaaacaaggagcaggacctggaggtgattctccataatggtgcctgcagccctggagcaaggcagggctgcatgaaatccatcgaggtgaagcacagtgccctctccgtcgagctgcacagtgacatggaggtgacggtgaatgggagactggtctctgttccttacgtgggtgggaacatggaagtcaacgtttatggtgccatcatgcatgaggtcagattcaatcaccttggtcacatcttcacattcactccacaaaacaatgagttccaactgcagctcagccccaagacttttgcttcaaagacgtatggtctgtgtgggatctgtgatgagaacggagccaatgacttcatgctgagggatggcacagtcaccacagactggaaaacacttgttcaggaatggactgtgcagcggccagggcagacgtgccagcccatcctggaggagcagtgtcttgtccccgacagctcccactgccaggtcctcctcttaccactgtttgctgaatgccacaaggtcctggctccagccacattctatgccatctgccagcaggacagttgccaccaggagcaagtgtgtgaggtgatcgcctcttatgcccacctctgtcggaccaacggggtctgcgttgactggaggacacctgatttctgtgctatgtcatgcccaccatctctggtctacaaccactgtgagcatggctgtccccggcactgtgatggcaacgtgagctcctgtggggaccatccctccgaaggctgtttctgccctccagataaagtcatgttggaaggcagctgtgtccctgaagaggcctgcactcagtgcattggtgaggatggagtccagcaccagttcctggaagcctgggtcccggaccaccagccctgtcagatctgcacatgcctcagcgggcggaaggtcaactgcacaacgcagccctgccccacggccaaagctcccacgtgtggcctgtgtgaagtagcccgcctccgccagaatgcagaccagtgctgccccgagtatgagtgtgtgtgtgacccagtgagctgtgacctgcccccagtgcctcactgtgaacgtggcctccagcccacactgaccaaccctggcgagtgcagacccaacttcacctgcgcctgcaggaaggaggagtgcaaaagagtgtccccaccctcctgccccccgcaccgtttgcccacccttcggaagacccagtgctgtgatgagtatgagtgtgcctgcaactgtgtcaactccacagtgagctgtccccttgggtacttggcctcaaccgccaccaatgactgtggctgtaccacaaccacctgccttcccgacaaggtgtgtgtccaccgaagcaccatctaccctgtgggccagttctgggaggagggctgcgatgtgtgcacctgcaccgacatggaggatgccgtgatgggcctccgcgtggcccagtgctcccagaagccctgtgaggacagctgtcggtcgggcttcacttacgttctgcatgaaggcgagtgctgtggaaggtgcctgccatctgcctgtgaggtggtgactggctcaccgcggggggactcccagtcttcctggaagagtgtcggctcccagtgggcctccccggagaacccctgcctcatcaatgagtgtgtccgagtgaaggaggaggtctttatacaacaaaggaacgtctcctgcccccagctggaggtccctgtctgcccctcgggctttcagctgagctgtaagacctcagcgtgctgcccaagctgtcgctgtgagcgcatggaggcctgcatgctcaatggcactgtcattgggcccgggaagactgtgatgatcgatgtgtgcacgacctgccgctgcatggtgcaggtgggggtcatctctggattcaagctggagtgcaggaagaccacctgcaacccctgccccctgggttacaaggaagaaaataacacaggtgaatgttgtgggagatgtttgcctacggcttgcaccattcagctaagaggaggacagatcatgacactgaagcgtgatgagacgctccaggatggctgtgatactcacttctgcaaggtcaatgagagaggagagtacttctgggagaagagggtcacaggctgcccaccctttgatgaacacaagtgtctggctgagggaggtaaaattatgaaaattccaggcacctgctgtgacacatgtgaggagcctgagtgcaacgacatcactgccaggctgcagtatgtcaaggtgggaagctgtaagtctgaagtagaggtggatatccactactgccagggcaaatgtgccagcaaagccatgtactccattgacatcaacgatgtgcaggaccagtgctcctgctgctctccgacacggacggagcccatgcaggtggccctgcactgcaccaatggctctgttgtgtaccatgaggttctcaatgccatggagtgcaaatgctcccccaggaagtgcagcaagtgaggctgctgcagctgcatgggtgcctgctgctgcctgccttggcctgatggccaggccagagtgctgccagtcctctgcatgttctgctcttgtgcccttctgagcccacaataaaggctgagctcttatcttgcaaaa

SEQ ID NO: 438990 - DNA, 7920 bp, Homo sapiens
  misc_feature (41)..(42): n is a, c, g, or t
gggggcctggacaccaccaagtctgtggtcataggtacggnngacacgatgtccactgggctcacgggggcagcgaatgtggccctgtgtgagaagactttgtgtgagtgtgctggggggctggagtgcgcctgccctgccctcctggagtacgcccggacctgtgcccaggagggaatggtgctgtacggctggaccgaccacagcgcgtgcagcccagtgtgccctgctggtatggagtataggcagtgtgtgtccccttgcgccaggacctgccagagcctgcacatcaaagaaatgtgtcaggagcgatgcgtggatggctgcagctgccctgagggacagctcctggatgaaggcctctgcgtggagagcaccgagtgtccctgcgtgcattccggaaagcgctaccctcccggcacctccctctctcgagactgcaacacctgcatttgccgaaacagccagtggatctgcagcaatgaagaatgtccaggggagtgccttgtcacaggtcaatcacacttcaagagctttgacaacagatacttcaccttcagtgggatctgccagtacctgctggcccgggattgccaggaccactccttctccattgtcattgagactgtccagtgtgctgatgaccgcgacgctgtgtgcacccgctccgtcaccgtccggctgcctggcctgcacaacagccttgtgaaactgaagcatggggcaggagttgccatggatggccaggacgtccagctccccctcctgaaaggtgacctccgcatccagcatacagtgacggcctccgtgcgcctcagctacggggaggacctgcagatggactgggatggccgcgggaggctgctggtgaagctgtcccccgtctatgccgggaagacctgcggcctgtgtgggaattacaatggcaaccagggcgacgacttccttaccccctctgggctggcggagccccgggtggaggacttcgggaacgcctggaagctgcacggggactgccaggacctgcagaagcagcacagcgatccctgcgccctcaacccgcgcatgaccaggttctccgaggaggcgtgcgcggtcctgacgtcccccacattcgaggcctgccatcgtgccgtcagcccgctgccctacctgcggaactgccgctacgacgtgtgctcctgctcggacggccgcgagtgcctgtgcggcgccctggccagctatgccgcggcctgcgcggggagaggcgtgcgcgtcgcgtggcgcgagccaggccgctgtgagctgaactgcccgaaaggccaggtgtacctgcagtgcgggaccccctgcaacctgacctgccgctctctctcttacccggatgaggaatgcaatgaggcctgcctggagggctgcttctgccccccagggctctacatggatgagaggggggactgcgtgcccaaggcccagtgcccctgttactatgacggtgagatcttccagccagaagacatcttctcagaccatcacaccatgtgctactgtgaggatggcttcatgcactgtaccatgagtggagtccccggaagcttgctgcctgacgctgtcctcagcagtcccctgtctcatcgcagcaaaaggagcctatcctgtcggccccccatggtcaagctggtgtgtcccgctgacaacctgcgggctgaagggctcgagtgtaccaaaacgtgccagaactatgacctggagtgcatgagcatgggctgtgtctctggctgcctctgccccccgggcatggtccggcatgagaacagatgtgtggccctggaaaggtgtccctgcttccatcagggcaaggagtatgcccctggagaaacagtgaagattggctgcaacacttgtgtctgtcgggaccggaagtggaactgcacagaccatgtgtgtgatgccacgtgctccacgatcggcatggcccactacctcaccttcgacgggctcaaatacctgttccccggggagtgccagtacgttctggtgcaggattactgcggcagtaaccctgggacctttcggatcctagtggggaataagggatgcagccacccctcagtgaaatgcaagaaacgggtcaccatcctggtggagggaggagagattgagctgtttgacggggaggtgaatgtgaagaggcccatgaaggatgagactcactttgaggtggtggagtctggccggtacatcattctgctgctgggcaaagccctctccgtggtctgggaccgccacctgagcatctccgtggtcctgaagcagacataccaggagaaagtgtgtggcctgtgtgggaattttgatggcatccagaacaatgacctcaccagcagcaacctccaagtggaggaagaccctgtggactttgggaactcctggaaagtgagctcgcagtgtgctgacaccagaaaagtgcctctggactcatcccctgccacctgccataacaacatcatgaagcagacgatggtggattcctcctgtagaatccttaccagtgacgtcttccaggactgcaacaagctggtggaccccgagccatatctggatgtctgcatttacgacacctgctcctgtgagtccattggggactgcgcctgcttctgcgacaccattgctgcctatgcccacgtgtgtgcccagcatggcaaggtggtgacctggaggacggccacattgtgcccccagagctgcgaggagaggaatctccgggagaacgggtatgagtgtgagtggcgctataacagctgtgcacctgcctgtcaagtcacgtgtcagcaccctgagccactggcctgccctgtgcagtgtgtggagggctgccatgcccactgccctccagggaaaatcctggatgagcttttgcagacctgcgttgaccctgaagactgtccagtgtgtgaggtggctggccggcgttttgcctcaggaaagaaagtcaccttgaatcccagtgaccctgagcactgccagatttgccactgtgatgttgtcaacctcacctgtgaagcctgccaggagccgggaggcctggtggtgcctcccacagatgccccggtgagccccaccactctgtatgtggaggacatctcggaaccgccgttgcacgatttctactgcagcaggctactggacctggtcttcctgctggatggctcctccaggctgtccgaggctgagtttgaagtgctgaaggcctttgtggtggacatgatggagcggctgcgcatctcccagaagtgggtccgcgtggccgtggtggagtaccacgacggctcccacgcctacatcgggctcaaggaccggaagcgaccgtcagagctgcggcgcattgccagccaggtgaagtatgcgggcagccaggtggcctccaccagcgaggtcttgaaatacacactgttccaaatcttcagcaagatcgaccgccctgaagcctcccgcatcgccctgctcctgatggccagccaggagccccaacggatgtcccggaactttgtccgctacgtccagggcctgaagaagaagaaggtcattgtgatcccggtgggcattgggccccatgccaacctcaagcagatccgcctcatcgagaagcaggcccctgagaacaaggccttcgtgctgagcagtgtggatgagctggagcagcaaagggacgagatcgttagctacctctgtgaccttgcccctgaagcccctcctcctactctgccccccgacatggcacaagtcactgtgggcccggggctcttgggggtttcgaccctggggcccaagaggaactccatggttctggatgtggcgttcgtcctggaaggatcggacaaaattggtgaagccgacttcaacaggagcaaggagttcatggaggaggtgattcagcggatggatgtgggccaggacagcatccacgtcacggtgctgcagtactcctacatggtgaccgtggagtaccccttcagcgaggcacagtccaaaggggacatcctgcagcgggtgcgagagatccgctaccagggcggcaacaggaccaacactgggctggccctgcggtacctctctgaccacagcttcttggtcagccagggtgaccgggagcaggcgcccaacctggtctacatggtcaccggaaatcctgcctctgatgagatcaagaggctgcctggagacatccaggtggtgcccattggagtgggccctaatgccaacgtgcaggagctggagaggattggctggcccaatgcccctatcctcatccaggactttgagacgctcccccgagaggctcctgacctggtgctgcagaggtgctgctccggagaggggctgcagatccccaccctctcccctgcacctgactgcagccagcccctggacgtgatccttctcctggatggctcctccagtttcccagcttcttattttgatgaaatgaagagtttcgccaaggctttcatttcaaaagccaatatagggcctcgtctcactcaggtgtcagtgctgcagtatggaagcatcaccaccattgacgtgccatggaacgtggtcccggagaaagcccatttgctgagccttgtggacgtcatgcagcgggagggaggccccagccaaatcggggatgccttgggctttgctgtgcgatacttgacttcagaaatgcatggtgccaggccgggagcctcaaaggcggtggtcatcctggtcacggacgtctctgtggattcagtggatgcagcagctgatgccgccaggtccaacagagtgacagtgttccctattggaattggagatcgctacgatgcagcccagctacggatcttggcaggcccagcaggcgactccaacgtggtgaagctccagcgaatcgaagacctccctaccatggtcaccttgggcaattccttcctccacaaactgtgctctggatttgttaggatttgcatggatgaggatgggaatgagaagaggcccggggacgtctggaccttgccagaccagtgccacaccgtgacttgccagccagatggccagaccttgctgaagagtcatcgggtcaactgtgaccgggggctgaggccttcgtgccctaacagccagtcccctgttaaagtggaagagacctgtggctgccgctggacctgcccctgtgtgtgcacaggcagctccactcggcacatcgtgacctttgatgggcagaatttcaagctgactggcagctgttcttatgtcctatttcaaaacaaggagcaggacctggaggtgattctccataatggtgcctgcagccctggagcaaggcagggctgcatgaaatccatcgaggtgaagcacagtgccctctccgtcgagctgcacagtgacatggaggtgacggtgaatgggagactggtctctgttccttacgtgggtgggaacatggaagtcaacgtttatggtgccatcatgcatgaggtcagattcaatcaccttggtcacatcttcacattcactccacaaaacaatgagttccaactgcagctcagccccaagacttttgcttcaaagacgtatggtctgtgtgggatctgtgatgagaacggagccaatgacttcatgctgagggatggcacagtcaccacagactggaaaacacttgttcaggaatggactgtgcagcggccagggcagacgtgccagcccatcctggaggagcagtgtcttgtccccgacagctcccactgccaggtcctcctcttaccactgtttgctgaatgccacaaggtcctggctccagccacattctatgccatctgccagcaggacagttgccaccaggagcaagtgtgtgaggtgatcgcctcttatgcccacctctgtcggaccaacggggtctgcgttgactggaggacacctgatttctgtgctatgtcatgcccaccatctctggtctacaaccactgtgagcatggctgtccccggcactgtgatggcaacgtgagctcctgtggggaccatccctccgaaggctgtttctgccctccagataaagtcatgttggaaggcagctgtgtccctgaagaggcctgcactcagtgcattggtgaggatggagtccagcaccagttcctggaagcctgggtcccggaccaccagccctgtcagatctgcacatgcctcagcgggcggaaggtcaactgcacaacgcagccctgccccacggccaaagctcccacgtgtggcctgtgtgaagtagcccgcctccgccagaatgcagaccagtgctgccccgagtatgagtgtgtgtgtgacccagtgagctgtgacctgcccccagtgcctcactgtgaacgtggcctccagcccacactgaccaaccctggcgagtgcagacccaacttcacctgcgcctgcaggaaggaggagtgcaaaagagtgtccccaccctcctgccccccgcaccgtttgcccacccttcggaagacccagtgctgtgatgagtatgagtgtgcctgcaactgtgtcaactccacagtgagctgtccccttgggtacttggcctcaaccgccaccaatgactgtggctgtaccacaaccacctgccttcccgacaaggtgtgtgtccaccgaagcaccatctaccctgtgggccagttctgggaggagggctgcgatgtgtgcacctgcaccgacatggaggatgccgtgatgggcctccgcgtggcccagtgctcccagaagccctgtgaggacagctgtcggtcgggcttcacttacgttctgcatgaaggcgagtgctgtggaaggtgcctgccatctgcctgtgaggtggtgactggctcaccgcggggggactcccagtcttcctggaagagtgtcggctcccagtgggcctccccggagaacccctgcctcatcaatgagtgtgtccgagtgaaggaggaggtctttatacaacaaaggaacgtctcctgcccccagctggaggtccctgtctgcccctcgggctttcagctgagctgtaagacctcagcgtgctgcccaagctgtcgctgtgagcgcatggaggcctgcatgctcaatggcactgtcattgggcccgggaagactgtgatgatcgatgtgtgcacgacctgccgctgcatggtgcaggtgggggtcatctctggattcaagctggagtgcaggaagaccacctgcaacccctgccccctgggttacaaggaagaaaataacacaggtgaatgttgtgggagatgtttgcctacggcttgcaccattcagctaagaggaggacagatcatgacactgaagcgtgatgagacgctccaggatggctgtgatactcacttctgcaaggtcaatgagagaggagagtacttctgggagaagagggtcacaggctgcccaccctttgatgaacacaagtgtctggctgagggaggtaaaattatgaaaattccaggcacctgctgtgacacatgtgaggagcctgagtgcaacgacatcactgccaggctgcagtatgtcaaggtgggaagctgtaagtctgaagtagaggtggatatccactactgccagggcaaatgtgccagcaaagccatgtactccattgacatcaacgatgtgcaggaccagtgctcctgctgctctccgacacggacggagcccatgcaggtggccctgcactgcaccaatggctctgttgtgtaccatgaggttctcaatgccatggagtgcaaatgctcccccaggaagtgcagcaagtgaggctgctgcagctgcatgggtgcctgctgctgcctgccttggcctgatggccaggccagagtgctgccagtcctctgcatgttctgctcttgtgcccttctgagcccacaataaaggctgagctcttatcttgcaaaa

SEQ ID NO: 438991 - DNA, 6171 bp, Homo sapiens
gggcgaattcctcctcctcctaggcgaattcctcctcctcctgggcgaattcctcctcctcctgggcgaattcctcctcctcctccctccaaggagtatgcccctggagaaacagtgaagattggctgcaacacttgtgtctgtcgggaccggaagtggaactgcacagaccatgtgtgtgatgccacgtgctccacgatcggcatggcccactacctcaccttcgacgggctcaaatacctgttccccggggagtgccagtacgttctggtgcaggattactgcggcagtaaccctgggacctttcggatcctagtggggaataagggatgcagccacccctcagtgaaatgcaagaaacgggtcaccatcctggtggagggaggagagattgagctgtttgacggggaggtgaatgtgaagaggcccatgaaggatgagactcactttgaggtggtggagtctggccggtacatcattctgctgctgggcaaagccctctccgtggtctgggaccgccacctgagcatctccgtggtcctgaagcagacataccaggagaaagtgtgtggcctgtgtgggaattttgatggcatccagaacaatgacctcaccagcagcaacctccaagtggaggaagaccctgtggactttgggaactcctggaaagtgagctcgcagtgtgctgacaccagaaaagtgcctctggactcatcccctgccacctgccataacaacatcatgaagcagacgatggtggattcctcctgtagaatccttaccagtgacgtcttccaggactgcaacaagctggtggaccccgagccatatctggatgtctgcatttacgacacctgctcctgtgagtccattggggactgcgcctgcttctgcgacaccattgctgcctatgcccacgtgtgtgcccagcatggcaaggtggtgacctggaggacggccacattgtgcccccagagctgcgaggagaggaatctccgggagaacgggtatgagtgtgagtggcgctataacagctgtgcacctgcctgtcaagtcacgtgtcagcaccctgagccactggcctgccctgtgcagtgtgtggagggctgccatgcccactgccctccagggaaaatcctggatgagcttttgcagacctgcgttgaccctgaagactgtccagtgtgtgaggtggctggccggcgttttgcctcaggaaagaaagtcaccttgaatcccagtgaccctgagcactgccagatttgccactgtgatgttgtcaacctcacctgtgaagcctgccaggagccgggaggcctggtggtgcctcccacagatgccccggtgagccccaccactctgtatgtggaggacatctcggaaccgccgttgcacgatttctactgcagcaggctactggacctggtcttcctgctggatggctcctccaggctgtccgaggctgagtttgaagtgctgaaggcctttgtggtggacatgatggagcggctgcgcatctcccagaagtgggtccgcgtggccgtggtggagtaccacgacggctcccacgcctacatcgggctcaaggaccggaagcgaccgtcagagctgcggcgcattgccagccaggtgaagtatgcgggcagccaggtggcctccaccagcgaggtcttgaaatacacactgttccaaatcttcagcaagatcgaccgccctgaagcctcccgcatcgccctgctcctgatggccagccaggagccccaacggatgtcccggaactttgtccgctacgtccagggcctgaagaagaagaaggtcattgtgatcccggtgggcattgggccccatgccaacctcaagcagatccgcctcatcgagaagcaggcccctgagaacaaggccttcgtgctgagcagtgtggatgagctggagcagcaaagggacgagatcgttagctacctctgtgaccttgcccctgaagcccctcctcctactctgccccccgacatggcacaagtcactgtgggcccggggctcttgggggtttcgaccctggggcccaagaggaactccatggttctggatgtggcgttcgtcctggaaggatcggacaaaattggtgaagccgacttcaacaggagcaaggagttcatggaggaggtgattcagcggatggatgtgggccaggacagcatccacgtcacggtgctgcagtactcctacatggtgaccgtggagtaccccttcagcgaggcacagtccaaaggggacatcctgcagcgggtgcgagagatccgctaccagggcggcaacaggaccaacactgggctggccctgcggtacctctctgaccacagcttcttggtcagccagggtgaccgggagcaggcgcccaacctggtctacatggtcaccggaaatcctgcctctgatgagatcaagaggctgcctggagacatccaggtggtgcccattggagtgggccctaatgccaacgtgcaggagctggagaggattggctggcccaatgcccctatcctcatccaggactttgagacgctcccccgagaggctcctgacctggtgctgcagaggtgctgctccggagaggggctgcagatccccaccctctcccctgcacctgactgcagccagcccctggacgtgatccttctcctggatggctcctccagtttcccagcttcttattttgatgaaatgaagagtttcgccaaggctttcatttcaaaagccaatatagggcctcgtctcactcaggtgtcagtgctgcagtatggaagcatcaccaccattgacgtgccatggaacgtggtcccggagaaagcccatttgctgagccttgtggacgtcatgcagcgggagggaggccccagccaaatcggggatgccttgggctttgctgtgcgatacttgacttcagaaatgcatggtgccaggccgggagcctcaaaggcggtggtcatcctggtcacggacgtctctgtggattcagtggatgcagcagctgatgccgccaggtccaacagagtgacagtgttccctattggaattggagatcgctacgatgcagcccagctacggatcttggcaggcccagcaggcgactccaacgtggtgaagctccagcgaatcgaagacctccctaccatggtcaccttgggcaattccttcctccacaaactgtgctctggatttgttaggatttgcatggatgaggatgggaatgagaagaggcccggggacgtctggaccttgccagaccagtgccacaccgtgacttgccagccagatggccagaccttgctgaagagtcatcgggtcaactgtgaccgggggctgaggccttcgtgccctaacagccagtcccctgttaaagtggaagagacctgtggctgccgctggacctgcccctgtgtgtgcacaggcagctccactcggcacatcgtgacctttgatgggcagaatttcaagctgactggcagctgttcttatgtcctatttcaaaacaaggagcaggacctggaggtgattctccataatggtgcctgcagccctggagcaaggcagggctgcatgaaatccatcgaggtgaagcacagtgccctctccgtcgagctgcacagtgacatggaggtgacggtgaatgggagactggtctctgttccttacgtgggtgggaacatggaagtcaacgtttatggtgccatcatgcatgaggtcagattcaatcaccttggtcacatcttcacattcactccacaaaacaatgagttccaactgcagctcagccccaagacttttgcttcaaagacgtatggtctgtgtgggatctgtgatgagaacggagccaatgacttcatgctgagggatggcacagtcaccacagactggaaaacacttgttcaggaatggactgtgcagcggccagggcagacgtgccagcccatcctggaggagcagtgtcttgtccccgacagctcccactgccaggtcctcctcttaccactgtttgctgaatgccacaaggtcctggctccagccacattctatgccatctgccagcaggacagttgccaccaggagcaagtgtgtgaggtgatcgcctcttatgcccacctctgtcggaccaacggggtctgcgttgactggaggacacctgatttctgtgctatgtcatgcccaccatctctggtctacaaccactgtgagcatggctgtccccggcactgtgatggcaacgtgagctcctgtggggaccatccctccgaaggctgtttctgccctccagataaagtcatgttggaaggcagctgtgtccctgaagaggcctgcactcagtgcattggtgaggatggagtccagcaccagttcctggaagcctgggtcccggaccaccagccctgtcagatctgcacatgcctcagcgggcggaaggtcaactgcacaacgcagccctgccccacggccaaagctcccacgtgtggcctgtgtgaagtagcccgcctccgccagaatgcagaccagtgctgccccgagtatgagtgtgtgtgtgacccagtgagctgtgacctgcccccagtgcctcactgtgaacgtggcctccagcccacactgaccaaccctggcgagtgcagacccaacttcacctgcgcctgcaggaaggaggagtgcaaaagagtgtccccaccctcctgccccccgcaccgtttgcccacccttcggaagacccagtgctgtgatgagtatgagtgtgcctgcaactgtgtcaactccacagtgagctgtccccttgggtacttggcctcaaccgccaccaatgactgtggctgtaccacaaccacctgccttcccgacaaggtgtgtgtccaccgaagcaccatctaccctgtgggccagttctgggaggagggctgcgatgtgtgcacctgcaccgacatggaggatgccgtgatgggcctccgcgtggcccagtgctcccagaagccctgtgaggacagctgtcggtcgggcttcacttacgttctgcatgaaggcgagtgctgtggaaggtgcctgccatctgcctgtgaggtggtgactggctcaccgcggggggactcccagtcttcctggaagagtgtcggctcccagtgggcctccccggagaacccctgcctcatcaatgagtgtgtccgagtgaaggaggaggtctttatacaacaaaggaacgtctcctgcccccagctggaggtccctgtctgcccctcgggctttcagctgagctgtaagacctcagcgtgctgcccaagctgtcgctgtgagcgcatggaggcctgcatgctcaatggcactgtcattgggcccgggaagactgtgatgatcgatgtgtgcacgacctgccgctgcatggtgcaggtgggggtcatctctggattcaagctggagtgcaggaagaccacctgcaacccctgccccctgggttacaaggaagaaaataacacaggtgaatgttgtgggagatgtttgcctacggcttgcaccattcagctaagaggaggacagatcatgacactgaagcgtgatgagacgctccaggatggctgtgatactcacttctgcaaggtcaatgagagaggagagtacttctgggagaagagggtcacaggctgcccaccctttgatgaacacaagtgtctggctgagggaggtaaaattatgaaaattccaggcacctgctgtgacacatgtgaggagcctgagtgcaacgacatcactgccaggctgcagtatgtcaaggtgggaagctgtaagtctgaagtagaggtggatatccactactgccagggcaaatgtgccagcaaagccatgtactccattgacatcaacgatgtgcaggaccagtgctcctgctgctctccgacacggacggagcccatgcaggtggccctgcactgcaccaatggctctgttgtgtaccatgaggttctcaatgccatggagtgcaaatgctcccccaggaagtgcagcaagtgaggctgctgcagctgcatgggtgcctgctgctgcctgccttggcctgatggccaggccagagtgctgccagtcctctgcatgttctgctcttgtgcccttctgagcccacaataaaggctgagctcttatcttgcaaaa

SEQ ID NO: 438992 - DNA, 3467 bp, Homo sapiens
ctttgtaatgcttaccagttatgcaagtaaaatgaaaagggtggttctgtcagatcttaacccaaatccaaggtgaagcctggtttcctgcataggcgagaaggccccagggcccagaatccctcctcaccccttctacctccatccagggccccactctggggcaggcagtgctggctgcattcagctcagtggggggcagtttgactatgtcgcatccagcttcccatgccgtccatccctaggagtctgtctcaccatacaagggcgcagacaggccagcttgagggtgttcatcaacgcagcattgtttgaagagcagaagttagaatctattcattcgggggcctgactgcataaatacactgtggttgccgtccagcagagcatcatgcagccattaactgcactcacatgggaaaatgcccacaatggcttgttgtttaaaaaaaaaaaaagtgaaaaaatatttctgctgtgtgtggaattatgagaaatgtttacctggatttgttaggatttgcatggatgaggatgggaatgagaagaggcccggggacgtctggaccttgccagaccagtgccacaccgtgacttgccagccagatggccagaccttgctgaagagtcatcgggtcaactgtgaccgggggctgaggccttcgtgccctaacagccagtcccctgttaaagtggaagagacctgtggctgccgctggacctgcccctgtgtgtgcacaggcagctccactcggcacatcgtgacctttgatgggcagaatttcaagctgactggcagctgttcttatgtcctatttcaaaacaaggagcaggacctggaggtgattctccataatggtgcctgcagccctggagcaaggcagggctgcatgaaatccatcgaggtgaagcacagtgccctctccgtcgagctgcacagtgacatggaggtgacggtgaatgggagactggtctctgttccttacgtgggtgggaacatggaagtcaacgtttatggtgccatcatgcatgaggtcagattcaatcaccttggtcacatcttcacattcactccacaaaacaatgagttccaactgcagctcagccccaagacttttgcttcaaagacgtatggtctgtgtgggatctgtgatgagaacggagccaatgacttcatgctgagggatggcacagtcaccacagactggaaaacacttgttcaggaatggactgtgcagcggccagggcagacgtgccagcccatcctggaggagcagtgtcttgtccccgacagctcccactgccaggtcctcctcttaccactgtttgctgaatgccacaaggtcctggctccagccacattctatgccatctgccagcaggacagttgccaccaggagcaagtgtgtgaggtgatcgcctcttatgcccacctctgtcggaccaacggggtctgcgttgactggaggacacctgatttctgtgctatgtcatgcccaccatctctggtctacaaccactgtgagcatggctgtccccggcactgtgatggcaacgtgagctcctgtggggaccatccctccgaaggctgtttctgccctccagataaagtcatgttggaaggcagctgtgtccctgaagaggcctgcactcagtgcattggtgaggatggagtccagcaccagttcctggaagcctgggtcccggaccaccagccctgtcagatctgcacatgcctcagcgggcggaaggtcaactgcacaacgcagccctgccccacggccaaagctcccacgtgtggcctgtgtgaagtagcccgcctccgccagaatgcagaccagtgctgccccgagtatgagtgtgtgtgtgacccagtgagctgtgacctgcccccagtgcctcactgtgaacgtggcctccagcccacactgaccaaccctggcgagtgcagacccaacttcacctgcgcctgcaggaaggaggagtgcaaaagagtgtccccaccctcctgccccccgcaccgtttgcccacccttcggaagacccagtgctgtgatgagtatgagtgtgcctgcaactgtgtcaactccacagtgagctgtccccttgggtacttggcctcaaccgccaccaatgactgtggctgtaccacaaccacctgccttcccgacaaggtgtgtgtccaccgaagcaccatctaccctgtgggccagttctgggaggagggctgcgatgtgtgcacctgcaccgacatggaggatgccgtgatgggcctccgcgtggcccagtgctcccagaagccctgtgaggacagctgtcggtcgggcttcacttacgttctgcatgaaggcgagtgctgtggaaggtgcctgccatctgcctgtgaggtggtgactggctcaccgcggggggactcccagtcttcctggaagagtgtcggctcccagtgggcctccccggagaacccctgcctcatcaatgagtgtgtccgagtgaaggaggaggtctttatacaacaaaggaacgtctcctgcccccagctggaggtccctgtctgcccctcgggctttcagctgagctgtaagacctcagcgtgctgcccaagctgtcgctgtgagcgcatggaggcctgcatgctcaatggcactgtcattgggcccgggaagactgtgatgatcgatgtgtgcacgacctgccgctgcatggtgcaggtgggggtcatctctggattcaagctggagtgcaggaagaccacctgcaacccctgccccctgggttacaaggaagaaaataacacaggtgaatgttgtgggagatgtttgcctacggcttgcaccattcagctaagaggaggacagatcatgacactgaagcgtgatgagacgctccaggatggctgtgatactcacttctgcaaggtcaatgagagaggagagtacttctgggagaagagggtcacaggctgcccaccctttgatgaacacaagtgtctggctgagggaggtaaaattatgaaaattccaggcacctgctgtgacacatgtgaggagcctgagtgcaacgacatcactgccaggctgcagtatgtcaaggtgggaagctgtaagtctgaagtagaggtggatatccactactgccagggcaaatgtgccagcaaagccatgtactccattgacatcaacgatgtgcaggaccagtgctcctgctgctctccgacacggacggagcccatgcaggtggccctgcactgcaccaatggctctgttgtgtaccatgaggttctcaatgccatggagtgcaaatgctcccccaggaagtgcagcaagtgaggctgctgcagctgcatgggtgcctgctgctgcctgccttggcctgatggccaggccagagtgctgccagtcctctgcatgttctgctcttgtgcccttctgagcccacaataaaggctgagctcttatcttgcaaaa

SEQ ID NO: 438993 - DNA, 1784 bp, Homo sapiens
attgggggtaattagagagtagcagcagcatctctgaacatttctctggatttgcaacccccatcatcctcaggcctctctacaagcagcaggaaacatagaactcagagccagatcccttatccaactctcgacttttccttggtctccagtggaagggaaaagcccatgatcttcaagcagggaagccccagtgagtagctgcattcctagaaattgaagtttcagagctacacaaacacttttctgtcccaaccgttccctcacagcaaagcaacaatacagcctgcaggaaggaggagtgcaaaagagtgtccccaccctcctgccccccgcaccgtttgcccacccttcggaagacccagtgctgtgatgagtatgagtgtgcctgcaactgtgtcaactccacagtgagctgtccccttgggtacttggcctcaaccgccaccaatgactgtggctgtaccacaaccacctgccttcccgacaaggtgtgtgtccaccgaagcaccatctaccctgtgggccagttctgggaggagggctgcgatgtgtgcacctgcaccgacatggaggatgccgtgatgggcctccgcgtggcccagtgctcccagaagccctgtgaggacagctgtcggtcgggcttcacttacgttctgcatgaaggcgagtgctgtggaaggtgcctgccatctgcctgtgaggtggtgactggctcaccgcggggggactcccagtcttcctggaagagtgtcggctcccagtgggcctccccggagaacccctgcctcatcaatgagtgtgtccgagtgaaggaggaggtctttatacaacaaaggaacgtctcctgcccccagctggaggtccctgtctgcccctcgggctttcagctgagctgtaagacctcagcgtgctgcccaagctgtcgctgtgagcgcatggaggcctgcatgctcaatggcactgtcattgggcccgggaagactgtgatgatcgatgtgtgcacgacctgccgctgcatggtgcaggtgggggtcatctctggattcaagctggagtgcaggaagaccacctgcaacccctgccccctgggttacaaggaagaaaataacacaggtgaatgttgtgggagatgtttgcctacggcttgcaccattcagctaagaggaggacagatcatgacactgaagcgtgatgagacgctccaggatggctgtgatactcacttctgcaaggtcaatgagagaggagagtacttctgggagaagagggtcacaggctgcccaccctttgatgaacacaagtgtctggctgagggaggtaaaattatgaaaattccaggcacctgctgtgacacatgtgaggagcctgagtgcaacgacatcactgccaggctgcagtatgtcaaggtgggaagctgtaagtctgaagtagaggtggatatccactactgccagggcaaatgtgccagcaaagccatgtactccattgacatcaacgatgtgcaggaccagtgctcctgctgctctccgacacggacggagcccatgcaggtggccctgcactgcaccaatggctctgttgtgtaccatgaggttctcaatgccatggagtgcaaatgctcccccaggaagtgcagcaagtgaggctgctgcagctgcatgggtgcctgctgctgcctgccttggcctgatggccaggccagagtgctgccagtcctctgcatgttctgctcttgtgcccttctgagcccacaataaaggctgagctcttatcttgcaaaa

SEQ ID NO: 438994 - DNA, 8063 bp, Homo sapiens
gcagctcacagctattgtggtgggaaagggagggtggttggtggatgtcacagcttgggctttatctcccccagcagtggggactccacagcccctgggctacataacagcaagacagtccggagctgtagcagacctgattgagcctttgcagcagctgagagcatggcctagggtgggcggcaccattgtccagcagctgagtttcccagggaccttggagatagccgcagccctcatttgcaggggaagatgattcctgccagatttgccggggtgctgcttgctctggccctcattttgccagggaccctttgtgcagaaggaactcgcggcaggtcatccacggcccgatgcagccttttcggaagtgacttcgtcaacacctttgatgggagcatgtacagctttgcgggatactgcagttacctcctggcagggggctgccagaaacgctccttctcgattattggggacttccagaatggcaagagagtgagcctctccgtgtatcttggggaattttttgacatccatttgtttgtcaatggtaccgtgacacagggggaccaaagagtctccatgccctatgcctccaaagggctgtatctagaaactgaggctgggtactacaagctgtccggtgaggcctatggctttgtggccaggatcgatggcagcggcaactttcaagtcctgctgtcagacagatacttcaacaagacctgcgggctgtgtggcaactttaacatctttgctgaagatgactttatgacccaagaagggaccttgacctcggacccttatgactttgccaactcatgggctctgagcagtggagaacagtggtgtgaacgggcatctcctcccagcagctcatgcaacatctcctctggggaaatgcagaagggcctgtgggagcagtgccagcttctgaagagcacctcggtgtttgcccgctgccaccctctggtggaccccgagccttttgtggccctgtgtgagaagactttgtgtgagtgtgctggggggctggagtgcgcctgccctgccctcctggagtacgcccggacctgtgcccaggagggaatggtgctgtacggctggaccgaccacagcgcgtgcagcccagtgtgccctgctggtatggagtataggcagtgtgtgtccccttgcgccaggacctgccagagcctgcacatcaaagaaatgtgtcaggagcgatgcgtggatggctgcagctgccctgagggacagctcctggatgaaggcctctgcgtggagagcaccgagtgtccctgcgtgcattccggaaagcgctaccctcccggcacctccctctctcgagactgcaacacctgcatttgccgaaacagccagtggatctgcagcaatgaagaatgtccaggggagtgccttgtcacaggtcaatcacacttcaagagctttgacaacagatacttcaccttcagtgggatctgccagtacctgctggcccgggattgccaggaccactccttctccattgtcattgagactgtccagtgtgctgatgaccgcgacgctgtgtgcacccgctccgtcaccgtccggctgcctggcctgcacaacagccttgtgaaactgaagcatggggcaggagttgccatggatggccaggacgtccagctccccctcctgaaaggtgacctccgcatccagcatacagtgacggcctccgtgcgcctcagctacggggaggacctgcagatggactgggatggccgcgggaggctgctggtgaagctgtcccccgtctatgccgggaagacctgcggcctgtgtgggaattacaatggcaaccagggcgacgacttccttaccccctctgggctggcggagccccgggtggaggacttcgggaacgcctggaagctgcacggggactgccaggacctgcagaagcagcacagcgatccctgcgccctcaacccgcgcatgaccaggttctccgaggaggcgtgcgcggtcctgacgtcccccacattcgaggcctgccatcgtgccgtcagcccgctgccctacctgcggaactgccgctacgacgtgtgctcctgctcggacggccgcgagtgcctgtgcggcgccctggccagctatgccgcggcctgcgcggggagaggcgtgcgcgtcgcgtggcgcgagccaggccgctgtgagctgaactgcccgaaaggccaggtgtacctgcagtgcgggaccccctgcaacctgacctgccgctctctctcttacccggatgaggaatgcaatgaggcctgcctggagggctgcttctgccccccagggctctacatggatgagaggggggactgcgtgcccaaggcccagtgcccctgttactatgacggtgagatcttccagccagaagacatcttctcagaccatcacaccatgtgctactgtgaggatggcttcatgcactgtaccatgagtggagtccccggaagcttgctgcctgacgctgtcctcagcagtcccctgtctcatcgcagcaaaaggagcctatcctgtcggccccccatggtcaagctggtgtgtcccgctgacaacctgcgggctgaagggctcgagtgtaccaaaacgtgccagaactatgacctggagtgcatgagcatgggctgtgtctctggctgcctctgccccccgggcatggtccggcatgagaacagatgtgtggccctggaaaggtgtccctgcttccatcagggcaaggagtatgcccctggagaaacagtgaagattggctgcaacacttgtgtctgtcgggaccggaagtggaactgcacagaccatgtgtgtgatgccacgtgctccacgatcggcatggcccactacctcaccttcgacgggctcaaatacctgttccccggggagtgccagtacgttctggtgcaggattactgcggcagtaaccctgggacctttcggatcctagtggggaataagggatgcagccacccctcagtgaaatgcaagaaacgggtcaccatcctggtggagggaggagagattgagctgtttgacggggaggtgaatgtgaagaggcccatgaaggatgagactcactttgaggtggtggagtctggccggtacatcattctgctgctgggcaaagccctctccgtggtctgggaccgccacctgagcatctccgtggtcctgaagcagacataccaggagaaagtgtgtggcctgtgtgggaattttgatggcatccagaacaatgacctcaccagcagcaacctccaagtggaggaagaccctgtggactttgggaactcctggaaagtgagctcgcagtgtgctgacaccagaaaagtgcctctggactcatcccctgccacctgccataacaacatcatgaagcagacgatggtggattcctcctgtagaatccttaccagtgacgtcttccaggactgcaacaagctggtggaccccgagccatatctggatgtctgcatttacgacacctgctcctgtgagtccattggggactgcgcctgcttctgcgacaccattgctgcctatgcccacgtgtgtgcccagcatggcaaggtggtgacctggaggacggccacattgtgcccccagagctgcgaggagaggaatctccgggagaacgggtatgagtgtgagtggcgctataacagctgtgcacctgcctgtcaagtcacgtgtcagcaccctgagccactggcctgccctgtgcagtgtgtggagggctgccatgcccactgccctccagggaaaatcctggatgagcttttgcagacctgcgttgaccctgaagactgtccagtgtgtgaggtggctggccggcgttttgcctcaggaaagaaagtcaccttgaatcccagtgaccctgagcactgccagatttgccactgtgatgttgtcaacctcacctgtgaagcctgccaggagccgggaggcctggtggtgcctcccacagatgccccggtgagccccaccactctgtatgtggaggacatctcggaaccgccgttgcacgatttctactgcagcaggctactggacctggtcttcctgctggatggctcctccaggctgtccgaggctgagtttgaagtgctgaaggcctttgtggtggacatgatggagcggctgcgcatctcccagaagtgggtccgcgtggccgtggtggagtaccacgacggctcccacgcctacatcgggctcaaggaccggaagcgaccgtcagagctgcggcgcattgccagccaggtgaagtatgcgggcagccaggtggcctccaccagcgaggtcttgaaatacacactgttccaaatcttcagcaagatcgaccgccctgaagcctcccgcatcgccctgctcctgatggccagccaggagccccaacggatgtcccggaactttgtccgctacgtccagggcctgaagaagaagaaggtcattgtgatcccggtgggcattgggccccatgccaacctcaagcagatccgcctcatcgagaagcaggcccctgagaacaaggccttcgtgctgagcagtgtggatgagctggagcagcaaagggacgagatcgttagctacctctgtgaccttgcccctgaagcccctcctcctactctgccccccgacatggcacaagtcactgtgggcccggggctcttgggggtttcgaccctggggcccaagaggaactccatggttctggatgtggcgttcgtcctggaaggatcggacaaaattggtgaagccgacttcaacaggagcaaggagttcatggaggaggtgattcagcggatggatgtgggccaggacagcatccacgtcacggtgctgcagtactcctacatggtgaccgtggagtaccccttcagcgaggcacagtccaaaggggacatcctgcagcgggtgcgagagatccgctaccagggcggcaacaggaccaacactgggctggccctgcggtacctctctgaccacagcttcttggtcagccagggtgaccgggagcaggcgcccaacctggtctacatggtcaccggaaatcctgcctctgatgagatcaagaggctgcctggagacatccaggtggtgcccattggagtgggccctaatgccaacgtgcaggagctggagaggattggctggcccaatgcccctatcctcatccaggactttgagacgctcccccgagaggctcctgacctggtgctgcagaggtgctgctccggagaggggctgcagatccccaccctctcccctgcacctgactgcagccagcccctggacgtgatccttctcctggatggctcctccagtttcccagcttcttattttgatgaaatgaagagtttcgccaaggctttcatttcaaaagccaatatagggcctcgtctcactcaggtgtcagtgctgcagtatggaagcatcaccaccattgacgtgccatggaacgtggtcccggagaaagcccatttgctgagccttgtggacgtcatgcagcgggagggaggccccagccaaatcggggatgccttgggctttgctgtgcgatacttgacttcagaaatgcatggtgccaggccgggagcctcaaaggcggtggtcatcctggtcacggacgtctctgtggattcagtggatgcagcagctgatgccgccaggtccaacagagtgacagtgttccctattggaattggagatcgctacgatgcagcccagctacggatcttggcaggcccagcaggcgactccaacgtggtgaagctccagcgaatcgaagacctccctaccatggtcaccttgggcaattccttcctccacaaactgtgctctggatttgttaggatttgcatggatgaggatgggaatgagaagaggcccggggacgtctggaccttgccagaccagtgccacaccgtgacttgccagccagatggccagaccttgctgaagagtcatcgggtcaactgtgaccgggggctgaggccttcgtgccctaacagccagtcccctgttaaagtggaagagacctgtggctgccgctggacctgcccctgtgtgtgcacaggcagctccactcggcacatcgtgacctttgatgggcagaatttcaagctgactggcagctgttcttatgtcctatttcaaaacaaggagcaggacctggaggtgattctccataatggtgcctgcagccctggagcaaggcagggctgcatgaaatccatcgaggtgaagcacagtgccctctccgtcgagctgcacagtgacatggaggtgacggtgaatgggagactggtctctgttccttacgtgggtgggaacatggaagtcaacgtttatggtgccatcatgcatgaggtcagattcaatcaccttggtcacatcttcacattcactccacaaaacaatgagttccaactgcagctcagccccaagacttttgcttcaaagacgtatggtctgtgtgggatctgtgatgagaacggagccaatgacttcatgctgagggatggcacagtcaccacagactggaaaacacttgttcaggaatggactgtgcagcggccagggcagacgtgccagcccatcctggaggagcagtgtcttgtccccgacagctcccactgccaggtcctcctcttaccactgtttgctgaatgccacaaggtcctggctccagccacattctatgccatctgccagcaggacagttgccaccaggagcaagtgtgtgaggtgatcgcctcttatgcccacctctgtcggaccaacggggtctgcgttgactggaggacacctgatttctgtgctatgtcatgcccaccatctctggtctacaaccactgtgagcatggctgtccccggcactgtgatggcaacgtgagctcctgtggggaccatccctccgaaggctgtttctgccctccagataaagtcatgttggaaggcagctgtgtccctgaagaggcctgcactcagtgcattggtgaggatggagtccagcaccagttcctggaagcctgggtcccggaccaccagccctgtcagatctgcacatgcctcagcgggcggaaggtcaactgcacaacgcagccctgccccacggccaaagctcccacgtgtggcctgtgtgaagtagcccgcctccgccagaatgcagaccagtgctgccccgagtatgagtgtgtgtgtgacccagtgagctgtgacctgcccccagtgcctcactgtgaacgtggcctccagcccacactgaccaaccctggcgagtgcagacccaacttcacctgcgcctgcaggaaggaggagtgcaaaagagtgtccccaccctcctgccccccgcaccgtttgcccacccttcggaagacccagtgctgtgatgagtatgagtgtgcctgcaactgtgtcaactccacagtgagctgtccccttgggtacttggcctcaaccgccaccaatgactgtggctgtaccacaaccacctgccttcccgacaaggtgtgtgtccaccgaagcaccatctaccctgtgggccagttctgggaggagggctgcgatgtgtgcacctgcaccgacatggaggatgccgtgatgggcctccgcgtggcccagtgctcccagaagccctgtgaggacagctgtcggtcgggcttcacttacgttctgcatgaaggcgagtgctgtggaaggtgcctgccatctgcctgtgaggtggtgactggctcaccgcggggggactcccagtcttcctggaagagtgtcggctcccagtgggcctccccggagaacccctgcctcatcaatgagtgtgtccgagtgaaggaggaggtctttatacaacaaaggaacgtctcctgcccccagctggaggtccctgtctgcccctcgggctttcagctgagctgtaagacctcagcgtgctgcccaagctgtcgctgtggagcccatgtgaggcctgcatgcttattggacctgtctttgtgccccgttaatacttgtgattatccaacgttttcatggct

SEQ ID NO: 438995 - DNA, 7138 bp, Homo sapiens
gcagctcacagctattgtggtgggaaagggagggtggttggtggatgtcacagcttgggctttatctcccccagcagtggggactccacagcccctgggctacataacagcaagacagtccggagctgtagcagacctgattgagcctttgcagcagctgagagcatggcctagggtgggcggcaccattgtccagcagctgagtttcccagggaccttggagatagccgcagccctcatttgcaggggaagatgattcctgccagatttgccggggtgctgcttgctctggccctcattttgccagggaccctttgtgcagaaggaactcgcggcaggtcatccacggcccgatgcagccttttcggaagtgacttcgtcaacacctttgatgggagcatgtacagctttgcgggatactgcagttacctcctggcagggggctgccagaaacgctccttctcgattattggggacttccagaatggcaagagagtgagcctctccgtgtatcttggggaattttttgacatccatttgtttgtcaatggtaccgtgacacagggggaccaaagagtctccatgccctatgcctccaaagggctgtatctagaaactgaggctgggtactacaagctgtccggtgaggcctatggctttgtggccaggatcgatggcagcggcaactttcaagtcctgctgtcagacagatacttcaacaagacctgcgggctgtgtggcaactttaacatctttgctgaagatgactttatgacccaagaagggaccttgacctcggacccttatgactttgccaactcatgggctctgagcagtggagaacagtggtgtgaacgggcatctcctcccagcagctcatgcaacatctcctctggggaaatgcagaagggcctgtgggagcagtgccagcttctgaagagcacctcggtgtttgcccgctgccaccctctggtggaccccgagccttttgtggccctgtgtgagaagactttgtgtgagtgtgctggggggctggagtgcgcctgccctgccctcctggagtacgcccggacctgtgcccaggagggaatggtgctgtacggctggaccgaccacagcgcgtgcagcccagtgtgccctgctggtatggagtataggcagtgtgtgtccccttgcgccaggacctgccagagcctgcacatcaaagaaatgtgtcaggagcgatgcgtggatggctgcagctgccctgagggacagctcctggatgaaggcctctgcgtggagagcaccgagtgtccctgcgtgcattccggaaagcgctaccctcccggcacctccctctctcgagactgcaacacctgcatttgccgaaacagccagtggatctgcagcaatgaagaatgtccaggggagtgccttgtcacaggtcaatcacacttcaagagctttgacaacagatacttcaccttcagtgggatctgccagtacctgctggcccgggattgccaggaccactccttctccattgtcattgagactgtccagtgtgctgatgaccgcgacgctgtgtgcacccgctccgtcaccgtccggctgcctggcctgcacaacagccttgtgaaactgaagcatggggcaggagttgccatggatggccaggacgtccagctccccctcctgaaaggtgacctccgcatccagcatacagtgacggcctccgtgcgcctcagctacggggaggacctgcagatggactgggatggccgcgggaggctgctggtgaagctgtcccccgtctatgccgggaagacctgcggcctgtgtgggaattacaatggcaaccagggcgacgacttccttaccccctctgggctggcggagccccgggtggaggacttcgggaacgcctggaagctgcacggggactgccaggacctgcagaagcagcacagcgatccctgcgccctcaacccgcgcatgaccaggttctccgaggaggcgtgcgcggtcctgacgtcccccacattcgaggcctgccatcgtgccgtcagcccgctgccctacctgcggaactgccgctacgacgtgtgctcctgctcggacggccgcgagtgcctgtgcggcgccctggccagctatgccgcggcctgcgcggggagaggcgtgcgcgtcgcgtggcgcgagccaggccgctgtgagctgaactgcccgaaaggccaggtgtacctgcagtgcgggaccccctgcaacctgacctgccgctctctctcttacccggatgaggaatgcaatgaggcctgcctggagggctgcttctgccccccagggctctacatggatgagaggggggactgcgtgcccaaggcccagtgcccctgttactatgacggtgagatcttccagccagaagacatcttctcagaccatcacaccatgtgctactgtgaggatggcttcatgcactgtaccatgagtggagtccccggaagcttgctgcctgacgctgtcctcagcagtcccctgtctcatcgcagcaaaaggagcctatcctgtcggccccccatggtcaagctggtgtgtcccgctgacaacctgcgggctgaagggctcgagtgtaccaaaacgtgccagaactatgacctggagtgcatgagcatgggctgtgtctctggctgcctctgccccccgggcatggtccggcatgagaacagatgtgtggccctggaaaggtgtccctgcttccatcagggcaaggagtatgcccctggagaaacagtgaagattggctgcaacacttgtgtctgtcgggaccggaagtggaactgcacagaccatgtgtgtgatgccacgtgctccacgatcggcatggcccactacctcaccttcgacgggctcaaatacctgttccccggggagtgccagtacgttctggtgcaggattactgcggcagtaaccctgggacctttcggatcctagtggggaataagggatgcagccacccctcagtgaaatgcaagaaacgggtcaccatcctggtggagggaggagagattgagctgtttgacggggaggtgaatgtgaagaggcccatgaaggatgagactcactttgaggtggtggagtctggccggtacatcattctgctgctgggcaaagccctctccgtggtctgggaccgccacctgagcatctccgtggtcctgaagcagacataccaggagaaagtgtgtggcctgtgtgggaattttgatggcatccagaacaatgacctcaccagcagcaacctccaagtggaggaagaccctgtggactttgggaactcctggaaagtgagctcgcagtgtgctgacaccagaaaagtgcctctggactcatcccctgccacctgccataacaacatcatgaagcagacgatggtggattcctcctgtagaatccttaccagtgacgtcttccaggactgcaacaagctggtggaccccgagccatatctggatgtctgcatttacgacacctgctcctgtgagtccattggggactgcgcctgcttctgcgacaccattgctgcctatgcccacgtgtgtgcccagcatggcaaggtggtgacctggaggacggccacattgtgcccccagagctgcgaggagaggaatctccgggagaacgggtatgagtgtgagtggcgctataacagctgtgcacctgcctgtcaagtcacgtgtcagcaccctgagccactggcctgccctgtgcagtgtgtggagggctgccatgcccactgccctccagggaaaatcctggatgagcttttgcagacctgcgttgaccctgaagactgtccagtgtgtgaggtggctggccggcgttttgcctcaggaaagaaagtcaccttgaatcccagtgaccctgagcactgccagatttgccactgtgatgttgtcaacctcacctgtgaagcctgccaggagccgggaggcctggtggtgcctcccacagatgccccggtgagccccaccactctgtatgtggaggacatctcggaaccgccgttgcacgatttctactgcagcaggctactggacctggtcttcctgctggatggctcctccaggctgtccgaggctgagtttgaagtgctgaaggcctttgtggtggacatgatggagcggctgcgcatctcccagaagtgggtccgcgtggccgtggtggagtaccacgacggctcccacgcctacatcgggctcaaggaccggaagcgaccgtcagagctgcggcgcattgccagccaggtgaagtatgcgggcagccaggtggcctccaccagcgaggtcttgaaatacacactgttccaaatcttcagcaagatcgaccgccctgaagcctcccgcatcgccctgctcctgatggccagccaggagccccaacggatgtcccggaactttgtccgctacgtccagggcctgaagaagaagaaggtcattgtgatcccggtgggcattgggccccatgccaacctcaagcagatccgcctcatcgagaagcaggcccctgagaacaaggccttcgtgctgagcagtgtggatgagctggagcagcaaagggacgagatcgttagctacctctgtgaccttgcccctgaagcccctcctcctactctgccccccgacatggcacaagtcactgtgggcccggggctcttgggggtttcgaccctggggcccaagaggaactccatggttctggatgtggcgttcgtcctggaaggatcggacaaaattggtgaagccgacttcaacaggagcaaggagttcatggaggaggtgattcagcggatggatgtgggccaggacagcatccacgtcacggtgctgcagtactcctacatggtgaccgtggagtaccccttcagcgaggcacagtccaaaggggacatcctgcagcgggtgcgagagatccgctaccagggcggcaacaggaccaacactgggctggccctgcggtacctctctgaccacagcttcttggtcagccagggtgaccgggagcaggcgcccaacctggtctacatggtcaccggaaatcctgcctctgatgagatcaagaggctgcctggagacatccaggtggtgcccattggagtgggccctaatgccaacgtgcaggagctggagaggattggctggcccaatgcccctatcctcatccaggactttgagacgctcccccgagaggctcctgacctggtgctgcagaggtgctgctccggagaggggctgcagatccccaccctctcccctgcacctgactgcagccagcccctggacgtgatccttctcctggatggctcctccagtttcccagcttcttattttgatgaaatgaagagtttcgccaaggctttcatttcaaaagccaatatagggcctcgtctcactcaggtgtcagtgctgcagtatggaagcatcaccaccattgacgtgccatggaacgtggtcccggagaaagcccatttgctgagccttgtggacgtcatgcagcgggagggaggccccagccaaatcggggatgccttgggctttgctgtgcgatacttgacttcagaaatgcatggtgccaggccgggagcctcaaaggcggtggtcatcctggtcacggacgtctctgtggattcagtggatgcagcagctgatgccgccaggtccaacagagtgacagtgttccctattggaattggagatcgctacgatgcagcccagctacggatcttggcaggcccagcaggcgactccaacgtggtgaagctccagcgaatcgaagacctccctaccatggtcaccttgggcaattccttcctccacaaactgtgctctggatttgttaggatttgcatggatgaggatgggaatgagaagaggcccggggacgtctggaccttgccagaccagtgccacaccgtgacttgccagccagatggccagaccttgctgaagagtcatcgggtcaactgtgaccgggggctgaggccttcgtgccctaacagccagtcccctgttaaagtggaagagacctgtggctgccgctggacctgcccctgtgtgtgcacaggcagctccactcggcacatcgtgacctttgatgggcagaatttcaagctgactggcagctgttcttatgtcctatttcaaaacaaggagcaggacctggaggtgattctccataatggtgcctgcagccctggagcaaggcagggctgcatgaaatccatcgaggtgaagcacagtgccctctccgtcgagctgcacagtgacatggaggtgacggtgaatgggagactggtctctgttccttacgtgggtgggaacatggaagtcaacgtttatggtgccatcatgcatgaggtcagattcaatcaccttggtcacatcttcacattcactccacaaaacaatgagttccaactgcagctcagccccaagacttttgcttcaaagacgtatggtctgtgtgggatctgtgatgagaacggagccaatgacttcatgctgagggatggcacagtcaccacagactggaaaacacttgttcaggaatggactgtgcagcggccagggcagacgtgccagcccatcctggaggagcagtgtcttgtccccgacagctcccactgccaggtcctcctcttaccactgtttgctgaatgccacaaggtcctggctccagccacattctatgccatctgccagcaggacagttgccaccaggagcaagtgtgtgaggtgatcgcctcttatgcccacctctgtcggaccaacggggtctgcgttgactggaggacacctgatttctgtgctatgtcatgcccaccatctctggtctacaaccactgtgagcatggctgtccccggcactgtgatggcaacgtgagctcctgtggggaccatccctccgaaggctgtttctgccctccagataaagtcatgttggaaggcagctgtgtccctgaagaggcctgcactcagtgcattggtgaggatggagtccagcaccaggtaggagcctgggcctttcacttcccatggggctgcttccctcttgggtcaaaagggagatatgttcaccagtgattggcctcttcca

SEQ ID NO: 438996 - DNA, 419 bp, Homo sapiens
gctttatccttgttggcaagccccggcaagtcaagctgtctactgcgtagttggtactagcccgctagagggtggatatccactactgccagggcaaatgtgccagcaaagccatgtactccattgacatcaacgatgtgcaggaccagtgctcctgctgctctccgacacggacggagcccatgcaggtggccctgcactgcaccaatggctctgttgtgtaccatgaggttctcaatgccatggagtgcaaatgctcccccaggaagtgcagcaagtgaggctgctgcagctgcatgggtgcctgctgctgcctgccttggcctgatggccaggccagagtgctgccagtcctctgcatgttctgctcttgtgcccttctgagcccacaataaaggctgagctcttatcttgcaaaa

SEQ ID NO: 438997 - DNA, 229 bp, Homo sapiens
cccttcatcctcctggatttcttgctttgtcttcctccaggtgaatgtgaagaggcccatgaaggatgagactcactttgaggtggtggagtctggccggtacatcattctgctgctgggcaaagccctctccgtggtctgggaccgccacctgagcatctccgtggtcctgaagcagacataccaggtcagtggctttcttgcttcatcttgttggggacttggcctt

SEQ ID NO: 438998 - DNA, 3512 bp, Homo sapiens
tgagtaaatcgatacatcatacgcgcgctcctctggccgcccctccctccgacgcggggaccctggcgggcggcaggaggacatggccagcgacgccgtgcagagtgagcctcgcagctggtccctgctagagcagctgggcctggccggggcagacctggcggcccccggggtacagcagcagctggagctggagcgggagcggctgcggcgggaaatccgcaaggagctgaagctgaaggagggtgctgagaacctgcggcgggccaccactgacctgggccgcagcctgggccccgtagagctgctgctgcggggctcctcgcgccgcctcgacctgctgcaccagcagctgcaggagctgcacgcccacgtggtgcttcccgacccggcggccacccacgatggcccccagtcccctggtgcgggtggccccacctgctcggccaccaacctgagccgcgtggcgggcctggagaagcagttggccattgagctgaaggtgaagcagggggcggagaacatgatccagacctacagcaatggcagcaccaaggaccggaagctgctgctgacagcccagcagatgttgcaggacagtaagaccaagattgacatcatccgcatgcaactccgccgggcgctgcaggccggccagctggagaaccaggcagccccggatgacacccaagggagtcctgacctgggggctgtggagctgcgcatcgaagagctgcggcaccacttccgagtggagcacgcggtggccgagggtgccaagaacgtactgcgcctgctcagcgctgccaaggccccggaccgcaaggcagtcagcgaggcccaggagaaattgacagaatccaaccagaagctggggctgctgcgggaggctctggagcggagacttggggagctgcccgccgaccaccccaaggggcggctgctgcgagaagagctcgctgcggcctcctccgctgccttcagcacccgcctggccgggccctttcccgccacgcactacagcaccctgtgcaagcccgcgccgctcacagggaccctggaggtacgagtggtgggctgcagagacctcccagagaccatcccgtggaaccctaccccctcaatggggggacctgggaccccagacagccgcccccccttcctgagccgcccagcccggggcctttacagccgaagcggaagcctcagtggccggagcagcctcaaagcagaagccgagaacaccagtgaagtcagcactgtgcttaagctggataacacagtggtggggcagacgtcttggaagccatgtggccccaatgcctgggaccagagcttcactctggagctggaaagggcacgggaactggagttggctgtgttctggcgggaccagcggggcctgtgtgccctcaaattcctgaagttggaggatttcttggacaatgagaggcatgaggtgcagctggacatggaaccccagggctgcctggtggctgaggtcaccttccgcaaccctgtcattgagaggattcctcggctccgacggcagaagaaaattttctccaagcagcaagggaaggcgttccagcgtgctaggcagatgaacatcgatgtcgccacgtgggtgcggctgctccggaggctcatccccaatgccacgggcacaggcacctttagccctggggcttctccaggatccgaggcccggaccacgggtgacatatcggtggagaagctgaacctcggcactgactcggacagctcacctcagaagagctcgcgggatcctccttccagcccatcgagcctgagctcccccatccaggaatccactgctcccgagctgccttcggagacccaggagaccccaggccccgccctgtgcagccctctgaggaagtcacctctgaccctcgaagatttcaagttcctggcggtgctgggccggggtcattttgggaaggtgctcctctccgaattccggcccagtggggagctgttcgccatcaaggctctgaagaaaggggacattgtggcccgagacgaggtggagagcctgatgtgtgagaagcggatattggcggcagtgaccagtgcgggacaccccttcctggtgaacctcttcggctgtttccagacaccggagcacgtgtgcttcgtgatggagtactcggccggtggggacctgatgctgcacatccacagcgacgtgttctctgagccccgtgccatcttttattccgcctgcgtggtgctgggcctacagtttcttcacgaacacaagatcgtctacagggacctgaagttggacaatttgctcctggacaccgagggctacgtcaagatcgcagactttggcctctgcaaggaggggatgggctatggggaccggaccagcacattctgtgggaccccggagttcctggcccctgaggtgctgacggacacgtcgtacacgcgagctgtggactggtggggactgggtgtgctgctctacgagatgctggttggcgagtccccattcccaggggatgatgaggaggaggtcttcgacagcatcgtcaacgacgaggttcgctacccccgcttcctgtcggccgaagccatcggcatcatgagaaggctgcttcggaggaacccagagcggaggctgggatctagcgagagagatgcagaagatgtgaagaaacagcccttcttcaggactctgggctgggaagccctgttggcccggcgcctgccaccgccctttgtgcccacgctgtccggccgcaccgacgtcagcaacttcgacgaggagttcaccggggaggcccccacactgagcccgccccgcgacgcgcggcccctcacagccgcggagcaggcagccttcctggacttcgacttcgtggccgggggctgctagccccctcccctgcccctgcccctgcccctgcccgagagctcttagtttttaaaaaggcctttgggatttgccggaaaaaaaaaaaaaaaaaaaaaaaaaaaaaaaaaaaaatctggggggcactcaaaggcggggagggcgggaaaacacgggggaaccaaagggcccacagggcacacaaacgggtctctgggcccaagtttttgggacaaagggggaacaaccgcgcgggaaccccccataaggaggaggggcaacaaaactcgcggaaaacccaggagtaacccggataagacacacccgcgccacacaaacagaagacaaacgaaagaaaaacgagagaacaaaaaaatgtggagaccacaaagcactgggggccaggagacacacagatgaacaaactgtctgacaacacactcagcacactataaaccccacaaaaacaaaataaaacaaaatcataattctatctaaataactttctccactttttccaaatatccataccaaacacataaacacctaaaataacacacatcaaaacaatacaaacgaaaaaccggacaaaacacaactcaacacaaacacgcccaactacaca

SEQ ID NO: 438999 - DNA, 3466 bp, Homo sapiens
cctcagcccggacccaggatggcggaggccaataacccctcggagcaggagctggagagtgagcctcgcagctggtccctgctagagcagctgggcctggccggggcagacctggcggcccccggggtacagcagcagctggagctggagcgggagcggctgcggcgggaaatccgcaaggagctgaagctgaaggagggtgctgagaacctgcggcgggccaccactgacctgggccgcagcctgggccccgtagagctgctgctgcggggctcctcgcgccgcctcgacctgctgcaccagcagctgcaggagctgcacgcccacgtggtgcttcccgacccggcggccacccacgatggcccccagtcccctggtgcgggtggccccacctgctcggccaccaacctgagccgcgtggcgggcctggagaagcagttggccattgagctgaaggtgaagcagggggcggagaacatgatccagacctacagcaatggcagcaccaaggaccggaagctgctgctgacagcccagcagatgttgcaggacagtaagaccaagattgacatcatccgcatgcaactccgccgggcgctgcaggccggccagctggagaaccaggcagccccggatgacacccaagggagtcctgacctgggggctgtggagctgcgcatcgaagagctgcggcaccacttccgagtggagcacgcggtggccgagggtgccaagaacgtactgcgcctgctcagcgctgccaaggccccggaccgcaaggcagtcagcgaggcccaggagaaattgacagaatccaaccagaagctggggctgctgcgggaggctctggagcggagacttggggagctgcccgccgaccaccccaaggggcggctgctgcgagaagagctcgctgcggcctcctccgctgccttcagcacccgcctggccgggccctttcccgccacgcactacagcaccctgtgcaagcccgcgccgctcacagggaccctggaggtacgagtggtgggctgcagagacctcccagagaccatcccgtggaaccctaccccctcaatggggggacctgggaccccagacagccgcccccccttcctgagccgcccagcccggggcctttacagccgaagcggaagcctcagtggccggagcagcctcaaagcagaagccgagaacaccagtgaagtcagcactgtgcttaagctggataacacagtggtggggcagacgtcttggaagccatgtggccccaatgcctgggaccagagcttcactctggagctggaaagggcacgggaactggagttggctgtgttctggcgggaccagcggggcctgtgtgccctcaaattcctgaagttggaggatttcttggacaatgagaggcatgaggtgcagctggacatggaaccccagggctgcctggtggctgaggtcaccttccgcaaccctgtcattgagaggattcctcggctccgacggcagaagaaaattttctccaagcagcaagggaaggcgttccagcgtgctaggcagatgaacatcgatgtcgccacgtgggtgcggctgctccggaggctcatccccaatgccacgggcacaggcacctttagccctggggcttctccaggatccgaggcccggaccacgggtgacatatcggtggagaagctgaacctcggcactgactcggacagctcacctcagaagagctcgcgggatcctccttccagcccatcgagcctgagctcccccatccaggaatccactgctcccgagctgccttcggagacccaggagaccccaggccccgccctgtgcagccctctgaggaagtcacctctgaccctcgaagatttcaagttcctggcggtgctgggccggggtcattttgggaaggtgctcctctccgaattccggcccagtggggagctgttcgccatcaaggctctgaagaaaggggacattgtggcccgagacgaggtggagagcctgatgtgtgagaagcggatattggcggcagtgaccagtgcgggacaccccttcctggtgaacctcttcggctgtttccagacaccggagcacgtgtgcttcgtgatggagtactcggccggtggggacctgatgctgcacatccacagcgacgtgttctctgagccccgtgccatcttttattccgcctgcgtggtgctgggcctacagtttcttcacgaacacaagatcgtctacagggacctgaagttggacaatttgctcctggacaccgagggctacgtcaagatcgcagactttggcctctgcaaggaggggatgggctatggggaccggaccagcacattctgtgggaccccggagttcctggcccctgaggtgctgacggacacgtcgtacacgcgagctgtggactggtggggactgggtgtgctgctctacgagatgctggttggcgagtccccattcccaggggatgatgaggaggaggtcttcgacagcatcgtcaacgacgaggttcgctacccccgcttcctgtcggccgaagccatcggcatcatgagaaggctgcttcggaggaacccagagcggaggctgggatctagcgagagagatgcagaagatgtgaagaaacagcccttcttcaggactctgggctgggaagccctgttggcccggcgcctgccaccgccctttgtgcccacgctgtccggccgcaccgacgtcagcaacttcgacgaggagttcaccggggaggcccccacactgagcccgccccgcgacgcgcggcccctcacagccgcggagcaggcagccttcctggacttcgacttcgtggccgggggctgctagccccctcccctgcccctgcccctgcccctgcccgagagctcttagtttttaaaaaggcctttgggatttgccggaaaaaaaaaaaaaaaaaaaaaaaaaaaaaaaaaaaaatctggggggcactcaaaggcggggagggcgggaaaacacgggggaaccaaagggcccacagggcacacaaacgggtctctgggcccaagtttttgggacaaagggggaacaaccgcgcgggaaccccccataaggaggaggggcaacaaaactcgcggaaaacccaggagtaacccggataagacacacccgcgccacacaaacagaagacaaacgaaagaaaaacgagagaacaaaaaaatgtggagaccacaaagcactgggggccaggagacacacagatgaacaaactgtctgacaacacactcagcacactataaaccccacaaaaacaaaataaaacaaaatcataattctatctaaataactttctccactttttccaaatatccataccaaacacataaacacctaaaataacacacatcaaaacaatacaaacgaaaaaccggacaaaacacaactcaacacaaacacgcccaactacaca

SEQ ID NO: 439000 - DNA, 3626 bp, Homo sapiens
atgaggtgcctggaagggtttgtctccctcaaggcgtaaagcgctaggatttgaatgcagatccgcccagagcttgtctccaggggtcccgggaggcccaaaggcctccgccgctctcggcttgaacgcgtggaaccgttctcctcgggttcccgcgcgctccaatgggggacccctcggcagcgtgcggtcgtctcgggacccggaaagaggaaagagtgagcctcgcagctggtccctgctagagcagctgggcctggccggggcagacctggcggcccccggggtacagcagcagctggagctggagcgggagcggctgcggcgggaaatccgcaaggagctgaagctgaaggagggtgctgagaacctgcggcgggccaccactgacctgggccgcagcctgggccccgtagagctgctgctgcggggctcctcgcgccgcctcgacctgctgcaccagcagctgcaggagctgcacgcccacgtggtgcttcccgacccggcggccacccacgatggcccccagtcccctggtgcgggtggccccacctgctcggccaccaacctgagccgcgtggcgggcctggagaagcagttggccattgagctgaaggtgaagcagggggcggagaacatgatccagacctacagcaatggcagcaccaaggaccggaagctgctgctgacagcccagcagatgttgcaggacagtaagaccaagattgacatcatccgcatgcaactccgccgggcgctgcaggccggccagctggagaaccaggcagccccggatgacacccaagggagtcctgacctgggggctgtggagctgcgcatcgaagagctgcggcaccacttccgagtggagcacgcggtggccgagggtgccaagaacgtactgcgcctgctcagcgctgccaaggccccggaccgcaaggcagtcagcgaggcccaggagaaattgacagaatccaaccagaagctggggctgctgcgggaggctctggagcggagacttggggagctgcccgccgaccaccccaaggggcggctgctgcgagaagagctcgctgcggcctcctccgctgccttcagcacccgcctggccgggccctttcccgccacgcactacagcaccctgtgcaagcccgcgccgctcacagggaccctggaggtacgagtggtgggctgcagagacctcccagagaccatcccgtggaaccctaccccctcaatggggggacctgggaccccagacagccgcccccccttcctgagccgcccagcccggggcctttacagccgaagcggaagcctcagtggccggagcagcctcaaagcagaagccgagaacaccagtgaagtcagcactgtgcttaagctggataacacagtggtggggcagacgtcttggaagccatgtggccccaatgcctgggaccagagcttcactctggagctggaaagggcacgggaactggagttggctgtgttctggcgggaccagcggggcctgtgtgccctcaaattcctgaagttggaggatttcttggacaatgagaggcatgaggtgcagctggacatggaaccccagggctgcctggtggctgaggtcaccttccgcaaccctgtcattgagaggattcctcggctccgacggcagaagaaaattttctccaagcagcaagggaaggcgttccagcgtgctaggcagatgaacatcgatgtcgccacgtgggtgcggctgctccggaggctcatccccaatgccacgggcacaggcacctttagccctggggcttctccaggatccgaggcccggaccacgggtgacatatcggtggagaagctgaacctcggcactgactcggacagctcacctcagaagagctcgcgggatcctccttccagcccatcgagcctgagctcccccatccaggaatccactgctcccgagctgccttcggagacccaggagaccccaggccccgccctgtgcagccctctgaggaagtcacctctgaccctcgaagatttcaagttcctggcggtgctgggccggggtcattttgggaaggtgctcctctccgaattccggcccagtggggagctgttcgccatcaaggctctgaagaaaggggacattgtggcccgagacgaggtggagagcctgatgtgtgagaagcggatattggcggcagtgaccagtgcgggacaccccttcctggtgaacctcttcggctgtttccagacaccggagcacgtgtgcttcgtgatggagtactcggccggtggggacctgatgctgcacatccacagcgacgtgttctctgagccccgtgccatcttttattccgcctgcgtggtgctgggcctacagtttcttcacgaacacaagatcgtctacagggacctgaagttggacaatttgctcctggacaccgagggctacgtcaagatcgcagactttggcctctgcaaggaggggatgggctatggggaccggaccagcacattctgtgggaccccggagttcctggcccctgaggtgctgacggacacgtcgtacacgcgagctgtggactggtggggactgggtgtgctgctctacgagatgctggttggcgagtccccattcccaggggatgatgaggaggaggtcttcgacagcatcgtcaacgacgaggttcgctacccccgcttcctgtcggccgaagccatcggcatcatgagaaggctgcttcggaggaacccagagcggaggctgggatctagcgagagagatgcagaagatgtgaagaaacagcccttcttcaggactctgggctgggaagccctgttggcccggcgcctgccaccgccctttgtgcccacgctgtccggccgcaccgacgtcagcaacttcgacgaggagttcaccggggaggcccccacactgagcccgccccgcgacgcgcggcccctcacagccgcggagcaggcagccttcctggacttcgacttcgtggccgggggctgctagccccctcccctgcccctgcccctgcccctgcccgagagctcttagtttttaaaaaggcctttgggatttgccggaaaaaaaaaaaaaaaaaaaaaaaaaaaaaaaaaaaaatctggggggcactcaaaggcggggagggcgggaaaacacgggggaaccaaagggcccacagggcacacaaacgggtctctgggcccaagtttttgggacaaagggggaacaaccgcgcgggaaccccccataaggaggaggggcaacaaaactcgcggaaaacccaggagtaacccggataagacacacccgcgccacacaaacagaagacaaacgaaagaaaaacgagagaacaaaaaaatgtggagaccacaaagcactgggggccaggagacacacagatgaacaaactgtctgacaacacactcagcacactataaaccccacaaaaacaaaataaaacaaaatcataattctatctaaataactttctccactttttccaaatatccataccaaacacataaacacctaaaataacacacatcaaaacaatacaaacgaaaaaccggacaaaacacaactcaacacaaacacgcccaactacaca

SEQ ID NO: 439001 - DNA, 3470 bp, Homo sapiens
ggctgtacggtccggaaggtctttggatcggaggcaataaccctcggagcaggagctggagagtgagcctcgcagctggtccctgctagagcagctgggcctggccggggcagacctggcggcccccggggtacagcagcagctggagctggagcgggagcggctgcggcgggaaatccgcaaggagctgaagctgaaggagggtgctgagaacctgcggcgggccaccactgacctgggccgcagcctgggccccgtagagctgctgctgcggggctcctcgcgccgcctcgacctgctgcaccagcagctgcaggagctgcacgcccacgtggtgcttcccgacccggcggccacccacgatggcccccagtcccctggtgcgggtggccccacctgctcggccaccaacctgagccgcgtggcgggcctggagaagcagttggccattgagctgaaggtgaagcagggggcggagaacatgatccagacctacagcaatggcagcaccaaggaccggaagctgctgctgacagcccagcagatgttgcaggacagtaagaccaagattgacatcatccgcatgcaactccgccgggcgctgcaggccggccagctggagaaccaggcagccccggatgacacccaagggagtcctgacctgggggctgtggagctgcgcatcgaagagctgcggcaccacttccgagtggagcacgcggtggccgagggtgccaagaacgtactgcgcctgctcagcgctgccaaggccccggaccgcaaggcagtcagcgaggcccaggagaaattgacagaatccaaccagaagctggggctgctgcgggaggctctggagcggagacttggggagctgcccgccgaccaccccaaggggcggctgctgcgagaagagctcgctgcggcctcctccgctgccttcagcacccgcctggccgggccctttcccgccacgcactacagcaccctgtgcaagcccgcgccgctcacagggaccctggaggtacgagtggtgggctgcagagacctcccagagaccatcccgtggaaccctaccccctcaatggggggacctgggaccccagacagccgcccccccttcctgagccgcccagcccggggcctttacagccgaagcggaagcctcagtggccggagcagcctcaaagcagaagccgagaacaccagtgaagtcagcactgtgcttaagctggataacacagtggtggggcagacgtcttggaagccatgtggccccaatgcctgggaccagagcttcactctggagctggaaagggcacgggaactggagttggctgtgttctggcgggaccagcggggcctgtgtgccctcaaattcctgaagttggaggatttcttggacaatgagaggcatgaggtgcagctggacatggaaccccagggctgcctggtggctgaggtcaccttccgcaaccctgtcattgagaggattcctcggctccgacggcagaagaaaattttctccaagcagcaagggaaggcgttccagcgtgctaggcagatgaacatcgatgtcgccacgtgggtgcggctgctccggaggctcatccccaatgccacgggcacaggcacctttagccctggggcttctccaggatccgaggcccggaccacgggtgacatatcggtggagaagctgaacctcggcactgactcggacagctcacctcagaagagctcgcgggatcctccttccagcccatcgagcctgagctcccccatccaggaatccactgctcccgagctgccttcggagacccaggagaccccaggccccgccctgtgcagccctctgaggaagtcacctctgaccctcgaagatttcaagttcctggcggtgctgggccggggtcattttgggaaggtgctcctctccgaattccggcccagtggggagctgttcgccatcaaggctctgaagaaaggggacattgtggcccgagacgaggtggagagcctgatgtgtgagaagcggatattggcggcagtgaccagtgcgggacaccccttcctggtgaacctcttcggctgtttccagacaccggagcacgtgtgcttcgtgatggagtactcggccggtggggacctgatgctgcacatccacagcgacgtgttctctgagccccgtgccatcttttattccgcctgcgtggtgctgggcctacagtttcttcacgaacacaagatcgtctacagggacctgaagttggacaatttgctcctggacaccgagggctacgtcaagatcgcagactttggcctctgcaaggaggggatgggctatggggaccggaccagcacattctgtgggaccccggagttcctggcccctgaggtgctgacggacacgtcgtacacgcgagctgtggactggtggggactgggtgtgctgctctacgagatgctggttggcgagtccccattcccaggggatgatgaggaggaggtcttcgacagcatcgtcaacgacgaggttcgctacccccgcttcctgtcggccgaagccatcggcatcatgagaaggctgcttcggaggaacccagagcggaggctgggatctagcgagagagatgcagaagatgtgaagaaacagcccttcttcaggactctgggctgggaagccctgttggcccggcgcctgccaccgccctttgtgcccacgctgtccggccgcaccgacgtcagcaacttcgacgaggagttcaccggggaggcccccacactgagcccgccccgcgacgcgcggcccctcacagccgcggagcaggcagccttcctggacttcgacttcgtggccgggggctgctagccccctcccctgcccctgcccctgcccctgcccgagagctcttagtttttaaaaaggcctttgggatttgccggaaaaaaaaaaaaaaaaaaaaaaaaaaaaaaaaaaaaatctggggggcactcaaaggcggggagggcgggaaaacacgggggaaccaaagggcccacagggcacacaaacgggtctctgggcccaagtttttgggacaaagggggaacaaccgcgcgggaaccccccataaggaggaggggcaacaaaactcgcggaaaacccaggagtaacccggataagacacacccgcgccacacaaacagaagacaaacgaaagaaaaacgagagaacaaaaaaatgtggagaccacaaagcactgggggccaggagacacacagatgaacaaactgtctgacaacacactcagcacactataaaccccacaaaaacaaaataaaacaaaatcataattctatctaaataactttctccactttttccaaatatccataccaaacacataaacacctaaaataacacacatcaaaacaatacaaacgaaaaaccggacaaaacacaactcaacacaaacacgcccaactacaca

SEQ ID NO: 439002 - DNA, 3212 bp, Homo sapiens
cctcagcccggacccaggatggcggaggccaataacccctcggagcaggagctggagagtgagcctcgcagctggtccctgctagagcagctgggcctggccggggcagacctggcggcccccggggtacagcagcagctggagctggagcgggagcggctgcggcgggaaatccgcaaggagctgaagctgaaggagggtgctgagaacctgcggcgggccaccactgacctgggccgcagcctgggccccgtagagctgctgctgcggggctcctcgcgccgcctcgacctgctgcaccagcagctgcaggagctgcacgcccacgtggtgcttcccgacccggcggccacccacgatggcccccagtcccctggtgcgggtggccccacctgctcggccaccaacctgagccgcgtggcgggcctggagaagcagttggccattgagctgaaggtgaagcagggggcggagaacatgatccagacctacagcaatggcagcaccaaggaccggaagctgctgctgacagcccagcagatgttgcaggacagtaagaccaagattgacatcatccgcatgcaactccgccgggcgctgcaggccggccagctggagaaccaggcagccccggatgacacccaagggagtcctgacctgggggctgtggagctgcgcatcgaagagctgcggcaccacttccgagtggagcacgcggtggccgagggtgccaagaacgtactgcgcctgctcagcgctgccaaggccccggaccgcaaggcagtcagcgaggcccaggagaaattgacagaatccaaccagaagctggggctgctgcgggaggctctggagcggagacttggggagctgcccgccgaccaccccaaggggcggctgctgcgagaagagctcgctgcggcctcctccgctgccttcagcacccgcctggccgggccctttcccgccacgcactacagcaccctgtgcaagcccgcgccgctcacagggaccctggaggtacgagtggtgggctgcagagacctcccagagaccatcccgtggaaccctaccccctcaatggggggacctgggaccccagacagccgcccccccttcctgagccgcccagcccggggcctttacagccgaagcggaagcctcagtggccggagcagcctcaaagcagaagccgagaacaccagtcaccttccgcaaccctgtcattgagaggattcctcggctccgacggcagaagaaaattttctccaagcagcaagggaaggcgttccagcgtgctaggcagatgaacatcgatgtcgccacgtgggtgcggctgctccggaggctcatccccaatgccacgggcacaggcacctttagccctggggcttctccaggatccgaggcccggaccacgggtgacatatcggtggagaagctgaacctcggcactgactcggacagctcacctcagaagagctcgcgggatcctccttccagcccatcgagcctgagctcccccatccaggaatccactgctcccgagctgccttcggagacccaggagaccccaggccccgccctgtgcagccctctgaggaagtcacctctgaccctcgaagatttcaagttcctggcggtgctgggccggggtcattttgggaaggtgctcctctccgaattccggcccagtggggagctgttcgccatcaaggctctgaagaaaggggacattgtggcccgagacgaggtggagagcctgatgtgtgagaagcggatattggcggcagtgaccagtgcgggacaccccttcctggtgaacctcttcggctgtttccagacaccggagcacgtgtgcttcgtgatggagtactcggccggtggggacctgatgctgcacatccacagcgacgtgttctctgagccccgtgccatcttttattccgcctgcgtggtgctgggcctacagtttcttcacgaacacaagatcgtctacagggacctgaagttggacaatttgctcctggacaccgagggctacgtcaagatcgcagactttggcctctgcaaggaggggatgggctatggggaccggaccagcacattctgtgggaccccggagttcctggcccctgaggtgctgacggacacgtcgtacacgcgagctgtggactggtggggactgggtgtgctgctctacgagatgctggttggcgagtccccattcccaggggatgatgaggaggaggtcttcgacagcatcgtcaacgacgaggttcgctacccccgcttcctgtcggccgaagccatcggcatcatgagaaggctgcttcggaggaacccagagcggaggctgggatctagcgagagagatgcagaagatgtgaagaaacagcccttcttcaggactctgggctgggaagccctgttggcccggcgcctgccaccgccctttgtgcccacgctgtccggccgcaccgacgtcagcaacttcgacgaggagttcaccggggaggcccccacactgagcccgccccgcgacgcgcggcccctcacagccgcggagcaggcagccttcctggacttcgacttcgtggccgggggctgctagccccctcccctgcccctgcccctgcccctgcccgagagctcttagtttttaaaaaggcctttgggatttgccggaaaaaaaaaaaaaaaaaaaaaaaaaaaaaaaaaaaaatctggggggcactcaaaggcggggagggcgggaaaacacgggggaaccaaagggcccacagggcacacaaacgggtctctgggcccaagtttttgggacaaagggggaacaaccgcgcgggaaccccccataaggaggaggggcaacaaaactcgcggaaaacccaggagtaacccggataagacacacccgcgccacacaaacagaagacaaacgaaagaaaaacgagagaacaaaaaaatgtggagaccacaaagcactgggggccaggagacacacagatgaacaaactgtctgacaacacactcagcacactataaaccccacaaaaacaaaataaaacaaaatcataattctatctaaataactttctccactttttccaaatatccataccaaacacataaacacctaaaataacacacatcaaaacaatacaaacgaaaaaccggacaaaacacaactcaacacaaacacgcccaactacaca

SEQ ID NO: 439003 - DNA, 1997 bp, Homo sapiens
agaccttacggctaaggtacgaggcctgggtggctgagaagaaaatttctccaagcagcaagggaaggcgttccagcgtgctaggcagatgaacatcgatgtcgccacgtgggtgcggctgctccggaggctcatccccaatgccacgggcacaggcacctttagccctggggcttctccaggatccgaggcccggaccacgggtgacatatcggtggagaagctgaacctcggcactgactcggacagctcacctcagaagagctcgcgggatcctccttccagcccatcgagcctgagctcccccatccaggaatccactgctcccgagctgccttcggagacccaggagaccccaggccccgccctgtgcagccctctgaggaagtcacctctgaccctcgaagatttcaagttcctggcggtgctgggccggggtcattttgggaaggtgctcctctccgaattccggcccagtggggagctgttcgccatcaaggctctgaagaaaggggacattgtggcccgagacgaggtggagagcctgatgtgtgagaagcggatattggcggcagtgaccagtgcgggacaccccttcctggtgaacctcttcggctgtttccagacaccggagcacgtgtgcttcgtgatggagtactcggccggtggggacctgatgctgcacatccacagcgacgtgttctctgagccccgtgccatcttttattccgcctgcgtggtgctgggcctacagtttcttcacgaacacaagatcgtctacagggacctgaagttggacaatttgctcctggacaccgagggctacgtcaagatcgcagactttggcctctgcaaggaggggatgggctatggggaccggaccagcacattctgtgggaccccggagttcctggcccctgaggtgctgacggacacgtcgtacacgcgagctgtggactggtggggactgggtgtgctgctctacgagatgctggttggcgagtccccattcccaggggatgatgaggaggaggtcttcgacagcatcgtcaacgacgaggttcgctacccccgcttcctgtcggccgaagccatcggcatcatgagaaggctgcttcggaggaacccagagcggaggctgggatctagcgagagagatgcagaagatgtgaagaaacagcccttcttcaggactctgggctgggaagccctgttggcccggcgcctgccaccgccctttgtgcccacgctgtccggccgcaccgacgtcagcaacttcgacgaggagttcaccggggaggcccccacactgagcccgccccgcgacgcgcggcccctcacagccgcggagcaggcagccttcctggacttcgacttcgtggccgggggctgctagccccctcccctgcccctgcccctgcccctgcccgagagctcttagtttttaaaaaggcctttgggatttgccggaaaaaaaaaaaaaaaaaaaaaaaaaaaaaaaaaaaaatctggggggcactcaaaggcggggagggcgggaaaacacgggggaaccaaagggcccacagggcacacaaacgggtctctgggcccaagtttttgggacaaagggggaacaaccgcgcgggaaccccccataaggaggaggggcaacaaaactcgcggaaaacccaggagtaacccggataagacacacccgcgccacacaaacagaagacaaacgaaagaaaaacgagagaacaaaaaaatgtggagaccacaaagcactgggggccaggagacacacagatgaacaaactgtctgacaacacactcagcacactataaaccccacaaaaacaaaataaaacaaaatcataattctatctaaataactttctccactttttccaaatatccataccaaacacataaacacctaaaataacacacatcaaaacaatacaaacgaaaaaccggacaaaacacaactcaacacaaacacgcccaactacaca

SEQ ID NO: 439004 - DNA, 1689 bp, Homo sapiens
  misc_feature (13)..(13): n is a, c, g, or t
  misc_feature (68)..(68): n is a, c, g, or t
  misc_feature (80)..(80): n is a, c, g, or t
  misc_feature (87)..(88): n is a, c, g, or t
  misc_feature (104)..(104): n is a, c, g, or t
  misc_feature (108)..(108): n is a, c, g, or t
  misc_feature (113)..(113): n is a, c, g, or t
  misc_feature (142)..(142): n is a, c, g, or t
ctccaccctcganctggtccccatcaagatcaacgtccgagctgctcgaaaccagaaacccagccccncctggcagcctntgagaannacttttacctcgaagntttnaagtnctgcggtgctgggccgggtcattttgggnagtgctcctctccgaattccggcccagtggggagctgttcgccatcaaggctctgaagaaaggggacattgtggcccgagacgaggtggagagcctgatgtgtgagaagcggatattggcggcagtgaccagtgcgggacaccccttcctggtgaacctcttcggctgtttccagacaccggagcacgtgtgcttcgtgatggagtactcggccggtggggacctgatgctgcacatccacagcgacgtgttctctgagccccgtgccatcttttattccgcctgcgtggtgctgggcctacagtttcttcacgaacacaagatcgtctacagggacctgaagttggacaatttgctcctggacaccgagggctacgtcaagatcgcagactttggcctctgcaaggaggggatgggctatggggaccggaccagcacattctgtgggaccccggagttcctggcccctgaggtgctgacggacacgtcgtacacgcgagctgtggactggtggggactgggtgtgctgctctacgagatgctggttggcgagtccccattcccaggggatgatgaggaggaggtcttcgacagcatcgtcaacgacgaggttcgctacccccgcttcctgtcggccgaagccatcggcatcatgagaaggctgcttcggaggaacccagagcggaggctgggatctagcgagagagatgcagaagatgtgaagaaacagcccttcttcaggactctgggctgggaagccctgttggcccggcgcctgccaccgccctttgtgcccacgctgtccggccgcaccgacgtcagcaacttcgacgaggagttcaccggggaggcccccacactgagcccgccccgcgacgcgcggcccctcacagccgcggagcaggcagccttcctggacttcgacttcgtggccgggggctgctagccccctcccctgcccctgcccctgcccctgcccgagagctcttagtttttaaaaaggcctttgggatttgccggaaaaaaaaaaaaaaaaaaaaaaaaaaaaaaaaaaaaatctggggggcactcaaaggcggggagggcgggaaaacacgggggaaccaaagggcccacagggcacacaaacgggtctctgggcccaagtttttgggacaaagggggaacaaccgcgcgggaaccccccataaggaggaggggcaacaaaactcgcggaaaacccaggagtaacccggataagacacacccgcgccacacaaacagaagacaaacgaaagaaaaacgagagaacaaaaaaatgtggagaccacaaagcactgggggccaggagacacacagatgaacaaactgtctgacaacacactcagcacactataaaccccacaaaaacaaaataaaacaaaatcataattctatctaaataactttctccactttttccaaatatccataccaaacacataaacacctaaaataacacacatcaaaacaatacaaacgaaaaaccggacaaaacacaactcaacacaaacacgcccaactacaca

SEQ ID NO: 439005 - DNA, 1860 bp, Homo sapiens
cttgcagggcctcggaggctgctgtggttatgagggcatctctgactccccttactctggcctcctctctccgccacagagctcccccatccaggaatccactgctcccgagctgccttcggagacccaggagaccccaggccccgccctgtgcagccctctgaggaagtcacctctgaccctcgaagatttcaagttcctggcggtgctgggccggggtcattttgggaaggtgaggtggagggcagggaattgggagaccccccaggtccctggctggccgctaaaaccacccctgcccactgtggttccaggtgctcctctccgaattccggcccagtggggagctgttcgccatcaaggctctgaagaaaggggacattgtggcccgagacgaggtggagagcctgatgtgtgagaagcggatattggcggcagtgaccagtgcgggacaccccttcctggtgaacctcttcggctgtttccagacaccggagcacgtgtgcttcgtgatggagtactcggccggtggggacctgatgctgcacatccacagcgacgtgttctctgagccccgtgccatcttttattccgcctgcgtggtgctgggcctacagtttcttcacgaacacaagatcgtctacagggacctgaagttggacaatttgctcctggacaccgagggctacgtcaagatcgcagactttggcctctgcaaggaggggatgggctatggggaccggaccagcacattctgtgggaccccggagttcctggcccctgaggtgctgacggacacgtcgtacacgcgagctgtggactggtggggactgggtgtgctgctctacgagatgctggttggcgagtccccattcccaggggatgatgaggaggaggtcttcgacagcatcgtcaacgacgaggttcgctacccccgcttcctgtcggccgaagccatcggcatcatgagaaggctgcttcggaggaacccagagcggaggctgggatctagcgagagagatgcagaagatgtgaagaaacagcccttcttcaggactctgggctgggaagccctgttggcccggcgcctgccaccgccctttgtgcccacgctgtccggccgcaccgacgtcagcaacttcgacgaggagttcaccggggaggcccccacactgagcccgccccgcgacgcgcggcccctcacagccgcggagcaggcagccttcctggacttcgacttcgtggccgggggctgctagccccctcccctgcccctgcccctgcccctgcccgagagctcttagtttttaaaaaggcctttgggatttgccggaaaaaaaaaaaaaaaaaaaaaaaaaaaaaaaaaaaaatctggggggcactcaaaggcggggagggcgggaaaacacgggggaaccaaagggcccacagggcacacaaacgggtctctgggcccaagtttttgggacaaagggggaacaaccgcgcgggaaccccccataaggaggaggggcaacaaaactcgcggaaaacccaggagtaacccggataagacacacccgcgccacacaaacagaagacaaacgaaagaaaaacgagagaacaaaaaaatgtggagaccacaaagcactgggggccaggagacacacagatgaacaaactgtctgacaacacactcagcacactataaaccccacaaaaacaaaataaaacaaaatcataattctatctaaataactttctccactttttccaaatatccataccaaacacataaacacctaaaataacacacatcaaaacaatacaaacgaaaaaccggacaaaacacaactcaacacaaacacgcccaactacaca

SEQ ID NO: 439006 - DNA, 2714 bp, Homo sapiens
cctcagcccggacccaggatggcggaggccaataacccctcggagcaggagctggagagtgagcctcgcagctggtccctgctagagcagctgggcctggccggggcagacctggcggcccccggggtacagcagcagctggagctggagcgggagcggctgcggcgggaaatccgcaaggagctgaagctgaaggagggtgctgagaacctgcggcgggccaccactgacctgggccgcagcctgggccccgtagagctgctgctgcggggctcctcgcgccgcctcgacctgctgcaccagcagctgcaggagctgcacgcccacgtggtgcttcccgacccggcggccacccacgatggcccccagtcccctggtgcgggtggccccacctgctcggccaccaacctgagccgcgtggcgggcctggagaagcagttggccattgagctgaaggtgaagcagggggcggagaacatgatccagacctacagcaatggcagcaccaaggaccggaagctgctgctgacagcccagcagatgttgcaggacagtaagaccaagattgacatcatccgcatgcaactccgccgggcgctgcaggccggccagctggagaaccaggcagccccggatgacacccaagggagtcctgacctgggggctgtggagctgcgcatcgaagagctgcggcaccacttccgagtggagcacgcggtggccgagggtgccaagaacgtactgcgcctgctcagcgctgccaaggccccggaccgcaaggcagtcagcgaggcccaggagaaattgacagaatccaaccagaagctggggctgctgcgggaggctctggagcggagacttggggagctgcccgccgaccaccccaaggggcggctgctgcgagaagagctcgctgcggcctcctccgctgccttcagcacccgcctggccgggccctttcccgccacgcactacagcaccctgtgcaagcccgcgccgctcacagggaccctggaggtacgagtggtgggctgcagagacctcccagagaccatcccgtggaaccctaccccctcaatggggggacctgggaccccagacagccgcccccccttcctgagccgcccagcccggggcctttacagccgaagcggaagcctcagtggccggagcagcctcaaagcagaagccgagaacaccagtgaagtcagcactgtgcttaagctggataacacagtggtggggcagacgtcttggaagccatgtggccccaatgcctgggaccagagcttcactctggagctggaaagggcacgggaactggagttggctgtgttctggcgggaccagcggggcctgtgtgccctcaaattcctgaagttggaggatttcttggacaatgagaggcatgaggtgcagctggacatggaaccccagggctgcctggtggctgaggtcaccttccgcaaccctgtcattgagaggattcctcggctccgacggcagaagaaaattttctccaagcagcaagggaaggcgttccagcgtgctaggcagatgaacatcgatgtcgccacgtgggtgcggctgctccggaggctcatccccaatgccacgggcacaggcacctttagccctggggcttctccaggatccgaggcccggaccacgggtgacatatcggtggagaagctgaacctcggcactgactcggacagctcacctcagaagagctcgcgggatcctccttccagcccatcgagcctgagctcccccatccaggaatccactgctcccgagctgccttcggagacccaggagaccccaggccccgccctgtgcagccctctgaggaagtcacctctgaccctcgaagatttcaagttcctggcggtgctgggccggggtcattttgggaaggtgctcctctccgaattccggcccagtggggagctgttcgccatcaaggctctgaagaaaggggacattgtggcccgagacgaggtggagagcctgatgtgtgagaagcggatattggcggcagtgaccagtgcgggacaccccttcctggtgaacctcttcggctgtttccagacaccggagcacgtgtgcttcgtgatggagtactcggccggtggggacctgatgctgcacatccacagcgacgtgttctctgagccccgtgccatcttttattccgcctgcgtggtgctgggcctacagtttcttcacgaacacaagatcgtctacagggacctgaagttggacaatttgctcctggacaccgagggctacgtcaagatcgcagactttggcctctgcaaggaggggatgggctatggggaccggaccagcacattctgtgggaccccggagttcctggcccctgaggtgctgacggacacgtcgtacacgcgagctgtggactggtggggactgggtgtgctgctctacgagatgctggttggcgagtccccattcccaggggatgatgaggaggaggtcttcgacagcatcgtcaacgacgaggttcgctacccccgcttcctgtcggccgaagccatcggcatcatgagaaggctgcttcggaggaacccagagcggaggctgggatctagcgagagagatgcagaagatgtgaagaaacagcccttcttcaggactctgggcatgggaagcccatattgttccgcgcactccaccgtcactctgag

SEQ ID NO: 439007 - DNA, 3163 bp, Homo sapiens
cctcagcccggacccaggatggcggaggccaataacccctcggagcaggagctggagagtgagcctcgcagctggtccctgctagagcagctgggcctggccggggcagacctggcggcccccggggtacagcagcagctggagctggagcgggagcggctgcggcgggaaatccgcaaggagctgaagctgaaggagggtgctgagaacctgcggcgggccaccactgacctgggccgcagcctgggccccgtagagctgctgctgcggggctcctcgcgccgcctcgacctgctgcaccagcagctgcaggagctgcacgcccacgtggtgcttcccgacccggcggccacccacgatggcccccagtcccctggtgcgggtggccccacctgctcggccaccaacctgagccgcgtggcgggcctggagaagcagttggccattgagctgaaggtgaagcagggggcggagaacatgatccagacctacagcaatggcagcaccaaggaccggaagctgctgctgacagcccagcagatgttgcaggacagtaagaccaagattgacatcatccgcatgcaactccgccgggcgctgcaggccggccagctggagaaccaggcagccccggatgacacccaagggagtcctgacctgggggctgtggagctgcgcatcgaagagctgcggcaccacttccgagtggagcacgcggtggccgagggtgccaagaacgtactgcgcctgctcagcgctgccaaggccccggaccgcaaggcagtcagcgaggcccaggagaaattgacagaatccaaccagaagctggggctgctgcgggaggctctggagcggagacttggggagctgcccgccgaccaccccaaggggcggctgctgcgagaagagctcgctgcggcctcctccgctgccttcagcacccgcctggccgggccctttcccgccacgcactacagcaccctgtgcaagcccgcgccgctcacagggaccctggaggtacgagtggtgggctgcagagacctcccagagaccatcccgtggaaccctaccccctcaatggggggacctgggaccccagacagccgcccccccttcctgagccgcccagcccggggcctttacagccgaagcggaagcctcagtggccggagcagcctcaaagcagaagccgagaacaccagtgaagtcagcactgtgcttaagctggataacacagtggtggggcagacgtcttggaagccatgtggccccaatgcctgggaccagagcttcactctggagctggaaagggcacgggaactggagttggctgtgttctggcgggaccagcggggcctgtgtgccctcaaattcctgaagttggaggatttcttggacaatgagaggcatgaggtgcagctggacatggaaccccagggctgcctggtggctgaggtcaccttccgcaaccctgtcattgagaggattcctcggctccgacggcagaagaaaattttctccaagcagcaagggaaggcgttccagcgtgctaggcagatgaacatcgatgtcgccacgtgggtgcggctgctccggaggctcatccccaatgccacgggcacaggcacctttagccctggggcttctccaggatccgaggcccggaccacgggtgacatatcggtggagaagctgaacctcggcactgactcggacagctcacctcagaagagctcgcgggatcctccttccagcccatcgagcctgagctcccccatccaggaatccactgctcccgagctgccttcggagacccaggagaccccaggccccgccctgtgcagccctctgaggaagtcacctctgaccctcgaagatttcaagttcctggcggtgctgggccggggtcattttgggaaggtgctcctctccgaattccggcccagtggggagctgttcgccatcaaggctctgaagaaaggggacattgtggcccgagacgaggtggagagcctgatgtgtgagaagcggatattggcggcagtgaccagtgcgggacaccccttcctggtgaacctcttcggctgtttccagacaccggagcacgtgtgcttcgtgatggagtactcggccggtggggacctgatgctgcacatccacagcgacgtgttctctgagccccgtgccatcttttattccgcctgcgtggtgctgggcctacagtttcttcacgaacacaagatcgtctacagggacctgaagttggacaatttgctcctggacaccgagggctacgtcaagatcgcagactttggcctctgcaaggaggggatgggctatggggaccggaccagcacattctgtgggaccccggagttcctggcccctgaggtgctgacggacacgtcgtacacgctgtccggccgcaccgacgtcagcaacttcgacgaggagttcaccggggaggcccccacactgagcccgccccgcgacgcgcggcccctcacagccgcggagcaggcagccttcctggacttcgacttcgtggccgggggctgctagccccctcccctgcccctgcccctgcccctgcccgagagctcttagtttttaaaaaggcctttgggatttgccggaaaaaaaaaaaaaaaaaaaaaaaaaaaaaaaaaaaaatctggggggcactcaaaggcggggagggcgggaaaacacgggggaaccaaagggcccacagggcacacaaacgggtctctgggcccaagtttttgggacaaagggggaacaaccgcgcgggaaccccccataaggaggaggggcaacaaaactcgcggaaaacccaggagtaacccggataagacacacccgcgccacacaaacagaagacaaacgaaagaaaaacgagagaacaaaaaaatgtggagaccacaaagcactgggggccaggagacacacagatgaacaaactgtctgacaacacactcagcacactataaaccccacaaaaacaaaataaaacaaaatcataattctatctaaataactttctccactttttccaaatatccataccaaacacataaacacctaaaataacacacatcaaaacaatacaaacgaaaaaccggacaaaacacaactcaacacaaacacgcccaactacaca

SEQ ID NO: 439008 - DNA, 1191 bp, Homo sapiens
  misc_feature (54)..(54): n is a, c, g, or t
ggatatcgtcgacccacgccgctcggatcgcagactttggcctctgcaaggagnggatgggctatggggaccggaccagcacattctgtgggaccccggagttcctggcccctgaggtgctgacggacacgtcgtacacgcgagctgtggactggtggggactgggtgtgctgctctacgagatgctggttggcgagtccccattcccaggggatgatgaggaggaggtcttcgacagcatcgtcaacgacgaggttcgctacccccgcttcctgtcggccgaagccatcggcatcatgagaaggctgcttcggaggaacccagagcggaggctgggatctagcgagagagatgcagaagatgtgaagaaacagcccttcttcaggactctgggctgggaagccctgttggcccggcgcctgccaccgccctttgtgcccacgctgtccggccgcaccgacgtcagcaacttcgacgaggagttcaccggggaggcccccacactgagcccgccccgcgacgcgcggcccctcacagccgcggagcaggcagccttcctggacttcgacttcgtggccgggggctgctagccccctcccctgcccctgcccctgcccctgcccgagagctcttagtttttaaaaaggcctttgggatttgccggaaaaaaaaaaaaaaaaaaaaaaaaaaaaaaaaaaaaatctggggggcactcaaaggcggggagggcgggaaaacacgggggaaccaaagggcccacagggcacacaaacgggtctctgggcccaagtttttgggacaaagggggaacaaccgcgcgggaaccccccataaggaggaggggcaacaaaactcgcggaaaacccaggagtaacccggataagacacacccgcgccacacaaacagaagacaaacgaaagaaaaacgagagaacaaaaaaatgtggagaccacaaagcactgggggccaggagacacacagatgaacaaactgtctgacaacacactcagcacactataaaccccacaaaaacaaaataaaacaaaatcataattctatctaaataactttctccactttttccaaatatccataccaaacacataaacacctaaaataacacacatcaaaacaatacaaacgaaaaaccggacaaaacacaactcaacacaaacacgcccaactacaca

SEQ ID NO: 439009 - DNA, 2307 bp, Homo sapiens
cctcagcccggacccaggatggcggaggccaataacccctcggagcaggagctggagagtgagcctcgcagctggtccctgctagagcagctgggcctggccggggcagacctggcggcccccggggtacagcagcagctggagctggagcgggagcggctgcggcgggaaatccgcaaggagctgaagctgaaggagggtgctgagaacctgcggcgggccaccactgacctgggccgcagcctgggccccgtagagctgctgctgcggggctcctcgcgccgcctcgacctgctgcaccagcagctgcaggagctgcacgcccacgtggtgcttcccgacccggcggccacccacgatggcccccagtcccctggtgcgggtggccccacctgctcggccaccaacctgagccgcgtggcgggcctggagaagcagttggccattgagctgaaggtgaagcagggggcggagaacatgatccagacctacagcaatggcagcaccaaggaccggaagctgctgctgacagcccagcagatgttgcaggacagtaagaccaagattgacatcatccgcatgcaactccgccgggcgctgcaggccggccagctggagaaccaggcagccccggatgacacccaagggagtcctgacctgggggctgtggagctgcgcatcgaagagctgcggcaccacttccgagtggagcacgcggtggccgagggtgccaagaacgtactgcgcctgctcagcgctgccaaggccccggaccgcaaggcagtcagcgaggcccaggagaaattgacagaatccaaccagaagctggggctgctgcgggaggctctggagcggagacttggggagctgcccgccgaccaccccaaggggcggctgctgcgagaagagctcgctgcggcctcctccgctgccttcagcacccgcctggccgggccctttcccgccacgcactacagcaccctgtgcaagcccgcgccgctcacagggaccctggaggtacgagtggtgggctgcagagacctcccagagaccatcccgtggaaccctaccccctcaatggggggacctgggaccccagacagccgcccccccttcctgagccgcccagcccggggcctttacagccgaagcggaagcctcagtggccggagcagcctcaaagcagaagccgagaacaccagtgaagtcagcactgtgcttaagctggataacacagtggtggggcagacgtcttggaagccatgtggccccaatgcctgggaccagagcttcactctggagctggaaagggcacgggaactggagttggctgtgttctggcgggaccagcggggcctgtgtgccctcaaattcctgaagttggaggatttcttggacaatgagaggcatgaggtgcagctggacatggaaccccagggctgcctggtggctgaggtcaccttccgcaaccctgtcattgagaggattcctcggctccgacggcagaagaaaattttctccaagcagcaagggaaggcgttccagcgtgctaggcagatgaacatcgatgtcgccacgtgggtgcggctgctccggaggctcatccccaatgccacgggcacaggcacctttagccctggggcttctccaggatccgaggcccggaccacgggtgacatatcggtggagaagctgaacctcggcactgactcggacagctcacctcagaagagctcgcgggatcctccttccagcccatcgagcctgagctcccccatccaggaatccactgctcccgagctgccttcggagacccaggagaccccaggccccgccctgtgcagccctctgaggaagtcacctctgaccctcgaagatttcaagttcctggcggtgctgggccggggtcattttgggaaggtgctcctctccgaattccggcccagtggggagctgttcgccatcaaggctctgaagaaaggggacattgtggcccgagacgaggtggagagcctgatgtgtgagaagcggatattggcggcagtgaccagtgcgggacaccccttcctggtgaacctcttcggctgtttccagacaccggagcacgtgtgcttcgtgatggagtactcggccggtggggacctgatgctgcacatccacagcgacgtgttctctgagccccgtgccatcttttatttccccctgcccccccccttttgtgccccacgctggtcccggccgcacaccgaatttaagaaaactttttaacgaaggaggtttcacccgggggggggccccccccacaac

SEQ ID NO: 439010 - DNA, 2649 bp, Homo sapiens
cctcagcccggacccaggatggcggaggccaataacccctcggagcaggagctggagagtgagcctcgcagctggtccctgctagagcagctgggcctggccggggcagacctggcggcccccggggtacagcagcagctggagctggagcgggagcggctgcggcgggaaatccgcaaggagctgaagctgaaggagggtgctgagaacctgcggcgggccaccactgacctgggccgcagcctgggccccgtagagctgctgctgcggggctcctcgcgccgcctcgacctgctgcaccagcagctgcaggagctgcacgcccacgtggtgcttcccgacccggcggccacccacgatggcccccagtcccctggtgcgggtggccccacctgctcggccaccaacctgagccgcgtggcgggcctggagaagcagttggccattgagctgaaggtgaagcagggggcggagaacatgatccagacctacagcaatggcagcaccaaggaccggaagctgctgctgacagcccagcagatgttgcaggacagtaagaccaagattgacatcatccgcatgcaactccgccgggcgctgcaggccggccagctggagaaccaggcagccccggatgacacccaagggagtcctgacctgggggctgtggagctgcgcatcgaagagctgcggcaccacttccgagtggagcacgcggtggccgagggtgccaagaacgtactgcgcctgctcagcgctgccaaggccccggaccgcaaggcagtcagcgaggcccaggagaaattgacagaatccaaccagaagctggggctgctgcgggaggctctggagcggagacttggggagctgcccgccgaccaccccaaggggcggctgctgcgagaagagctcgctgcggcctcctccgctgccttcagcacccgcctggccgggccctttcccgccacgcactacagcaccctgtgcaagcccgcgccgctcacagggaccctggaggtacgagtggtgggctgcagagacctcccagagaccatcccgtggaaccctaccccctcaatggggggacctgggaccccagacagccgcccccccttcctgagccgcccagcccggggcctttacagccgaagcggaagcctcagtggccggagcagcctcaaagcagaagccgagaacaccagtgaagtcagcactgtgcttaagctggataacacagtggtggggcagacgtcttggaagccatgtggccccaatgcctgggaccagagcttcactctggagctggaaagggcacgggaactggagttggctgtgttctggcgggaccagcggggcctgtgtgccctcaaattcctgaagttggaggatttcttggacaatgagaggcatgaggtgcagctggacatggaaccccagggctgcctggtggctgaggtcaccttccgcaaccctgtcattgagaggattcctcggctccgacggcagaagaaaattttctccaagcagcaagggaaggcgttccagcgtgctaggcagatgaacatcgatgtcgccacgtgggtgcggctgctccggaggctcatccccaatgccacgggcacaggcacctttagccctggggcttctccaggatccgaggcccggaccacgggtgacatatcggtggagaagctgaacctcggcactgactcggacagctcacctcagaagagctcgcgggatcctccttccagcccatcgagcctgagctcccccatccaggaatccactgctcccgagctgccttcggagacccaggagaccccaggccccgccctgtgcagactctgggctgggaagccctgttggcccggcgcctgccaccgccctttgtgcccacgctgtccggccgcaccgacgtcagcaacttcgacgaggagttcaccggggaggcccccacactgagcccgccccgcgacgcgcggcccctcacagccgcggagcaggcagccttcctggacttcgacttcgtggccgggggctgctagccccctcccctgcccctgcccctgcccctgcccgagagctcttagtttttaaaaaggcctttgggatttgccggaaaaaaaaaaaaaaaaaaaaaaaaaaaaaaaaaaaaatctggggggcactcaaaggcggggagggcgggaaaacacgggggaaccaaagggcccacagggcacacaaacgggtctctgggcccaagtttttgggacaaagggggaacaaccgcgcgggaaccccccataaggaggaggggcaacaaaactcgcggaaaacccaggagtaacccggataagacacacccgcgccacacaaacagaagacaaacgaaagaaaaacgagagaacaaaaaaatgtggagaccacaaagcactgggggccaggagacacacagatgaacaaactgtctgacaacacactcagcacactataaaccccacaaaaacaaaataaaacaaaatcataattctatctaaataactttctccactttttccaaatatccataccaaacacataaacacctaaaataacacacatcaaaacaatacaaacgaaaaaccggacaaaacacaactcaacacaaacacgcccaactacaca

SEQ ID NO: 439011 - DNA, 1057 bp, Homo sapiens
ttacgaggcatatgtcgacgaggccgtcggtgtgctgcgtctgacgagatgctggttggcgagtccccattcccaggggatgatgaggaggaggtcttcgacagcatcgtcaacgacgaggttcgctacccccgcttcctgtcggccgaagccatcggcatcatgagaaggctgcttcggaggaacccagagcggaggctgggatctagcgagagagatgcagaagatgtgaagaaacagcccttcttcaggactctgggctgggaagccctgttggcccggcgcctgccaccgccctttgtgcccacgctgtccggccgcaccgacgtcagcaacttcgacgaggagttcaccggggaggcccccacactgagcccgccccgcgacgcgcggcccctcacagccgcggagcaggcagccttcctggacttcgacttcgtggccgggggctgctagccccctcccctgcccctgcccctgcccctgcccgagagctcttagtttttaaaaaggcctttgggatttgccggaaaaaaaaaaaaaaaaaaaaaaaaaaaaaaaaaaaaatctggggggcactcaaaggcggggagggcgggaaaacacgggggaaccaaagggcccacagggcacacaaacgggtctctgggcccaagtttttgggacaaagggggaacaaccgcgcgggaaccccccataaggaggaggggcaacaaaactcgcggaaaacccaggagtaacccggataagacacacccgcgccacacaaacagaagacaaacgaaagaaaaacgagagaacaaaaaaatgtggagaccacaaagcactgggggccaggagacacacagatgaacaaactgtctgacaacacactcagcacactataaaccccacaaaaacaaaataaaacaaaatcataattctatctaaataactttctccactttttccaaatatccataccaaacacataaacacctaaaataacacacatcaaaacaatacaaacgaaaaaccggacaaaacacaactcaacacaaacacgcccaactacaca

SEQ ID NO: 439012 - DNA, 1284 bp, Homo sapiens
cctcagcccggacccaggatggcggaggccaataacccctcggagcaggagctggagagtgagcctcgcagctggtccctgctagagcagctgggcctggccggggcagacctggcggcccccggggtacagcagcagctggagctggagcgggagcggctgcggcgggaaatccgcaaggagctgaagctgaaggagggtgctgagaacctgcggcgggccaccactgacctgggccgcagcctgggccccgtagagctgctgctgcggggctcctcgcgccgcctcgacctgctgcaccagcagctgcaggagctgcacgcccacgtggtgcttcccgacccggcggccacccacgatggcccccagtcccctggtgcgggtggccccacctgctcggccaccaacctgagccgcgtggcgggcctggagaagcagttggccattgagctgaaggtgaagcagggggcggagaacatgatccagacctacagcaatggcagcaccaaggaccggaagctgctgctgacagcccagcagatgttgcaggacagtaagaccaagattgacatcatccgcatgcaactccgccgggcgctgcaggccggccagctggagaaccaggcagccccggatgacacccaagggagtcctgacctgggggctgtggagctgcgcatcgaagagctgcggcaccacttccgagtggagcacgcggtggccgagggtgccaagaacgtactgcgcctgctcagcgctgccaaggccccggaccgcaaggcagtcagcgaggcccaggagaaattgacagaatccaaccagaagctggggctgctgcgggaggctctggagcggagacttggggagctgcccgccgaccaccccaaggggcggctgctgcgagaagagctcgctgcggcctcctccgctgccttcagcacccgcctggccgggccctttcccgccacgcactacagcaccctgtgcaagcccgcgccgctcacagctccccgtcacgcccggggcgcacgcgcgctcctctggccgccctccctccgcgcggggacccctggcgggcggcaggaggacatggccagcgacgccgtgcagagtgagcctcgcagctggtccctgcttgagcagctgggccctggcggggcagaccttggcggccccgggggtacagcaacacagctggaagcctggagcgggaaccggctgcggcgggaatccgcaagagcttgaagctgcaggagggtgctgcgaaccttatggaaggccacc

SEQ ID NO: 439013 - DNA, 1075 bp, Homo sapiens
cctggccaggcgaggcgggagccgagcaggccggagcgggccgcgcgccggggagggtcgcgccgcgcccgccccctccccgccacgcccggggcgcacgcgcgctcctctggccgcccctccctccgacgcggggaccctggcgggcggcaggaggacatggccagcgacgccgtgcagagtgagcctcgcagctggtccctgctagagcagctgggcctggccggggcagacctggcggcccccggggtacagcagcagctggagctggagcgggagcggctgcggcgggaaatccgcaaggagctgaagctgaaggagggtgctgagaacctgcggcgggccaccactgacctgggccgcagcctgggccccgtagagctgctgctgcggggctcctcgcgccgcctcgacctgctgcaccagcagctgcaggagctgcacgcccacgtggtgcttcccgacccggcggccacccacgatggcccccagtcccctggtgcgggtggccccacctgctcggccaccaacctgagccgcgtggcgggcctggagaagcagttggccattgagctgaaggtgaagcagggggcggagaacatgatccagacctacagcaatggcagcaccaaggaccggaagctgctgctgacagcccagcagatgttgcaggacagtaagaccaagattgacatcatccgcatgcaactccgccgggcgctgcaggccggccagctggagaaccaggcagccccggatgacacccaagggagtcctgacctgggggctgtggagctgcgcatcgaagagctgcggcaccacttccgagtggagcacgcggtggccgagggtgccaagaacgtactgcgcctgctcagcgctgccaaggccccggaccgcaaggcagtcagcgaggccagggaaatgcagatccacagaatgggctgtgggcagcctgagcgggactgggactgccgccacacccaagggggtgtgaaaaaacctggggccctcgggttagacgcgggggcttcccacaaaaacgtgacgggcagccggaaatgggcgaccacac

SEQ ID NO: 439014 - DNA, 227 bp, Homo sapiens
tgcggggattacaggcatgagccaccgtgcctggcctgcaaatgcatgttgttacatccacatgtgaacactctgccacagtcacctaggacctgcatggtgtggctagaccccaaccacctagccttcctctctcagactgtctctgcctccaggaccggaagctgctgctgacagcccagcagatgttgcaggacagtaagaccaagattgacatcatccgcatg

SEQ ID NO: 439015 - DNA, 3466 bp, Homo sapiens
gaattcccgcgcagagactccaggtcgcaggtcgacatggccagcgacgccgtgcagagtgagcctcgcagctggtccctgctagagcagctgggcctggccggggcagacctggcggcccccggggtacagcagcagctggagctggagcgggagcggctgcggcgggaaatccgcaaggagctgaagctgaaggagggtgctgagaacctgcggcgggccaccactgacctgggccgcagcctgggccccgtagagctgctgctgcggggctcctcgcgccgcctcgacctgctgcaccagcagctgcaggagctgcacgcccacgtggtgcttcccgacccggcggccacccacgatggcccccagtcccctggtgcgggtggccccacctgctcggccaccaacctgagccgcgtggcgggcctggagaagcagttggccattgagctgaaggtgaagcagggggcggagaacatgatccagacctacagcaatggcagcaccaaggaccggaagctgctgctgacagcccagcagatgttgcaggacagtaagaccaagattgacatcatccgcatgcaactccgccgggcgctgcaggccggccagctggagaaccaggcagccccggatgacacccaagggagtcctgacctgggggctgtggagctgcgcatcgaagagctgcggcaccacttccgagtggagcacgcggtggccgagggtgccaagaacgtactgcgcctgctcagcgctgccaaggccccggaccgcaaggcagtcagcgaggcccaggagaaattgacagaatccaaccagaagctggggctgctgcgggaggctctggagcggagacttggggagctgcccgccgaccaccccaaggggcggctgctgcgagaagagctcgctgcggcctcctccgctgccttcagcacccgcctggccgggccctttcccgccacgcactacagcaccctgtgcaagcccgcgccgctcacagggaccctggaggtacgagtggtgggctgcagagacctcccagagaccatcccgtggaaccctaccccctcaatggggggacctgggaccccagacagccgcccccccttcctgagccgcccagcccggggcctttacagccgaagcggaagcctcagtggccggagcagcctcaaagcagaagccgagaacaccagtgaagtcagcactgtgcttaagctggataacacagtggtggggcagacgtcttggaagccatgtggccccaatgcctgggaccagagcttcactctggagctggaaagggcacgggaactggagttggctgtgttctggcgggaccagcggggcctgtgtgccctcaaattcctgaagttggaggatttcttggacaatgagaggcatgaggtgcagctggacatggaaccccagggctgcctggtggctgaggtcaccttccgcaaccctgtcattgagaggattcctcggctccgacggcagaagaaaattttctccaagcagcaagggaaggcgttccagcgtgctaggcagatgaacatcgatgtcgccacgtgggtgcggctgctccggaggctcatccccaatgccacgggcacaggcacctttagccctggggcttctccaggatccgaggcccggaccacgggtgacatatcggtggagaagctgaacctcggcactgactcggacagctcacctcagaagagctcgcgggatcctccttccagcccatcgagcctgagctcccccatccaggaatccactgctcccgagctgccttcggagacccaggagaccccaggccccgccctgtgcagccctctgaggaagtcacctctgaccctcgaagatttcaagttcctggcggtgctgggccggggtcattttgggaaggtgctcctctccgaattccggcccagtggggagctgttcgccatcaaggctctgaagaaaggggacattgtggcccgagacgaggtggagagcctgatgtgtgagaagcggatattggcggcagtgaccagtgcgggacaccccttcctggtgaacctcttcggctgtttccagacaccggagcacgtgtgcttcgtgatggagtactcggccggtggggacctgatgctgcacatccacagcgacgtgttctctgagccccgtgccatcttttattccgcctgcgtggtgctgggcctacagtttcttcacgaacacaagatcgtctacagggacctgaagttggacaatttgctcctggacaccgagggctacgtcaagatcgcagactttggcctctgcaaggaggggatgggctatggggaccggaccagcacattctgtgggaccccggagttcctggcccctgaggtgctgacggacacgtcgtacacgcgagctgtggactggtggggactgggtgtgctgctctacgagatgctggttggcgagtccccattcccaggggatgatgaggaggaggtcttcgacagcatcgtcaacgacgaggttcgctacccccgcttcctgtcggccgaagccatcggcatcatgagaaggctgcttcggaggaacccagagcggaggctgggatctagcgagagagatgcagaagatgtgaagaaacagcccttcttcaggactctgggctgggaagccctgttggcccggcgcctgccaccgccctttgtgcccacgctgtccggccgcaccgacgtcagcaacttcgacgaggagttcaccggggaggcccccacactgagcccgccccgcgacgcgcggcccctcacagccgcggagcaggcagccttcctggacttcgacttcgtggccgggggctgctagccccctcccctgcccctgcccctgcccctgcccgagagctcttagtttttaaaaaggcctttgggatttgccggaaaaaaaaaaaaaaaaaaaaaaaaaaaaaaaaaaaaatctggggggcactcaaaggcggggagggcgggaaaacacgggggaaccaaagggcccacagggcacacaaacgggtctctgggcccaagtttttgggacaaagggggaacaaccgcgcgggaaccccccataaggaggaggggcaacaaaactcgcggaaaacccaggagtaacccggataagacacacccgcgccacacaaacagaagacaaacgaaagaaaaacgagagaacaaaaaaatgtggagaccacaaagcactgggggccaggagacacacagatgaacaaactgtctgacaacacactcagcacactataaaccccacaaaaacaaaataaaacaaaatcataattctatctaaataactttctccactttttccaaatatccataccaaacacataaacacctaaaataacacacatcaaaacaatacaaacgaaaaaccggacaaaacacaactcaacacaaacacgcccaactacaca

SEQ ID NO: 439016 - DNA, 3589 bp, Homo sapiens
cctggccaggcgaggcgggagccgagcaggccggagcgggccgcgcgccggggagggtcgcgccgcgcccgccccctccccgccacgcccggggcgcacgcgcgctcctctggccgcccctccctccgacgcggggaccctggcgggcggcaggaggacatggccagcgacgccgtgcagagtgagcctcgcagctggtccctgctagagcagctgggcctggccggggcagacctggcggcccccggggtacagcagcagctggagctggagcgggagcggctgcggcgggaaatccgcaaggagctgaagctgaaggagggtgctgagaacctgcggcgggccaccactgacctgggccgcagcctgggccccgtagagctgctgctgcggggctcctcgcgccgcctcgacctgctgcaccagcagctgcaggagctgcacgcccacgtggtgcttcccgacccggcggccacccacgatggcccccagtcccctggtgcgggtggccccacctgctcggccaccaacctgagccgcgtggcgggcctggagaagcagttggccattgagctgaaggtgaagcagggggcggagaacatgatccagacctacagcaatggcagcaccaaggaccggaagctgctgctgacagcccagcagatgttgcaggacagtaagaccaagattgacatcatccgcatgcaactccgccgggcgctgcaggccggccagctggagaaccaggcagccccggatgacacccaagggagtcctgacctgggggctgtggagctgcgcatcgaagagctgcggcaccacttccgagtggagcacgcggtggccgagggtgccaagaacgtactgcgcctgctcagcgctgccaaggccccggaccgcaaggcagtcagcgaggcccaggagaaattgacagaatccaaccagaagctggggctgctgcgggaggctctggagcggagacttggggagctgcccgccgaccaccccaaggggcggctgctgcgagaagagctcgctgcggcctcctccgctgccttcagcacccgcctggccgggccctttcccgccacgcactacagcaccctgtgcaagcccgcgccgctcacagggaccctggaggtacgagtggtgggctgcagagacctcccagagaccatcccgtggaaccctaccccctcaatggggggacctgggaccccagacagccgcccccccttcctgagccgcccagcccggggcctttacagccgaagcggaagcctcagtggccggagcagcctcaaagcagaagccgagaacaccagtgaagtcagcactgtgcttaagctggataacacagtggtggggcagacgtcttggaagccatgtggccccaatgcctgggaccagagcttcactctggagctggaaagggcacgggaactggagttggctgtgttctggcgggaccagcggggcctgtgtgccctcaaattcctgaagttggaggatttcttggacaatgagaggcatgaggtgcagctggacatggaaccccagggctgcctggtggctgaggtcaccttccgcaaccctgtcattgagaggattcctcggctccgacggcagaagaaaattttctccaagcagcaagggaaggcgttccagcgtgctaggcagatgaacatcgatgtcgccacgtgggtgcggctgctccggaggctcatccccaatgccacgggcacaggcacctttagccctggggcttctccaggatccgaggcccggaccacgggtgacatatcggtggagaagctgaacctcggcactgactcggacagctcacctcagaagagctcgcgggatcctccttccagcccatcgagcctgagctcccccatccaggaatccactgctcccgagctgccttcggagacccaggagaccccaggccccgccctgtgcagccctctgaggaagtcacctctgaccctcgaagatttcaagttcctggcggtgctgggccggggtcattttgggaaggtgctcctctccgaattccggcccagtggggagctgttcgccatcaaggctctgaagaaaggggacattgtggcccgagacgaggtggagagcctgatgtgtgagaagcggatattggcggcagtgaccagtgcgggacaccccttcctggtgaacctcttcggctgtttccagacaccggagcacgtgtgcttcgtgatggagtactcggccggtggggacctgatgctgcacatccacagcgacgtgttctctgagccccgtgccatcttttattccgcctgcgtggtgctgggcctacagtttcttcacgaacacaagatcgtctacagggacctgaagttggacaatttgctcctggacaccgagggctacgtcaagatcgcagactttggcctctgcaaggaggggatgggctatggggaccggaccagcacattctgtgggaccccggagttcctggcccctgaggtgctgacggacacgtcgtacacgcgagctgtggactggtggggactgggtgtgctgctctacgagatgctggttggcgagtccccattcccaggggatgatgaggaggaggtcttcgacagcatcgtcaacgacgaggttcgctacccccgcttcctgtcggccgaagccatcggcatcatgagaaggctgcttcggaggaacccagagcggaggctgggatctagcgagagagatgcagaagatgtgaagaaacagcccttcttcaggactctgggctgggaagccctgttggcccggcgcctgccaccgccctttgtgcccacgctgtccggccgcaccgacgtcagcaacttcgacgaggagttcaccggggaggcccccacactgagcccgccccgcgacgcgcggcccctcacagccgcggagcaggcagccttcctggacttcgacttcgtggccgggggctgctagccccctcccctgcccctgcccctgcccctgcccgagagctcttagtttttaaaaaggcctttgggatttgccggaaaaaaaaaaaaaaaaaaaaaaaaaaaaaaaaaaaaatctggggggcactcaaaggcggggagggcgggaaaacacgggggaaccaaagggcccacagggcacacaaacgggtctctgggcccaagtttttgggacaaagggggaacaaccgcgcgggaaccccccataaggaggaggggcaacaaaactcgcggaaaacccaggagtaacccggataagacacacccgcgccacacaaacagaagacaaacgaaagaaaaacgagagaacaaaaaaatgtggagaccacaaagcactgggggccaggagacacacagatgaacaaactgtctgacaacacactcagcacactataaaccccacaaaaacaaaataaaacaaaatcataattctatctaaataactttctccactttttccaaatatccataccaaacacataaacacctaaaataacacacatcaaaacaatacaaacgaaaaaccggacaaaacacaactcaacacaaacacgcccaactacaca

SEQ ID NO: 439017 - DNA, 2875 bp, Homo sapiens
gtcctagcctcgccagtgtcctagcctcgccagtggtcctagcctcgccagtgtcggagtcctgacctgggggctgtggagctgcgcatcgaagagctgcggcaccacttccgagtggagcacgcggtggccgagggtgccaagaacgtactgcgcctgctcagcgctgccaaggccccggaccgcaaggcagtcagcgaggcccaggagaaattgacagaatccaaccagaagctggggctgctgcgggaggctctggagcggagacttggggagctgcccgccgaccaccccaaggggcggctgctgcgagaagagctcgctgcggcctcctccgctgccttcagcacccgcctggccgggccctttcccgccacgcactacagcaccctgtgcaagcccgcgccgctcacagggaccctggaggtacgagtggtgggctgcagagacctcccagagaccatcccgtggaaccctaccccctcaatggggggacctgggaccccagacagccgcccccccttcctgagccgcccagcccggggcctttacagccgaagcggaagcctcagtggccggagcagcctcaaagcagaagccgagaacaccagtgaagtcagcactgtgcttaagctggataacacagtggtggggcagacgtcttggaagccatgtggccccaatgcctgggaccagagcttcactctggagctggaaagggcacgggaactggagttggctgtgttctggcgggaccagcggggcctgtgtgccctcaaattcctgaagttggaggatttcttggacaatgagaggcatgaggtgcagctggacatggaaccccagggctgcctggtggctgaggtcaccttccgcaaccctgtcattgagaggattcctcggctccgacggcagaagaaaattttctccaagcagcaagggaaggcgttccagcgtgctaggcagatgaacatcgatgtcgccacgtgggtgcggctgctccggaggctcatccccaatgccacgggcacaggcacctttagccctggggcttctccaggatccgaggcccggaccacgggtgacatatcggtggagaagctgaacctcggcactgactcggacagctcacctcagaagagctcgcgggatcctccttccagcccatcgagcctgagctcccccatccaggaatccactgctcccgagctgccttcggagacccaggagaccccaggccccgccctgtgcagccctctgaggaagtcacctctgaccctcgaagatttcaagttcctggcggtgctgggccggggtcattttgggaaggtgctcctctccgaattccggcccagtggggagctgttcgccatcaaggctctgaagaaaggggacattgtggcccgagacgaggtggagagcctgatgtgtgagaagcggatattggcggcagtgaccagtgcgggacaccccttcctggtgaacctcttcggctgtttccagacaccggagcacgtgtgcttcgtgatggagtactcggccggtggggacctgatgctgcacatccacagcgacgtgttctctgagccccgtgccatcttttattccgcctgcgtggtgctgggcctacagtttcttcacgaacacaagatcgtctacagggacctgaagttggacaatttgctcctggacaccgagggctacgtcaagatcgcagactttggcctctgcaaggaggggatgggctatggggaccggaccagcacattctgtgggaccccggagttcctggcccctgaggtgctgacggacacgtcgtacacgcgagctgtggactggtggggactgggtgtgctgctctacgagatgctggttggcgagtccccattcccaggggatgatgaggaggaggtcttcgacagcatcgtcaacgacgaggttcgctacccccgcttcctgtcggccgaagccatcggcatcatgagaaggctgcttcggaggaacccagagcggaggctgggatctagcgagagagatgcagaagatgtgaagaaacagcccttcttcaggactctgggctgggaagccctgttggcccggcgcctgccaccgccctttgtgcccacgctgtccggccgcaccgacgtcagcaacttcgacgaggagttcaccggggaggcccccacactgagcccgccccgcgacgcgcggcccctcacagccgcggagcaggcagccttcctggacttcgacttcgtggccgggggctgctagccccctcccctgcccctgcccctgcccctgcccgagagctcttagtttttaaaaaggcctttgggatttgccggaaaaaaaaaaaaaaaaaaaaaaaaaaaaaaaaaaaaatctggggggcactcaaaggcggggagggcgggaaaacacgggggaaccaaagggcccacagggcacacaaacgggtctctgggcccaagtttttgggacaaagggggaacaaccgcgcgggaaccccccataaggaggaggggcaacaaaactcgcggaaaacccaggagtaacccggataagacacacccgcgccacacaaacagaagacaaacgaaagaaaaacgagagaacaaaaaaatgtggagaccacaaagcactgggggccaggagacacacagatgaacaaactgtctgacaacacactcagcacactataaaccccacaaaaacaaaataaaacaaaatcataattctatctaaataactttctccactttttccaaatatccataccaaacacataaacacctaaaataacacacatcaaaacaatacaaacgaaaaaccggacaaaacacaactcaacacaaacacgcccaactacaca

SEQ ID NO: 439018 - DNA, 2295 bp, Homo sapiens
actagtccacggttggctaacatggatcagacacttacaaagcaccaggtactgctctaaccactttgtaagtatcactgcatctcatactaaccctagtaccttatgatgtacgtactagtattattcaaagtttccaaatgaggaaagtgtggcccagaaggattaagaagcttgcccaaagactagtccacggttggctcctgaagttggaggatttcttggacaatgagaggcatgaggtgcagctggacatggaaccccagggctgcctggtggctgaggtcaccttccgcaaccctgtcattgagaggattcctcggctccgacggcagaagaaaattttctccaagcagcaagggaaggcgttccagcgtgctaggcagatgaacatcgatgtcgccacgtgggtgcggctgctccggaggctcatccccaatgccacgggcacaggcacctttagccctggggcttctccaggatccgaggcccggaccacgggtgacatatcggtggagaagctgaacctcggcactgactcggacagctcacctcagaagagctcgcgggatcctccttccagcccatcgagcctgagctcccccatccaggaatccactgctcccgagctgccttcggagacccaggagaccccaggccccgccctgtgcagccctctgaggaagtcacctctgaccctcgaagatttcaagttcctggcggtgctgggccggggtcattttgggaaggtgctcctctccgaattccggcccagtggggagctgttcgccatcaaggctctgaagaaaggggacattgtggcccgagacgaggtggagagcctgatgtgtgagaagcggatattggcggcagtgaccagtgcgggacaccccttcctggtgaacctcttcggctgtttccagacaccggagcacgtgtgcttcgtgatggagtactcggccggtggggacctgatgctgcacatccacagcgacgtgttctctgagccccgtgccatcttttattccgcctgcgtggtgctgggcctacagtttcttcacgaacacaagatcgtctacagggacctgaagttggacaatttgctcctggacaccgagggctacgtcaagatcgcagactttggcctctgcaaggaggggatgggctatggggaccggaccagcacattctgtgggaccccggagttcctggcccctgaggtgctgacggacacgtcgtacacgcgagctgtggactggtggggactgggtgtgctgctctacgagatgctggttggcgagtccccattcccaggggatgatgaggaggaggtcttcgacagcatcgtcaacgacgaggttcgctacccccgcttcctgtcggccgaagccatcggcatcatgagaaggctgcttcggaggaacccagagcggaggctgggatctagcgagagagatgcagaagatgtgaagaaacagcccttcttcaggactctgggctgggaagccctgttggcccggcgcctgccaccgccctttgtgcccacgctgtccggccgcaccgacgtcagcaacttcgacgaggagttcaccggggaggcccccacactgagcccgccccgcgacgcgcggcccctcacagccgcggagcaggcagccttcctggacttcgacttcgtggccgggggctgctagccccctcccctgcccctgcccctgcccctgcccgagagctcttagtttttaaaaaggcctttgggatttgccggaaaaaaaaaaaaaaaaaaaaaaaaaaaaaaaaaaaaatctggggggcactcaaaggcggggagggcgggaaaacacgggggaaccaaagggcccacagggcacacaaacgggtctctgggcccaagtttttgggacaaagggggaacaaccgcgcgggaaccccccataaggaggaggggcaacaaaactcgcggaaaacccaggagtaacccggataagacacacccgcgccacacaaacagaagacaaacgaaagaaaaacgagagaacaaaaaaatgtggagaccacaaagcactgggggccaggagacacacagatgaacaaactgtctgacaacacactcagcacactataaaccccacaaaaacaaaataaaacaaaatcataattctatctaaataactttctccactttttccaaatatccataccaaacacataaacacctaaaataacacacatcaaaacaatacaaacgaaaaaccggacaaaacacaactcaacacaaacacgcccaactacaca

SEQ ID NO: 439019 - DNA, 3403 bp, Homo sapiens
cctcagcccggacccaggatggcggaggccaataacccctcggagcaggagctggagagtgagcctcgcagctggtccctgctagagcagctgggcctggccggggcagacctggcggcccccggggtacagcagcagctggagctggagcgggagcggctgcggcgggaaatccgcaaggagctgaagctgaaggagggtgctgagaacctgcggcgggccaccactgacctgggccgcagcctgggccccgtagagctgctgctgcggggctcctcgcgccgcctcgacctgctgcaccagcagctgcaggagctgcacgcccacgtggtgcttcccgacccggcggccacccacgatggcccccagtcccctggtgcgggtggccccacctgctcggccaccaacctgagccgcgtggcgggcctggagaagcagttggccattgagctgaaggtgaagcagggggcggagaacatgatccagacctacagcaatggcagcaccaaggaccggaagctgctgctgacagcccagcagatgttgcaggacagtaagaccaagattgacatcatccgcatgcaactccgccgggcgctgcaggccggccagctggagaaccaggcagccccggatgacacccaagggagtcctgacctgggggctgtggagctgcgcatcgaagagctgcggcaccacttccgagtggagcacgcggtggccgagggtgccaagaacgtactgcgcctgctcagcgctgccaaggccccggaccgcaaggcagtcagcgaggcccaggagaaattgacagaatccaaccagaagctggggctgctgcgggaggctctggagcggagacttggggagctgcccgccgaccaccccaaggggcggctgctgcgagaagagctcgctgcggcctcctccgctgccttcagcacccgcctggccgggccctttcccgccacgcactacagcaccctgtgcaagcccgcgccgctcacagggaccctggaggtacgagtggtgggctgcagagacctcccagagaccatcccgtggaaccctaccccctcaatggggggacctgggaccccagacagccgcccccccttcctgagccgcccagcccggggcctttacagccgaagcggaagcctcagtggccggagcagcctcaaagcagaagccgagaacaccagtgaagtcagcactgtgcttaagctggataacacagtggtggggcagacgtcttggaagccatgtggccccaatgcctgggaccagagcttcactctggagctggaaagggcacgggaactggagttggctgtgttctggcgggaccagcggggcctgtgtgccctcaaattcctgaagttggaggatttcttggacaatgagaggcatgaggtgcagctggacatggaaccccagggctgcctggtggctgaggtcaccttccgcaaccctgtcattgagaggattcctcggctccgacggcagaagaaaattttctccaagcagcaagggaaggcgttccagcgtgctaggcagatgaacatcgatgtcgccacgtgggtgcggctgctccggaggctcatccccaatgccacgggcacaggcacctttagccctggggcttctccaggatccgaggcccggaccacgggtgacatatcggtggagaagctgaacctcggcactgactcggacagctcacctcagaagagctcgcgggatcctccttccagcccatcgagcctgagctcccccatccaggaatccactgctcccgagctgccttcggagacccaggagaccccaggccccgccctgtgcagccctctgaggaagtcacctctgaccctcgaagatttcaagttcctggcggtgctgggccggggtcattttgggaaggtgctcctctccgaattccggcccagtggggagctgttcgccatcaaggctctgaagaaaggggacattgtggcccgagacgaggtggagagcctgatgtgtgagaagcggatattggcggcagtgaccagtgcgggacaccccttcctggtgaacctcttcggctgtttccagacaccggagcacgtgtgcttcgtgatggagtactcggccggtggggacctgatgctgcacatccacagcgacgtgttctctgagccccgtgccatggacctgaagttggacaatttgctcctggacaccgagggctacgtcaagatcgcagactttggcctctgcaaggaggggatgggctatggggaccggaccagcacattctgtgggaccccggagttcctggcccctgaggtgctgacggacacgtcgtacacgcgagctgtggactggtggggactgggtgtgctgctctacgagatgctggttggcgagtccccattcccaggggatgatgaggaggaggtcttcgacagcatcgtcaacgacgaggttcgctacccccgcttcctgtcggccgaagccatcggcatcatgagaaggctgcttcggaggaacccagagcggaggctgggatctagcgagagagatgcagaagatgtgaagaaacagcccttcttcaggactctgggctgggaagccctgttggcccggcgcctgccaccgccctttgtgcccacgctgtccggccgcaccgacgtcagcaacttcgacgaggagttcaccggggaggcccccacactgagcccgccccgcgacgcgcggcccctcacagccgcggagcaggcagccttcctggacttcgacttcgtggccgggggctgctagccccctcccctgcccctgcccctgcccctgcccgagagctcttagtttttaaaaaggcctttgggatttgccggaaaaaaaaaaaaaaaaaaaaaaaaaaaaaaaaaaaaatctggggggcactcaaaggcggggagggcgggaaaacacgggggaaccaaagggcccacagggcacacaaacgggtctctgggcccaagtttttgggacaaagggggaacaaccgcgcgggaaccccccataaggaggaggggcaacaaaactcgcggaaaacccaggagtaacccggataagacacacccgcgccacacaaacagaagacaaacgaaagaaaaacgagagaacaaaaaaatgtggagaccacaaagcactgggggccaggagacacacagatgaacaaactgtctgacaacacactcagcacactataaaccccacaaaaacaaaataaaacaaaatcataattctatctaaataactttctccactttttccaaatatccataccaaacacataaacacctaaaataacacacatcaaaacaatacaaacgaaaaaccggacaaaacacaactcaacacaaacacgcccaactacaca

SEQ ID NO: 439020 - DNA, 3554 bp, Homo sapiens
cctcagcccggacccaggatggcggaggccaataacccctcggagcaggagctggagagtgagcctcgcagctggtccctgctagagcagctgggcctggccggggcagacctggcggcccccggggtacagcagcagctggagctggagcgggagcggctgcggcgggaaatccgcaaggagctgaagctgaaggagggtgctgagaacctgcggcgggccaccactgacctgggccgcagcctgggccccgtagagctgctgctgcggggctcctcgcgccgcctcgacctgctgcaccagcagctgcaggagctgcacgcccacgtggtgcttcccgacccggcggccacccacgatggcccccagtcccctggtgcgggtggccccacctgctcggccaccaacctgagccgcgtggcgggcctggagaagcagttggccattgagctgaaggtgaagcagggggcggagaacatgatccagacctacagcaatggcagcaccaaggaccggaagctgctgctgacagcccagcagatgttgcaggacagtaagaccaagattgacatcatccgcatgcaactccgccgggcgctgcaggccggccagctggagaaccaggcagccccggatgacacccaagggagtcctgacctgggggctgtggagctgcgcatcgaagagctgcggcaccacttccgagtggagcacgcggtggccgagggtgccaagaacgtactgcgcctgctcagcgctgccaaggccccggaccgcaaggcagtcagcgaggcccaggagaaattgacagaatccaaccagaagctggggctgctgcgggaggctctggagcggagacttggggagctgcccgccgaccaccccaaggggcggctgctgcgagaagagctcgctgcggcctcctccgctgccttcagcacccgcctggccgggccctttcccgccacgcactacagcaccctgtgcaagcccgcgccgctcacagggaccctggaggtacgagtggtgggctgcagagacctcccagagaccatcccgtggaaccctaccccctcaatggggggacctgggaccccagacagccgcccccccttcctgagccgcccagcccggggcctttacagccgaagcggaagcctcagtggccggagcagcctcaaagcagaagccgagaacaccagtgaagtcagcactgtgcttaagctggataacacagtggtggggcagacgtcttggaagccatgtggccccaatgcctgggaccagagcttcactctggagctggaaagggcacgggaactggagttggctgtgttctggcgggaccagcggggcctgtgtgccctcaaattcctgaagttggaggatttcttggacaatgagaggcatgaggtgcagctggacatggaaccccagggctgcctggtggctgaggtcaccttccgcaaccctgtcattgagaggattcctcggctccgacggcagaagaaaattttctccaagcagcaagggaaggcgttccagcgtgctaggcagatgaacatcgatgtcgccacgtgggtgcggctgctccggaggctcatccccaatgccacgggcacaggcacctttagccctggggcttctccaggatccgaggcccggaccacgggtgacatatcggtggagaagctgaacctcggcactgactcggacagctcacctcagaagagctcgcgggatcctccttccagcccatcgagcctgagctcccccatccaggaatccactgctcccgagctgccttcggagacccaggagaccccaggccccgccctgtgcagccctctgaggaagtcacctctgaccctcgaagatttcaagttcctggcggtgctgggccggggtcattttgggaaggtgctcctctccgaattccggcccagtggggagctgttcgccatcaaggctctgaagaaaggggacattgtggcccgagacgaggtggagagcctgatgtgtgagaagcggatattggcggcagtgaccagtgcgggacaccccttcctggtgaacctcttcggctgtttccagacaccggagcacgtgtgcttcgtgatggagtactcggccggtggggacctgatgctgcacatccacagcgacgtgttctctgagccccgtgccatcttttattccgcctgcgtggtgctgggcctacagtttcttcacgaacacaagatcgtctacagggacctgaagttggacaatttgctcctggacaccgagggctacgtcaagatcgcagactttggcctctgcaaggaggggatgggctatggggaccggaccagcacattctgtgggaccccggagttcctggcccctgaggtgctgacggacacgtcgtacacgcgagctgtggactggtggggactgggtgtgctgctctacgagatgctggttggcgagtccccattcccaggggatgatgaggaggaggtcttcgacagcatcgtcaacgacgaggttcgctacccccgcttcctgtcggccgaagccatcggcatcatgagaagggtgaggacccccgacgtggggcgggcctggggaggggcagtggggcccaggaggggacagatcctgacacagtgctccttcctccaagctgcttcggaggaacccagagcggaggctgggatctagcgagagagatgcagaagatgtgaagaaacagcccttcttcaggactctgggctgggaagccctgttggcccggcgcctgccaccgccctttgtgcccacgctgtccggccgcaccgacgtcagcaacttcgacgaggagttcaccggggaggcccccacactgagcccgccccgcgacgcgcggcccctcacagccgcggagcaggcagccttcctggacttcgacttcgtggccgggggctgctagccccctcccctgcccctgcccctgcccctgcccgagagctcttagtttttaaaaaggcctttgggatttgccggaaaaaaaaaaaaaaaaaaaaaaaaaaaaaaaaaaaaatctggggggcactcaaaggcggggagggcgggaaaacacgggggaaccaaagggcccacagggcacacaaacgggtctctgggcccaagtttttgggacaaagggggaacaaccgcgcgggaaccccccataaggaggaggggcaacaaaactcgcggaaaacccaggagtaacccggataagacacacccgcgccacacaaacagaagacaaacgaaagaaaaacgagagaacaaaaaaatgtggagaccacaaagcactgggggccaggagacacacagatgaacaaactgtctgacaacacactcagcacactataaaccccacaaaaacaaaataaaacaaaatcataattctatctaaataactttctccactttttccaaatatccataccaaacacataaacacctaaaataacacacatcaaaacaatacaaacgaaaaaccggacaaaacacaactcaacacaaacacgcccaactacaca

SEQ ID NO: 439021 - DNA, 2717 bp, Homo sapiens
cctcagcccggacccaggatggcggaggccaataacccctcggagcaggagctggagagtgagcctcgcagctggtccctgctagagcagctgggcctggccggggcagacctggcggcccccggggtacagcagcagctggagctggagcgggagcggctgcggcgggaaatccgcaaggagctgaagctgaaggagggtgctgagaacctgcggcgggccaccactgacctgggccgcagcctgggccccgtagagctgctgctgcggggctcctcgcgccgcctcgacctgctgcaccagcagctgcaggagctgcacgcccacgtggtgcttcccgacccggcggccacccacgatggcccccagtcccctggtgcgggtggccccacctgctcggccaccaacctgagccgcgtggcgggcctggagaagcagttggccattgagctgaaggtgaagcagggggcggagaacatgatccagacctacagcaatggcagcaccaaggaccggaagctgctgctgacagcccagcagatgttgcaggacagtaagaccaagattgacatcatccgcatgcaactccgccgggcgctgcaggccggccagctggagaaccaggcagccccggatgacacccaagggagtcctgacctgggggctgtggagctgcgcatcgaagagctgcggcaccacttccgagtggagcacgcggtggccgagggtgccaagaacgtactgcgcctgctcagcgctgccaaggccccggaccgcaaggcagtcagcgaggcccaggagaaattgacagaatccaaccagaagctggggctgctgcgggaggctctggagcggagacttggggagctgcccgccgaccaccccaaggggcggctgctgcgagaagagctcgctgcggcctcctccgctgccttcagcacccgcctggccgggccctttcccgccacgcactacagcaccctgtgcaagcccgcgccgctcacagggaccctggaggtacgagtggtgggctgcagagacctcccagagaccatcccgtggaaccctaccccctcaatggggggacctgggaccccagacagccgcccccccttcctgagccgcccagcccggggcctttacagccgaagcggaagcctcagtggccggagcagcctcaaagcagaagccgagaacaccagtgaagtcagcactgtgcttaagctggataacacagtggtggggcagacgtcttggaagccatgtggccccaatgcctgggaccagagcttcactctggagctggaaagggcacgggaactggagttggctgtgttctggcgggaccagcggggcctgtgtgccctcaaattcctgaagttggaggatttcttggacaatgagaggcatgaggtgcagctggacatggaaccccagggctgcctggtggctgaggtcaccttccgcaaccctgtcattgagaggattcctcggctccgacggcagaagaaaattttctccaagcagcaagggaaggcgttccagcgtgctaggcagatgaacatcgatgtcgccacgtgggtgcggctgctccggaggctcatccccaatgccacgggcacaggcacctttagccctggggcttctccaggatccgaggcccggaccacgggtgacatatcggtggagaagctgaacctcggcactgactcggacagctcacctcagaagagctcgcgggatcctccttccagcccatcgagcctgagctcccccatccaggaatccactgctcccgagctgccttcggagacccaggagaccccaggccccgccctgtgcagccctctgaggaagtcacctctgaccctcgaagatttcaagttcctggcggtgctgggccggggtcattttgggaaggtgctcctctccgaattccggcccagtggggagctgttcgccatcaaggctctgaagaaaggggacattgtggcccgagacgaggtggagagcctgatgtgtgagaagcggatattggcggcagtgaccagtgcgggacaccccttcctggtgaacctcttcggctgtttccagacaccggagcacgtgtgcttcgtgatggagtactcggccggtggggacctgatgctgcacatccacagcgacgtgttctctgagccccgtgccatcttttattccgcctgcgtggtgctgggcctacagtttcttcacgaacacaagatcgtctacagggacctgaagttggacaatttgctcctggacaccgagggctacgtcaagatcgcagactttggcctctgcaaggaggggatgggctatggggaccggaccagcacattctgtgggaccccggagttcctggcccctgaggtgctgacggacacgtcgtacacgcgagctgtggactggtggggactgggtgtgctgctctacgagatgctggttggcgagtccccattcccaggggatgatgaggaggaggtcttcgacagcatcgtcaacgacgaggttcgctacccccgcttcctgtcggccgaagccatcggcatcatgagaaggctgcttcggaggaacccagagcggaggctgggatctagcgagagagatgcagaagatgtgaagaaacagcccttcttcaggactcggggctgggaagcgctgttggcccgtcttccgcagcctaggggatcctcgac

SEQ ID NO: 439022 - DNA, 2994 bp, Homo sapiens
cctcagcccggacccaggatggcggaggccaataacccctcggagcaggagctggagagtgagcctcgcagctggtccctgctagagcagctgggcctggccggggcagacctggcggcccccggggtacagcagcagctggagctggagcgggagcggctgcggcgggaaatccgcaaggagctgaagctgaaggagggtgctgagaacctgcggcgggccaccactgacctgggccgcagcctgggccccgtagagctgctgctgcggggctcctcgcgccgcctcgacctgctgcaccagcagctgcaggagctgcacgcccacgtggtgcttcccgacccggcggccacccacgatggcccccagtcccctggtgcgggtggccccacctgctcggccaccaacctgagccgcgtggcgggcctggagaagcagttggccattgagctgaaggtgaagcagggggcggagaacatgatccagacctacagcaatggcagcaccaaggaccggaagctgctgctgacagcccagcagatgttgcaggacagtaagaccaagattgacatcatccgcatgcaactccgccgggcgctgcaggccggccagctggagaaccaggcagccccggatgacacccaagggagtcctgacctgggggctgtggagctgcgcatcgaagagctgcggcaccacttccgagtggagcacgcggtggccgagggtgccaagaacgtactgcgcctgctcagcgctgccaaggccccggaccgcaaggcagtcagcgaggcccaggagaaattgacagaatccaaccagaagctggggctgctgcgggaggctctggagcggagacttggggagctgcccgccgaccaccccaaggggcggctgctgcgagaagagctcgctgcggcctcctccgctgccttcagcacccgcctggccgggccctttcccgccacgcactacagcaccctgtgcaagcccgcgccgctcacagggaccctggaggtacgagtggtgggctgcagagacctcccagagaccatcccgtggaaccctaccccctcaatggggggacctgggaccccagacagccgcccccccttcctgagccgcccagcccggggcctttacagccgaagcggaagcctcagtggccggagcagcctcaaagcagaagccgagaacaccagtgaagtcagcactgtgcttaagctggataacacagtggtggggcagacgtcttggaagccatgtggccccaatgcctgggaccagagcttcactctggagctggaaagggcacgggaactggagttggctgtgttctggcgggaccagcggggcctgtgtgccctcaaattcctgaagttggaggatttcttggacaatgagaggcatgaggtgcagctggacatggaaccccagggctgcctggtggctgaggtcaccttccgcaaccctgtcattgagaggattcctcggctccgacggcagaagaaaattttctccaagcagcaagggaaggcgttccagcgtgctaggcagatgaacatcgatgtcgccacgtgggtgcggctgctccggaggctcatccccaatgccacgggcacaggcacctttagccctggggcttctccaggatccgaggcccggaccacgggtgacatatcggtggagaagctgaacctcggcactgactcggacagctcacctcagaagagctcgcgggatcctccttccagcccatcgagcctgagctcccccatccaggaatccactgctcccgagctgccttcggagacccaggagaccccaggccccgccctgtgcagccctctgaggaagtcacctctgaccctcgaagatttcaagttcctggcggtgctgggccggggtcattttgggaaggtgctcctctccgaattccggcccagtggggagctgttcgccatcaaggctctgaagaaaggggacattgtggcccgagacgaggtggagagcctgatgtgtgagaagcggatattggcggcagtgaccagtgcgggacaccccttcctggtgaacctcttcggctgtttccagacaccggagcacgtgtgcttcgtgatggagtactcggccggtggggacctgatgctgcacatccacagcgacgtgttctctgagccccgtgccatactctgggctgggaagccctgttggcccggcgcctgccaccgccctttgtgcccacgctgtccggccgcaccgacgtcagcaacttcgacgaggagttcaccggggaggcccccacactgagcccgccccgcgacgcgcggcccctcacagccgcggagcaggcagccttcctggacttcgacttcgtggccgggggctgctagccccctcccctgcccctgcccctgcccctgcccgagagctcttagtttttaaaaaggcctttgggatttgccggaaaaaaaaaaaaaaaaaaaaaaaaaaaaaaaaaaaaatctggggggcactcaaaggcggggagggcgggaaaacacgggggaaccaaagggcccacagggcacacaaacgggtctctgggcccaagtttttgggacaaagggggaacaaccgcgcgggaaccccccataaggaggaggggcaacaaaactcgcggaaaacccaggagtaacccggataagacacacccgcgccacacaaacagaagacaaacgaaagaaaaacgagagaacaaaaaaatgtggagaccacaaagcactgggggccaggagacacacagatgaacaaactgtctgacaacacactcagcacactataaaccccacaaaaacaaaataaaacaaaatcataattctatctaaataactttctccactttttccaaatatccataccaaacacataaacacctaaaataacacacatcaaaacaatacaaacgaaaaaccggacaaaacacaactcaacacaaacacgcccaactacaca

SEQ ID NO: 439023 - DNA, 1188 bp, Homo sapiens
caggctgttatatgaggatccccgcagactctgagcctcgttaaacggaggggatgggctatggggaccggaccagcacattctgtgggaccccggagttcctggcccctgaggtgctgacggacacgtcgtacacgcgagctgtggactggtggggactgggtgtgctgctctacgagatgctggttggcgagtccccattcccaggggatgatgaggaggaggtcttcgacagcatcgtcaacgacgaggttcgctacccccgcttcctgtcggccgaagccatcggcatcatgagaaggctgcttcggaggaacccagagcggaggctgggatctagcgagagagatgcagaagatgtgaagaaacagcccttcttcaggactctgggctgggaagccctgttggcccggcgcctgccaccgccctttgtgcccacgctgtccggccgcaccgacgtcagcaacttcgacgaggagttcaccggggaggcccccacactgagcccgccccgcgacgcgcggcccctcacagccgcggagcaggcagccttcctggacttcgacttcgtggccgggggctgctagccccctcccctgcccctgcccctgcccctgcccgagagctcttagtttttaaaaaggcctttgggatttgccggaaaaaaaaaaaaaaaaaaaaaaaaaaaaaaaaaaaaatctggggggcactcaaaggcggggagggcgggaaaacacgggggaaccaaagggcccacagggcacacaaacgggtctctgggcccaagtttttgggacaaagggggaacaaccgcgcgggaaccccccataaggaggaggggcaacaaaactcgcggaaaacccaggagtaacccggataagacacacccgcgccacacaaacagaagacaaacgaaagaaaaacgagagaacaaaaaaatgtggagaccacaaagcactgggggccaggagacacacagatgaacaaactgtctgacaacacactcagcacactataaaccccacaaaaacaaaataaaacaaaatcataattctatctaaataactttctccactttttccaaatatccataccaaacacataaacacctaaaataacacacatcaaaacaatacaaacgaaaaaccggacaaaacacaactcaacacaaacacgcccaactacaca

SEQ ID NO: 439024 - DNA, 2041 bp, Homo sapiens
cctcagcccggacccaggatggcggaggccaataacccctcggagcaggagctggagagtgagcctcgcagctggtccctgctagagcagctgggcctggccggggcagacctggcggcccccggggtacagcagcagctggagctggagcgggagcggctgcggcgggaaatccgcaaggagctgaagctgaaggagggtgctgagaacctgcggcgggccaccactgacctgggccgcagcctgggccccgtagagctgctgctgcggggctcctcgcgccgcctcgacctgctgcaccagcagctgcaggagctgcacgcccacgtggtgcttcccgacccggcggccacccacgatggcccccagtcccctggtgcgggtggccccacctgctcggccaccaacctgagccgcgtggcgggcctggagaagcagttggccattgagctgaaggtgaagcagggggcggagaacatgatccagacctacagcaatggcagcaccaaggaccggaagctgctgctgacagcccagcagatgttgcaggacagtaagaccaagattgacatcatccgcatgcaactccgccgggcgctgcaggccggccagctggagaaccaggcagccccggatgacacccaagggagtcctgacctgggggctgtggagctgcgcatcgaagagctgcggcaccacttccgagtggagcacgcggtggccgagggtgccaagaacgtactgcgcctgctcagcgctgccaaggccccggaccgcaaggcagtcagcgaggcccaggagaaattgacagaatccaaccagaagctggggctgctgcgggaggctctggagcggagacttggggagctgcccgccgaccaccccaaggggcggctgctgcgagaagagctcgctgcggcctcctccgctgccttcagcacccgcctggccgggccctttcccgccacgcactacagcaccctgtgcaagcccgcgccgctcacagggaccctggaggtacgagtggtgggctgcagagacctcccagagaccatcccgtggaaccctaccccctcaatggggggacctgggaccccagacagccgcccccccttcctgagccgcccagcccggggcctttacagccgaagcggaagcctcagtggccggagcagcctcaaagcagaagccgagaacaccagtgaagtcagcactgtgcttaagctggataacacagtggtggggcagacgtcttggaagccatgtggccccaatgcctgggaccagagcttcactctggagctggaaagggcacgggaactggagttggctgtgttctggcgggaccagcggggcctgtgtgccctcaaattcctgaagttggaggatttcttggacaatgagaggcatgaggtgcagctggacatggaaccccagggctgcctggtggctgaggtcaccttccgcaaccctgtcattgagaggattcctcggctccgacggcagaagaaaattttctccaagcagcaagggaaggcgttccagcgtgctaggcagatgaacatcgatgtcgccacgtgggtgcggctgctccggaggctcatccccaatgccacgggcacaggcacctttagccctggggcttctccaggatccgaggcccggaccacgggtgacatatcggtggagaagctgaacctcggcactgactcggacagctcacctcagaagagctcgcgggatcctcctaataaataagaaaggcccactgacacaaccccactttaccttctgtgagcttggcctgcttctgctgtctggcccgtaacctgtgttccaccactgaaagcccgtgactgttaaatccataccttcagacgacaagcacacgggagaggcagagtgagagggcaccatagccacttcccatacacttaggactttttcaaaacaagagaaaaaaaaaaaatcacagtcagttcttacacttccagggtctaaacaccactgggactcacatagatgacctgcagacaccata

SEQ ID NO: 439025 - DNA, 1923 bp, Homo sapiens
cctcagcccggacccaggatggcggaggccaataacccctcggagcaggagctggagagtgagcctcgcagctggtccctgctagagcagctgggcctggccggggcagacctggcggcccccggggtacagcagcagctggagctggagcgggagcggctgcggcgggaaatccgcaaggagctgaagctgaaggagggtgctgagaacctgcggcgggccaccactgacctgggccgcagcctgggccccgtagagctgctgctgcggggctcctcgcgccgcctcgacctgctgcaccagcagctgcaggagctgcacgcccacgtggtgcttcccgacccggcggccacccacgatggcccccagtcccctggtgcgggtggccccacctgctcggccaccaacctgagccgcgtggcgggcctggagaagcagttggccattgagctgaaggtgaagcagggggcggagaacatgatccagacctacagcaatggcagcaccaaggaccggaagctgctgctgacagcccagcagatgttgcaggacagtaagaccaagattgacatcatccgcatgcaactccgccgggcgctgcaggccggccagctggagaaccaggcagccccggatgacacccaagggagtcctgacctgggggctgtggagctgcgcatcgaagagctgcggcaccacttccgagtggagcacgcggtggccgagggtgccaagaacgtactgcgcctgctcagcgctgccaaggccccggaccgcaaggcagtcagcgaggcccaggagaaattgacagaatccaaccagaagctggggctgctgcgggaggctctggagcggagacttggggagctgcccgccgaccaccccaaggggcggctgctgcgagaagagctcgctgcggcctcctccgctgccttcagcacccgcctggccgggccctttcccgccacgcactacagcaccctgtgcaagcccgcgccgctcacagggaccctggaggtacgagtggtgggctgcagagacctcccagagaccatcccgtggaaccctaccccctcaatggggggacctgggaccccagacagccgcccccccttcctgagccgcccagcccggggcctttacagccgaagcggaagcctcagtggccggagcagcctcaaagcagaagccgagaacaccagtgaagtcagcactgtgcttaagctggataacacatgagcccgccccgcgacgcgcggcccctcacagccgcggagcaggcagccttcctggacttcgacttcgtggccgggggctgctagccccctcccctgcccctgcccctgcccctgcccgagagctcttagtttttaaaaaggcctttgggatttgccggaaaaaaaaaaaaaaaaaaaaaaaaaaaaaaaaaaaaatctggggggcactcaaaggcggggagggcgggaaaacacgggggaaccaaagggcccacagggcacacaaacgggtctctgggcccaagtttttgggacaaagggggaacaaccgcgcgggaaccccccataaggaggaggggcaacaaaactcgcggaaaacccaggagtaacccggataagacacacccgcgccacacaaacagaagacaaacgaaagaaaaacgagagaacaaaaaaatgtggagaccacaaagcactgggggccaggagacacacagatgaacaaactgtctgacaacacactcagcacactataaaccccacaaaaacaaaataaaacaaaatcataattctatctaaataactttctccactttttccaaatatccataccaaacacataaacacctaaaataacacacatcaaaacaatacaaacgaaaaaccggacaaaacacaactcaacacaaacacgcccaactacaca

SEQ ID NO: 439026 - DNA, 569 bp, Homo sapiens
ctcaacactgttattctctagcttatcttcttggtcagagtctactttcttcttttctgggaagatgcttgtaagggagtaaggagaggctttctagctggaagggaagggcaaaatgaatgattagtgtttggaaacaccacaatactctgggaattgaacgttttctaaatccctgattgtaatgctgatgagtagaaactgactctgtttgtcatgtttagttttcataaatgataacaacgcctaacacaatataagtatattttctttttcaatataaaatgtctttgattcttgtattatttctttacatgaatggagggttggcctaagaagtatgctgtttcataggctcttgtataagataaatgaaaaagcaaagaaaatgaataaaatctaatactagaaaagaatgaaaaaatatgattaagccagtcatatattttgtagaaatggccatatgaggcattgtacccctaccctgttacctcctctaccactttctcatggtttgtttgatttagcatccttgccttgcgttttcttgtgttagaatgaaaaaaaaa

SEQ ID NO: 439027 - DNA, 4315 bp, Homo sapiens
aggcgcagcggcgacggcgtcggcggcggcggcggcagcggctccggccgaggtgcgcgctgggggggagggggggccggagaggagcatgaatggagcaaaatggcggatcatgtgcagagcctggcccaactagagaatctgtgcaaacagctgtatgaaaccacagacacaaccactcgactccaggcagagaaagccttggttgaatttaccaacagccctgattgcctgagcaagtgccagctactcctcgaaagaggaagttcctcttactcccagttactggcagctacatgccttaccaagcttgtatcacgcacaaacaaccccctaccattggaacagcgaatagatattcggaactatgtgctcaactaccttgccactcggccgaagttggctactttcgtgacacaagcacttattcagttatatgccagaatcacaaaactgggctggtttgactgtcagaaggatgactatgtcttcagaaatgcaatcacagacgtcacaaggtttttacaggatagtgttgaatactgcatcattggtgtcacaattttatctcagctaaccaatgaaattaatcaagcagacaccacccatcctttaaccaagcacagaaaaatagcctcttcttttcgcgattcatcattatttgatatcttcacactttcctgcaatttactaaaacaggcttcaggaaagaatctaaacttgaatgatgaaagtcagcatggcttgctcatgcaactgctcaagctcactcataactgcctcaactttgacttcatcggcacttccactgatgagtcctcagacgacctgtgtacagtgcagattcccaccagctggagatcagccttcttagattcttcaaccttgcactgtccaccattgggcgttgtgaatatgagaagacgtgtgcactcctcgtgcagttgtttgaccagtcggcccagtcgtaccaggagctgctacagagcgccagcgcaagcccaatggacattgcagtgcaggagggaaggctgacatggctggtttacattattggagcagtgatcggtggccgggtttcttttgccagcactgatgagcaagacgccatggatggtgagcttgtctgtcgggtgctccagctgatgaacctaacagattctcgtttggcccaggcgggtaatgagaagctagagttggccatgctgagcttttttgaacagtttcgtaagatctacattggggaccaagtgcagaaatcctctaagctgtaccgccgactctcagaagttctgggcttgaatgatgagaccatggtcctaagcgtcttcataggaaaaatcatcaccaacttgaagtactggggccgttgtgaaccaatcacctccaagacactacagcttctcaatgacctgtccattgggtacagtagcgtaaggaagctagtgaagcttagtgcggtacagttcatgctgaacaatcacacgagcgagcacttttcatttttgggtattaacaatcagtccaacctgacagacatgcggtgtcggactaccttctacacagcacttgggcgtctcctcatggtggatttaggagaggatgaagatcagtatgagcagttcatgctgccactcacagcagcatttgaggctgtggcccagatgtttagcaccaatagtttcaacgagcaggaggcaaagcgaactctagttggcctagtaagagacctgagagggatcgctttcgctttcaatgccaagaccagcttcatgatgctctttgaatggatatatccatcctatatgccaattctccaacgggcaattgagctctggtaccatgatccagcctgtactacacctgtactcaagttgatggctgaattggttcataataggtcccagcgactccagtttgatgtctcttcccccaatggcatcttactcttccgagaaaccagcaagatgataacaatgtatggcaatcgcatcctgacactaggagaggtcccaaaggatcaggtctatgctctgaagctcaagggcatctccatctgcttctccatgctgaaggctgctctcagtgggagttacgtcaatttcggagtctttcgtctctatggagacgatgccctggacaatgctctgcagaccttcatcaagctgctcctctctattcctcacagtgatctcttggattaccccaagctcagccagtcttattattcactactggaagtcctgacccaggaccatatgaactttattgcaagcctggaacctcacgtcatcatgtatattctctcttccatttctgaaggacttactgcacttgacaccatggtatgcacaggctgctgctcctgcctggaccacattgtgacatacctcttcaagcagctgtcacgtagcaccaagaagaggaccacacccctgaaccaggagagcgaccgctttctgcacatcatgcagcagcatccagagatgatccagcagatgctgtccacggtgctgaacatcatcatctttgaagactgtaggaaccagtggtctatgtcccgaccactacttggcttgatattgcttaatgaaaagtatttttctgacctaagaaacagtattgtgaacagccagccaccggagaagcagcaggccatgcacctgtgttttgagaacctgatggaaggcatcgagcgaaatcttcttacgaaaaacagagacaggttcacccagaacctgtcagcattccgtcgagaagtcaacgactcaatgaagaattccacttatggcgtgaatagcaatgacatgatgagctgacacctccttggactctacctgtacagagcagcgtccctttggtttggcccagaggggcgaacaattgcaagggagagggcctggctgatcctggctcttttctccaggggtgtggggaaaatggcaaaggtcaactagctgcttccccagggaataggggtgtgagtacactcactagggggcagggcgctgctggttcctgggggactgggtgggaagggtggtgggaggagataagagatacaaactgagactccagcctctcctcctggggccacccaagtggggagaacccctagtgtcctgccacaacctgccttgtataaacatgtacattttttcataacattttgaacaaggtttatattgactcaagtttaaaaacaaaaagtgtgactgaaaaatttttacagagtctagtgcaccaatgctgatgtgaggggttgtgtatgcgagtgaagaaaatgtgtattctggtggcctgaagctttactggacaaggatgtgtgagagtgcagagatatatttagtgacacagtagagaggcaaaaaaaaagctaaaattccaaatgtatattttttcgtattgccctgtcctcacccagaaatgatcaattcctgttactgtattaacccttgttattaggaactctaagccatgccagaacaccgtccctccccttggaccgtgtagattctgccctgggtccctagccccttgcagtgataaataactccagctaaaagtgtttggtgttcttatctccaccctctttcctactttgcttaccctcatcctcagacagatgcctcttgcttttaaaagttggatttaacgacgtgttgtagggttcttggtctgtgtgaaggcagagaccagagagaaggaagtgagcccactgctctcctgggagcaatgtgggtgagtccaccagaggccctgctgtgtgtggccaataaattttagtcttccccagccctcgaggcagtgtgtgtggatgtatgcgtgtggatatttatatatgtaccctgcactcatgaatgtatgaactggaggaagttactacagtggaagggttcttaataacaaggtctacctagcatgaagtatttaacattctcccatcccttaaaaaatatacatttttataaaatgaaaaccataataaatgttttgaatattaaaaaaaataataacctacagaggaaaattaatggagacagctatttgccttgtactttttccacaattgttgctgctagttgtacacatctctagttcagctcttgcccacgggacactcatcaattaggttttatttttatttctttcctctacccccagaaacaagcctgttaattttttttccttctcctctggcgactgtgtgatgaatcctttcttgcgtgatcaggttgcggatagacttgtaagggtgtttgctgcatacagtgtaagcattgtgaccgccaataaacttcaatggtttctactg

SEQ ID NO: 439028 - DNA, 559 bp, Homo sapiens
cctacccatctttttttgtggtcgtgatgtctgtgaattggtggtgcagatgtgtggtgacttttgatgaatgactttcttcttctcccagccctcaaggaaaccagcaaatcaaaagggtctcctgcttttttttttctttttgtcctccagcatcaccaacttgaagtactggggccgttgtgaaccaatcacctccaagacactacagcttctcaatgacctgtccattgggtacagtagcgtaaggaagctagtgaagcttagtgcggtacagttcatgctgaacaatcacacggtgagtgattttagctttttttcctggccctcctaccacccacacatacactttctcgacacataaaggagatatgtaaactgaggtcccgggtattgctacagcaaagacggtggtcctgattcccacgatactgccagattatacttacgtcatcagagtggctctttgagatccagatgatgtgagttatggtgaagtcacctactgctactcatactgcagataaattagtagtagtgacaacggtagcctgccttc

SEQ ID NO: 439029 - DNA, 4818 bp, Homo sapiens
ggaaccaaagtaagagtttaaagtgcaacagaagagagtctgctgaactttagacatgagggatccagggaggaagagcctggcccaactagagaatctgtgcaaacagctgtatgaaaccacagacacaaccactcgactccaggcagagaaagccttggttgaatttaccaacagccctgattgcctgagcaagtgccagctactcctcgaaagaggaagttcctcttactcccagttactggcagctacatgccttaccaagcttgtatcacgcacaaacaaccccctaccattggaacagcgaatagatattcggaactatgtgctcaactaccttgccactcggccgaagttggctactttcgtgacacaagcacttattcagttatatgccagaatcacaaaactgggctggtttgactgtcagaaggatgactatgtcttcagaaatgcaatcacagacgtcacaaggtttttacaggatagtgttgaatactgcatcattggtgtcacaattttatctcagctaaccaatgaaattaatcaagcagacaccacccatcctttaaccaagcacagaaaaatagcctcttcttttcgcgattcatcattatttgatatcttcacactttcctgcaatttactaaaacaggcttcaggaaagaatctaaacttgaatgatgaaagtcagcatggcttgctcatgcaactgctcaagctcactcataactgcctcaactttgacttcatcggcacttccactgatgagtcctcagacgacctgtgtacagtgcagattcccaccagctggagatcagccttcttagattcttcaaccttgcagctgttttttgacctgtatcattccatccctccttcattttcacctctggtattatcctgcttggtacagatcgcttcagtcagaagatccctgtttaacaatgcagagagggccaagtttctctctcatcttgttgatggtgttaaacgaatactggaaaacccacagagtttatcagacccaaacaattaccatgagttttgcagactactggcccgattgaagagtaactatcaactgggagaattggtaaaggtggaaaactaccctgaggtcatccgattgatagccaacttcacagtgaccagcctacagcactgggaatttgctccaaatagtgtgcactatcttctgagcctgtggcagcggctggcagcctctgtgccgtatgtcaaagccacagagccccacatgctggaaacttacactcctgaggtcaccaaagcctacatcacatcccggttggaatctgtgcacatcatactgagagatggcctggaagatcccctggaggatacggggctggtccagcagcagttggaccagctgtccaccattgggcgttgtgaatatgagaagacgtgtgcactcctcgtgcagttgtttgaccagtcggcccagtcgtaccaggagctgctacagagcgccagcgcaagcccaatggacattgcagtgcaggagggaaggctgacatggctggtttacattattggagcagtgatcggtggccgggtttcttttgccagcactgatgagcaagacgccatggatggtgagcttgtctgtcgggtgctccagctgatgaacctaacagattctcgtttggcccaggcgggtaatgagaagctagagttggccatgctgagcttttttgaacagtttcgtaagatctacattggggaccaagtgcagaaatcctctaagctgtaccgccgactctcagaagttctgggcttgaatgatgagaccatggtcctaagcgtcttcataggaaaaatcatcaccaacttgaagtactggggccgttgtgaaccaatcacctccaagacactacagcttctcaatgacctgtccattgggtacagtagcgtaaggaagctagtgaagcttagtgcggtacagttcatgctgaacaatcacacgagcgagcacttttcatttttgggtattaacaatcagtccaacctgacagacatgcggtgtcggactaccttctacacagcacttgggcgtctcctcatggtggatttaggagaggatgaagatcagtatgagcagttcatgctgccactcacagcagcatttgaggctgtggcccagatgtttagcaccaatagtttcaacgagcaggaggcaaagcgaactctagttggcctagtaagagacctgagagggatcgctttcgctttcaatgccaagaccagcttcatgatgctctttgaatggatatatccatcctatatgccaattctccaacgggcaattgagctctggtaccatgatccagcctgtactacacctgtactcaagttgatggctgaattggttcataataggtcccagcgactccagtttgatgtctcttcccccaatggcatcttactcttccgagaaaccagcaagatgataacaatgtatggcaatcgcatcctgacactaggagaggtcccaaaggatcaggtctatgctctgaagctcaagggcatctccatctgcttctccatgctgaaggctgctctcagtgggagttacgtcaatttcggagtctttcgtctctatggagacgatgccctggacaatgctctgcagaccttcatcaagctgctcctctctattcctcacagtgatctcttggattaccccaagctcagccagtcttattattcactactggaagtcctgacccaggaccatatgaactttattgcaagcctggaacctcacgtcatcatgtatattctctcttccatttctgaaggacttactgcacttgacaccatggtatgcacaggctgctgctcctgcctggaccacattgtgacatacctcttcaagcagctgtcacgtagcaccaagaagaggaccacacccctgaaccaggagagcgaccgctttctgcacatcatgcagcagcatccagagatgatccagcagatgctgtccacggtgctgaacatcatcatctttgaagactgtaggaaccagtggtctatgtcccgaccactacttggcttgatattgcttaatgaaaagtatttttctgacctaagaaacagtattgtgaacagccagccaccggagaagcagcaggccatgcacctgtgttttgagaacctgatggaaggcatcgagcgaaatcttcttacgaaaaacagagacaggttcacccagaacctgtcagcattccgtcgagaagtcaacgactcaatgaagaattccacttatggcgtgaatagcaatgacatgatgagctgacacctccttggactctacctgtacagagcagcgtccctttggtttggcccagaggggcgaacaattgcaagggagagggcctggctgatcctggctcttttctccaggggtgtggggaaaatggcaaaggtcaactagctgcttccccagggaataggggtgtgagtacactcactagggggcagggcgctgctggttcctgggggactgggtgggaagggtggtgggaggagataagagatacaaactgagactccagcctctcctcctggggccacccaagtggggagaacccctagtgtcctgccacaacctgccttgtataaacatgtacattttttcataacattttgaacaaggtttatattgactcaagtttaaaaacaaaaagtgtgactgaaaaatttttacagagtctagtgcaccaatgctgatgtgaggggttgtgtatgcgagtgaagaaaatgtgtattctggtggcctgaagctttactggacaaggatgtgtgagagtgcagagatatatttagtgacacagtagagaggcaaaaaaaaagctaaaattccaaatgtatattttttcgtattgccctgtcctcacccagaaatgatcaattcctgttactgtattaacccttgttattaggaactctaagccatgccagaacaccgtccctccccttggaccgtgtagattctgccctgggtccctagccccttgcagtgataaataactccagctaaaagtgtttggtgttcttatctccaccctctttcctactttgcttaccctcatcctcagacagatgcctcttgcttttaaaagttggatttaacgacgtgttgtagggttcttggtctgtgtgaaggcagagaccagagagaaggaagtgagcccactgctctcctgggagcaatgtgggtgagtccaccagaggccctgctgtgtgtggccaataaattttagtcttccccagccctcgaggcagtgtgtgtggatgtatgcgtgtggatatttatatatgtaccctgcactcatgaatgtatgaactggaggaagttactacagtggaagggttcttaataacaaggtctacctagcatgaagtatttaacattctcccatcccttaaaaaatatacatttttataaaatgaaaaccataataaatgttttgaatattaaaaaaaataataacctacagaggaaaattaatggagacagctatttgccttgtactttttccacaattgttgctgctagttgtacacatctctagttcagctcttgcccacgggacactcatcaattaggttttatttttatttctttcctctacccccagaaacaagcctgttaattttttttccttctcctctggcgactgtgtgatgaatcctttcttgcgtgatcaggttgcggatagacttgtaagggtgtttgctgcatacagtgtaagcattgtgaccgccaataaacttcaatggtttctactg

SEQ ID NO: 439030 - DNA, 2704 bp, Homo sapiens
  misc_feature (4)..(4): n is a, c, g, or t
gganccccgaaggcgtggtctgggtcacagcagcatttgaggctgtggcccagatgtttagcaccaatagtttcaacgagcaggaggcaaagcgaactctagttggcctagtaagagacctgagagggatcgctttcgctttcaatgccaagaccagcttcatgatgctctttgaatggatatatccatcctatatgccaattctccaacgggcaattgagctctggtaccatgatccagcctgtactacacctgtactcaagttgatggctgaattggttcataataggtcccagcgactccagtttgatgtctcttcccccaatggcatcttactcttccgagaaaccagcaagatgataacaatgtatggcaatcgcatcctgacactaggagaggtcccaaaggatcaggtctatgctctgaagctcaagggcatctccatctgcttctccatgctgaaggctgctctcagtgggagttacgtcaatttcggagtctttcgtctctatggagacgatgccctggacaatgctctgcagaccttcatcaagctgctcctctctattcctcacagtgatctcttggattaccccaagctcagccagtcttattattcactactggaagtcctgacccaggaccatatgaactttattgcaagcctggaacctcacgtcatcatgtatattctctcttccatttctgaaggacttactgcacttgacaccatggtatgcacaggctgctgctcctgcctggaccacattgtgacatacctcttcaagcagctgtcacgtagcaccaagaagaggaccacacccctgaaccaggagagcgaccgctttctgcacatcatgcagcagcatccagagatgatccagcagatgctgtccacggtgctgaacatcatcatctttgaagactgtaggaaccagtggtctatgtcccgaccactacttggcttgatattgcttaatgaaaagtatttttctgacctaagaaacagtattgtgaacagccagccaccggagaagcagcaggccatgcacctgtgttttgagaacctgatggaaggcatcgagcgaaatcttcttacgaaaaacagagacaggttcacccagaacctgtcagcattccgtcgagaagtcaacgactcaatgaagaattccacttatggcgtgaatagcaatgacatgatgagctgacacctccttggactctacctgtacagagcagcgtccctttggtttggcccagaggggcgaacaattgcaagggagagggcctggctgatcctggctcttttctccaggggtgtggggaaaatggcaaaggtcaactagctgcttccccagggaataggggtgtgagtacactcactagggggcagggcgctgctggttcctgggggactgggtgggaagggtggtgggaggagataagagatacaaactgagactccagcctctcctcctggggccacccaagtggggagaacccctagtgtcctgccacaacctgccttgtataaacatgtacattttttcataacattttgaacaaggtttatattgactcaagtttaaaaacaaaaagtgtgactgaaaaatttttacagagtctagtgcaccaatgctgatgtgaggggttgtgtatgcgagtgaagaaaatgtgtattctggtggcctgaagctttactggacaaggatgtgtgagagtgcagagatatatttagtgacacagtagagaggcaaaaaaaaagctaaaattccaaatgtatattttttcgtattgccctgtcctcacccagaaatgatcaattcctgttactgtattaacccttgttattaggaactctaagccatgccagaacaccgtccctccccttggaccgtgtagattctgccctgggtccctagccccttgcagtgataaataactccagctaaaagtgtttggtgttcttatctccaccctctttcctactttgcttaccctcatcctcagacagatgcctcttgcttttaaaagttggatttaacgacgtgttgtagggttcttggtctgtgtgaaggcagagaccagagagaaggaagtgagcccactgctctcctgggagcaatgtgggtgagtccaccagaggccctgctgtgtgtggccaataaattttagtcttccccagccctcgaggcagtgtgtgtggatgtatgcgtgtggatatttatatatgtaccctgcactcatgaatgtatgaactggaggaagttactacagtggaagggttcttaataacaaggtctacctagcatgaagtatttaacattctcccatcccttaaaaaatatacatttttataaaatgaaaaccataataaatgttttgaatattaaaaaaaataataacctacagaggaaaattaatggagacagctatttgccttgtactttttccacaattgttgctgctagttgtacacatctctagttcagctcttgcccacgggacactcatcaattaggttttatttttatttctttcctctacccccagaaacaagcctgttaattttttttccttctcctctggcgactgtgtgatgaatcctttcttgcgtgatcaggttgcggatagacttgtaagggtgtttgctgcatacagtgtaagcattgtgaccgccaataaacttcaatggtttctactg

SEQ ID NO: 439031 - DNA, 4808 bp, Homo sapiens
aggcgcagcggcgacggcgtcggcggcggcggcggcagcggctccggccgaggtgcgcgctgggggggagggggggccggagaggagcatgaatggagcaaaatggcggatcatgtgcagagcctggcccaactagagaatctgtgcaaacagctgtatgaaaccacagacacaaccactcgactccaggcagagaaagccttggttgaatttaccaacagccctgattgcctgagcaagtgccagctactcctcgaaagaggaagttcctcttactcccagttactggcagctacatgccttaccaagcttgtatcacgcacaaacaaccccctaccattggaacagcgaatagatattcggaactatgtgctcaactaccttgccactcggccgaagttggctactttcgtgacacaagcacttattcagttatatgccagaatcacaaaactgggctggtttgactgtcagaaggatgactatgtcttcagaaatgcaatcacagacgtcacaaggtttttacaggatagtgttgaatactgcatcattggtgtcacaattttatctcagctaaccaatgaaattaatcaagcagacaccacccatcctttaaccaagcacagaaaaatagcctcttcttttcgcgattcatcattatttgatatcttcacactttcctgcaatttactaaaacaggcttcaggaaagaatctaaacttgaatgatgaaagtcagcatggcttgctcatgcaactgctcaagctcactcataactgcctcaactttgacttcatcggcacttccactgatgagtcctcagacgacctgtgtacagtgcagattcccaccagctggagatcagccttcttagattcttcaaccttgcagctgttttttgacctgtatcattccatccctccttcattttcacctctggtattatcctgcttggtacagatcgcttcagtcagaagatccctgtttaacaatgcagagagggccaagtttctctctcatcttgttgatggtgttaaacgaatactggaaaacccacagagtttatcagacccaaacaattaccatgagttttgcagactactggcccgattgaagagtaactatcaactgggagaattggtaaaggtggaaaactaccctgaggtcatccgattgatagccaacttcacagtgaccagcctacagcactgggaatttgctccaaatagtgtgcactatcttctgagcctgtggcagcggctggcagcctctgtgccgtatgtcaaagccacagagccccacatgctggaaacttacactcctgaggtcaccaaagcctacatcacatcccggttggaatctgtgcacatcatactgagagatggcctggaagatcccctggaggatacggggctggtccagcagcagttggaccagctgtccaccattgggcgttgtgaatatgagaagacgtgtgcactcctcgtgcagttgtttgaccagtcggcccagtcgtaccaggagctgctacagagcgccagcgcaagcccaatggacattgcagtgcaggagggaaggctgacatggctggtttacattattggagcagtgatcggtggccgggtttcttttgccagcactgatgagcaagacgccatggatggtgagcttgtctgtcgggtgctccagctgatgaacctaacagattctcgtttggcccaggcgggtaatgagaagctagagttggccatgctgagcttttttgaacagtttcgtaagatctacattggggaccaagtgcagaaatcctctaagctgtaccgccgactctcagaagttctgggcttgaatgatgagaccatggtcctaagcgtcttcataggaaaaatcatcaccaacttgaagtactggggccgttgtgaaccaatcacctccaagacactacagcttctcaatgacctgtccattgggtacagtagcgtaaggaagctagtgaagcttagtgcggtacagttcatgctgaacaatcacacgagcgagcacttttcatttttgggtattaacaatcagtccaacctgacagacatgcggtgtcggactaccttctacacagcacttgggcgtctcctcatggtggatttaggagaggatgaagatcagtatgagcagttcatgctgccactcacagcagcatttgaggctgtggcccagatgtttagcaccaatagtttcaacgagcaggaggcaaagcgaactctagttggcctagtaagagacctgagagggatcgctttcgctttcaatgccaagaccagcttcatgatgctctttgaatggatatatccatcctatatgccaattctccaacgggcaattgagctctggtaccatgatccagcctgtactacacctgtactcaagttgatggctgaattggttcataataggtcccagcgactccagtttgatgtctcttcccccaatggcatcttactcttccgagaaaccagcaagatgataacaatgtatggcaatcgcatcctgacactaggagaggtcccaaaggatcaggtctatgctctgaagctcaagggcatctccatctgcttctccatgctgaaggctgctctcagtgggagttacgtcaatttcggagtctttcgtctctatggagacgatgccctggacaatgctctgcagaccttcatcaagctgctcctctctattcctcacagtgatctcttggattaccccaagctcagccagtcttattattcactactggaagtcctgacccaggaccatatgaactttattgcaagcctggaacctcacgtcatcatgtatattctctcttccatttctgaaggacttactgcacttgacaccatggtatgcacaggctgctgctcctgcctggaccacattgtgacatacctcttcaagcagctgtcacgtagcaccaagaagaggaccacacccctgaaccaggagagcgaccgctttctgcacatcatgcagcagcatccagagatgatccagcagatgctgtccacggtgctgaacatcatcatctttgaagactgtaggaaccagtggtctatgtcccgaccactacttggcttgatattgcttaatgaaaagtatttttctgacctaagaaacagtattgtgaacagccagccaccggagaagcagcaggccatgcacctgtgttttgagaacctgatggaaggcatcgagcgaaatcttcttacgaaaaacagagacaggttcacccagaacctgtcagcattccgtcgagaagtcaacgactcaatgaagaattccacttatggcgtgaatagcaatgacatgatgagctgacacctccttggactctacctgtacagagcagcgtccctttggtttggcccagaggggcgaacaattgcaagggagagggcctggctgatcctggctcttttctccaggggtgtggggaaaatggcaaaggtcaactagctgcttccccagggaataggggtgtgagtacactcactagggggcagggcgctgctggttcctgggggactgggtgggaagggtggtgggaggagataagagatacaaactgagactccagcctctcctcctggggccacccaagtggggagaacccctagtgtcctgccacaacctgccttgtataaacatgtacattttttcataacattttgaacaaggtttatattgactcaagtttaaaaacaaaaagtgtgactgaaaaatttttacagagtctagtgcaccaatgctgatgtgaggggttgtgtatgcgagtgaagaaaatgtgtattctggtggcctgaagctttactggacaaggatgtgtgagagtgcagagatatatttagtgacacagtagagaggcaaaaaaaaagctaaaattccaaatgtatattttttcgtattgccctgtcctcacccagaaatgatcaattcctgttactgtattaacccttgttattaggaactctaagccatgccagaacaccgtccctccccttggaccgtgtagattctgccctgggtccctagccccttgcagtgataaataactccagctaaaagtgtttggtgttcttatctccaccctctttcctactttgcttaccctcatcctcagacagatgcctcttgcttttaccagagagaaggaagtgagcccactgctctcctgggagcaatgtgggtgagtccaccagaggccctgctgtgtgtggccaataaattttagtcttccccagccctcgaggcagtgtgtgtggatgtatgcgtgtggatatttatatatgtaccctgcactcatgaatgtatgaactggaggaagttactacagtggaagggttcttaataacaaggtctacctagcatgaagtatttaacattctcccatcccttaaaaaatatacatttttataaaatgaaaaccataataaatgttttgaatattaaaaaaaataataacctacagaggaaaattaatggagacagctatttgccttgtactttttccacaattgttgctgctagttgtacacatctctagttcagctcttgcccacgggacactcatcaattaggttttatttttatttctttcctctacccccagaaacaagcctgttaattttttttccttctcctctggcgactgtgtgatgaatcctttcttgcgtgatcaggttgcggatagacttgtaagggtgtttgctgcatacagtgtaagcattgtgaccgccaataaacttcaatggtttctactg

SEQ ID NO: 439032 - DNA, 2196 bp, Homo sapiens
ggacgcgtgggtccggacgcgtgggtcgatccacgcgtgccgcaagctgctcctctctattcctcacagtgatctcttggattaccccaagctcagccagtcttattattcactactggaagtcctgacccaggaccatatgaactttattgcaagcctggaacctcacgtcatcatgtatattctctcttccatttctgaaggacttactgcacttgacaccatggtatgcacaggctgctgctcctgcctggaccacattgtgacatacctcttcaagcagctgtcacgtagcaccaagaagaggaccacacccctgaaccaggagagcgaccgctttctgcacatcatgcagcagcatccagagatgatccagcagatgctgtccacggtgctgaacatcatcatctttgaagactgtaggaaccagtggtctatgtcccgaccactacttggcttgatattgcttaatgaaaagtatttttctgacctaagaaacagtattgtgaacagccagccaccggagaagcagcaggccatgcacctgtgttttgagaacctgatggaaggcatcgagcgaaatcttcttacgaaaaacagagacaggttcacccagaacctgtcagcattccgtcgagaagtcaacgactcaatgaagaattccacttatggcgtgaatagcaatgacatgatgagctgacacctccttggactctacctgtacagagcagcgtccctttggtttggcccagaggggcgaacaattgcaagggagagggcctggctgatcctggctcttttctccaggggtgtggggaaaatggcaaaggtcaactagctgcttccccagggaataggggtgtgagtacactcactagggggcagggcgctgctggttcctgggggactgggtgggaagggtggtgggaggagataagagatacaaactgagactccagcctctcctcctggggccacccaagtggggagaacccctagtgtcctgccacaacctgccttgtataaacatgtacattttttcataacattttgaacaaggtttatattgactcaagtttaaaaacaaaaagtgtgactgaaaaatttttacagagtctagtgcaccaatgctgatgtgaggggttgtgtatgcgagtgaagaaaatgtgtattctggtggcctgaagctttactggacaaggatgtgtgagagtgcagagatatatttagtgacacagtagagaggcaaaaaaaaagctaaaattccaaatgtatattttttcgtattgccctgtcctcacccagaaatgatcaattcctgttactgtattaacccttgttattaggaactctaagccatgccagaacaccgtccctccccttggaccgtgtagattctgccctgggtccctagccccttgcagtgataaataactccagctaaaagtgtttggtgttcttatctccaccctctttcctactttgcttaccctcatcctcagacagatgcctcttgcttttaaaagttggatttaacgacgtgttgtagggttcttggtctgtgtgaaggcagagaccagagagaaggaagtgagcccactgctctcctgggagcaatgtgggtgagtccaccagaggccctgctgtgtgtggccaataaattttagtcttccccagccctcgaggcagtgtgtgtggatgtatgcgtgtggatatttatatatgtaccctgcactcatgaatgtatgaactggaggaagttactacagtggaagggttcttaataacaaggtctacctagcatgaagtatttaacattctcccatcccttaaaaaatatacatttttataaaatgaaaaccataataaatgttttgaatattaaaaaaaataataacctacagaggaaaattaatggagacagctatttgccttgtactttttccacaattgttgctgctagttgtacacatctctagttcagctcttgcccacgggacactcatcaattaggttttatttttatttctttcctctacccccagaaacaagcctgttaattttttttccttctcctctggcgactgtgtgatgaatcctttcttgcgtgatcaggttgcggatagacttgtaagggtgtttgctgcatacagtgtaagcattgtgaccgccaataaacttcaatggtttctactg

SEQ ID NO: 439033 - DNA, 2098 bp, Homo sapiens
  misc_feature (1)..(1): n is a, c, g, or t
ngacaaaacaaaatagaaaaaaaaaaaaataacggctaagtcgagcccgggatgaatcggacgaggctcacgtcatcatgtatattctctcttccatttctgaaggacttactgcacttgacaccatggtatgcacaggctgctgctcctgcctggaccacattgtgacatacctcttcaagcagctgtcacgtagcaccaagaagaggaccacacccctgaaccaggagagcgaccgctttctgcacatcatgcagcagcatccagagatgatccagcagatgctgtccacggtgctgaacatcatcatctttgaagactgtaggaaccagtggtctatgtcccgaccactacttggcttgatattgcttaatgaaaagtatttttctgacctaagaaacagtattgtgaacagccagccaccggagaagcagcaggccatgcacctgtgttttgagaacctgatggaaggcatcgagcgaaatcttcttacgaaaaacagagacaggttcacccagaacctgtcagcattccgtcgagaagtcaacgactcaatgaagaattccacttatggcgtgaatagcaatgacatgatgagctgacacctccttggactctacctgtacagagcagcgtccctttggtttggcccagaggggcgaacaattgcaagggagagggcctggctgatcctggctcttttctccaggggtgtggggaaaatggcaaaggtcaactagctgcttccccagggaataggggtgtgagtacactcactagggggcagggcgctgctggttcctgggggactgggtgggaagggtggtgggaggagataagagatacaaactgagactccagcctctcctcctggggccacccaagtggggagaacccctagtgtcctgccacaacctgccttgtataaacatgtacattttttcataacattttgaacaaggtttatattgactcaagtttaaaaacaaaaagtgtgactgaaaaatttttacagagtctagtgcaccaatgctgatgtgaggggttgtgtatgcgagtgaagaaaatgtgtattctggtggcctgaagctttactggacaaggatgtgtgagagtgcagagatatatttagtgacacagtagagaggcaaaaaaaaagctaaaattccaaatgtatattttttcgtattgccctgtcctcacccagaaatgatcaattcctgttactgtattaacccttgttattaggaactctaagccatgccagaacaccgtccctccccttggaccgtgtagattctgccctgggtccctagccccttgcagtgataaataactccagctaaaagtgtttggtgttcttatctccaccctctttcctactttgcttaccctcatcctcagacagatgcctcttgcttttaaaagttggatttaacgacgtgttgtagggttcttggtctgtgtgaaggcagagaccagagagaaggaagtgagcccactgctctcctgggagcaatgtgggtgagtccaccagaggccctgctgtgtgtggccaataaattttagtcttccccagccctcgaggcagtgtgtgtggatgtatgcgtgtggatatttatatatgtaccctgcactcatgaatgtatgaactggaggaagttactacagtggaagggttcttaataacaaggtctacctagcatgaagtatttaacattctcccatcccttaaaaaatatacatttttataaaatgaaaaccataataaatgttttgaatattaaaaaaaataataacctacagaggaaaattaatggagacagctatttgccttgtactttttccacaattgttgctgctagttgtacacatctctagttcagctcttgcccacgggacactcatcaattaggttttatttttatttctttcctctacccccagaaacaagcctgttaattttttttccttctcctctggcgactgtgtgatgaatcctttcttgcgtgatcaggttgcggatagacttgtaagggtgtttgctgcatacagtgtaagcattgtgaccgccaataaacttcaatggtttctactg

SEQ ID NO: 439034 - DNA, 3747 bp, Homo sapiens
  misc_feature (3604)..(3604): n is a, c, g, or t
  misc_feature (3609)..(3609): n is a, c, g, or t
  misc_feature (3645)..(3645): n is a, c, g, or t
aggcgcagcggcgacggcgtcggcggcggcggcggcagcggctccggccgaggtgcgcgctgggggggagggggggccggagaggagcatgaatggagcaaaatggcggatcatgtgcagagcctggcccaactagagaatctgtgcaaacagctgtatgaaaccacagacacaaccactcgactccaggcagagaaagccttggttgaatttaccaacagccctgattgcctgagcaagtgccagctactcctcgaaagaggaagttcctcttactcccagttactggcagctacatgccttaccaagcttgtatcacgcacaaacaaccccctaccattggaacagcgaatagatattcggaactatgtgctcaactaccttgccactcggccgaagttggctactttcgtgacacaagcacttattcagttatatgccagaatcacaaaactgggctggtttgactgtcagaaggatgactatgtcttcagaaatgcaatcacagacgtcacaaggtttttacaggatagtgttgaatactgcatcattggtgtcacaattttatctcagctaaccaatgaaattaatcaagcagacaccacccatcctttaaccaagcacagaaaaatagcctcttcttttcgcgattcatcattatttgatatcttcacactttcctgcaatttactaaaacaggcttcaggaaagaatctaaacttgaatgatgaaagtcagcatggcttgctcatgcaactgctcaagctcactcataactgcctcaactttgacttcatcggcacttccactgatgagtcctcagacgacctgtgtacagtgcagattcccaccagctggagatcagccttcttagattcttcaaccttgcagctgttttttgacctgtatcattccatccctccttcattttcacctctggtattatcctgcttggtacagatcgcttcagtcagaagatccctgtttaacaatgcagagagggccaagtttctctctcatcttgttgatggtgttaaacgaatactggaaaacccacagagtttatcagacccaaacaattaccatgagttttgcagactactggcccgattgaagagtaactatcaactgggagaattggtaaaggtggaaaactaccctgaggtcatccgattgatagccaacttcacagtgaccagcctacagcactgggaatttgctccaaatagtgtgcactatcttctgagcctgtggcagcggctggcagcctctgtgccgtatgtcaaagccacagagccccacatgctggaaacttacactcctgaggtcaccaaagcctacatcacatcccggttggaatctgtgcacatcatactgagagatggcctggaagatcccctggaggatacggggctggtccagcagcagttggaccagctgtccaccattgggcgttgtgaatatgagaagacgtgtgcactcctcgtgcagttgtttgaccagtcggcccagtcgtaccaggagctgctacagagcgccagcgcaagcccaatggacattgcagtgcaggagggaaggctgacatggctggtttacattattggagcagtgatcggtggccgggtttcttttgccagcactgatgagcaagacgccatggatggtgagcttgtctgtcgggtgctccagctgatgaacctaacagattctcgtttggcccaggcgggtaatgagaagctagagttggccatgctgagcttttttgaacagtttcgtaagatctacattggggaccaagtgcagaaatcctctaagctgtaccgccgactctcagaagttctgggcttgaatgatgagaccatggtcctaagcgtcttcataggaaaaatcatcaccaacttgaagtactggggccgttgtgaaccaatcacctccaagacactacagcttctcaatgacctgtccattgggtacagtagcgtaaggaagctagtgaagcttagtgcggtacagttcatgctgaacaatcacacgagcgagcacttttcatttttgggtattaacaatcagtccaacctgacagacatgcggtgtcggactaccttctacacagcacttgggcgtctcctcatggtggatttaggagaggatgaagatcagtatgagcagttcatgctgccactcacagcagcatttgaggctgtggcccagatgtttagcaccaatagtttcaacgagcaggaggcaaagcgaactctagttggcctagtaagagacctgagagggatcgctttcgctttcaatgccaagaccagcttcatgatgctctttgaatggatatatccatcctatatgccaattctccaacgggcaattgagctctggtaccatgatccagcctgtactacacctgtactcaagttgatggctgaattggttcataataggtcccagcgactccagtttgatgtctcttcccccaatggcatcttactcttccgagaaaccagcaagatgataacaatgtatggcaatcgcatcctgacactaggagaggtcccaaaggatcaggtctatgctctgaagctcaagggcatctccatctgcttctccatgctgaaggctgctctcagtgggagttacgtcaatttcggagtctttcgtctctatggagacgatgccctggacaatgctctgcagaccttcatcaagctgctcctctctattcctcacagtgatctcttggattaccccaagctcagccagtcttattattcactactggaagtcctgacccaggaccatatgaactttattgcaagcctggaacctcacgtcatcatgtatattctctcttccatttctgaaggacttactgcacttgacaccatggtatgcacaggctgctgctcctgcctggaccacattgtgacatacctcttcaagcagctgtcacgtagcaccaagaagaggaccacacccctgaaccaggagagcgaccgctttctgcacatcatgcagcagcatccagagatgatccagcagatgctgtccacggtgctgaacatcatcatctttgaagactgtaggaaccagtggtctatgtcccgaccactacttggcttgatattgcttaatgaaaagtatttttctgacctaagaaacagtattgtgaacagccagccaccggagaagcagcaggccatgcacctgtgttttgagaacctgatggaaggcatcgagcgaaatcttcttacgaaaaacagagacaggttcacccagaacctgtcagcattccgtcgagaagtcaacgactcaatgaagaattccacttatggcgtgaatagcaatgacatgatgagctgacacctccttggactctacctgtacagagcagcgtccctttggtttggcccagaggggcgaacaattgcaagggagagggcctggctgatcctggctcttttctccaggggtgtggggaaaatggcaaaggtcaactagctgcttccccagggaataggggtgtgagtacactcactagggggcagggcgctgctggttcctgggggactgggtgggaagggtggtgggaggagatttnttttntttctttttttttatttgtttttttggggttctcangtgttggagagacattagtaaagccacatccttgcctagcataaaactcctgtttcttgattgttgtcctacagtgcctccattgctgcattttttaaaatc

SEQ ID NO: 439035 - DNA, 3423 bp, Homo sapiens
aggcgcagcggcgacggcgtcggcggcggcggcggcagcggctccggccgaggtgcgcgctgggggggagggggggccggagaggagcatgaatggagcaaaatggcggatcatgtgcagagcctggcccaactagagaatctgtgcaaacagctgtatgaaaccacagacacaaccactcgactccaggcagagaaagccttggttgaatttaccaacagccctgattgcctgagcaagtgccagctactcctcgaaagaggaagttcctcttactcccagttactggcagctacatgccttaccaagcttgtatcacgcacaaacaaccccctaccattggaacagcgaatagatattcggaactatgtgctcaactaccttgccactcggccgaagttggctactttcgtgacacaagcacttattcagttatatgccagaatcacaaaactgggctggtttgactgtcagaaggatgactatgtcttcagaaatgcaatcacagacgtcacaaggtttttacaggatagtgttgaatactgcatcattggtgtcacaattttatctcagctaaccaatgaaattaatcaagcagacaccacccatcctttaaccaagcacagaaaaatagcctcttcttttcgcgattcatcattatttgatatcttcacactttcctgcaatttactaaaacaggcttcaggaaagaatctaaacttgaatgatgaaagtcagcatggcttgctcatgcaactgctcaagctcactcataactgcctcaactttgacttcatcggcacttccactgatgagtcctcagacgacctgtgtacagtgcagattcccaccagctggagatcagccttcttagattcttcaaccttgcagctgttttttgacctgtatcattccatccctccttcattttcacctctggtattatcctgcttggtacagatcgcttcagtcagaagatccctgtttaacaatgcagagagggccaagtttctctctcatcttgttgatggtgttaaacgaatactggaaaacccacagagtttatcagacccaaacaattaccatgagttttgcagactactggcccgattgaagagtaactatcaactgggagaattggtaaaggtggaaaactaccctgaggtcatccgattgatagccaacttcacagtgaccagcctacagcactgggaatttgctccaaatagtgtgcactatcttctgagcctgtggcagcggctggcagcctctgtgccgtatgtcaaagccacagagccccacatgctggaaacttacactcctgaggtcaccaaagcctacatcacatcccggttggaatctgtgcacatcatactgagagatggcctggaagatcccctggaggatacggggctggtccagcagcagttggaccagctgtccaccattgggcgttgtgaatatgagaagacgtgtgcactcctcgtgcagttgtttgaccagtcggcccagtcgtaccaggagctgctacagagcgccagcgcaagcccaatggacattgcagtgcaggagggaaggctgacatggctggtttacattattggagcagtgatcggtggccgggtttcttttgccagcactgatgagcaagacgccatggatggtgagcttgtctgtcgggtgctccagctgatgaacctaacagattctcgtttggcccaggcgggtaatgagaagctagagttggccatgctgagcttttttgaacagtttcgtaagatctacattggggaccaagtgcagaaatcctctaagctgtaccgccgactctcagaagttctgggcttgaatgatgagaccatggtcctaagcgtcttcataggaaaaatcatcaccaacttgaagtactggggccgttgtgaaccaatcacctccaagacactacagcttctcaatgacctgtccattgggtacagtagcgtaaggaagctagtgaagcttagtgcggtacagttcatgctgaacaatcacacgagcgagcacttttcatttttgggtattaacaatcagtccaacctgacagacatgcggtgtcggactaccttctacacagcacttgggcgtctcctcatggtggatttaggagaggatgaagatcagtatgagcagttcatgctgccactcacagcagcatttgaggctgtggcccagatgtttagcaccaatagtttcaacgagcaggaggcaaagcgaactctagttggcctagtaagagacctgagagggatcgctttcgctttcaatgccaagaccagcttcatgatgctctttgaatggatatatccatcctatatgccaattctccaacgggcaattgagctctggtaccatgatccagcctgtactacacctgtactcaagttgatggctgaattggttcataataggtcccagcgactccagtttgatgtctcttcccccaatggcatcttactcttccgagaaaccagcaagatgataacaatgtatggcaatcgcatcctgacactaggagaggtcccaaaggatcaggtctatgctctgaagctcaagggcatctccatctgcttctccatgctgaaggctgctctcagtgggagttacgtcaatttcggagtctttcgtctctatggagacgatgccctggacaatgctctgcagaccttcatcaagctgctcctctctattcctcacagtgatctcttggattaccccaagctcagccagtcttattattcactactggaagtcctgacccaggaccatatgaactttattgcaagcctggaacctcacgtcatcatgtatattctctcttccatttctgaaggacttactgcacttgacaccatggtatgcacaggctgctgctcctgcctggaccacattgtgacatacctcttcaagcagctgtcacgtagcaccaagaagaggaccacacccctgaaccaggagagcgaccgctttctgcacatcatgcagcagcatccagagatgatccagcagatgctgtccacggtgctgaacatcatcatctttgaagactgtaggaaccagtggtctatgtcccgaccactacttggcttgatattgcttaatgaaaagtatttttctgacctaagaaacagtattgtgaacagccagccaccggagaagcagcaggccatgcacctgtgttttgagaacctgatggaaggcatcgagcgaaatcttcttacgaaaaacagagacagaaacaagcctgttaattttttttccttctcctctggcgactgtgtgatgaatcctttcttgcgtgatcaggttgcggatagacttgtaagggtgtttgctgcatacagtgtaagcattgtgaccgccaataaacttcaatggtttctactg

SEQ ID NO: 439036 - DNA, 2324 bp, Homo sapiens
aggcgcagcggcgacggcgtcggcggcggcggcggcagcggctccggccgaggtgcgcgctgggggggagggggggccggagaggagcatgaatggagcaaaatggcggatcatgtgcagagcctggcccaactagagaatctgtgcaaacagctgtatgaaaccacagacacaaccactcgactccaggcagagaaagccttggttgaatttaccaacagccctgattgcctgagcaagtgccagctactcctcgaaagaggaagttcctcttactcccagttactggcagctacatgccttaccaagcttgtatcacgcacaaacaaccccctaccattggaacagcgaatagatattcggaactatgtgctcaactaccttgccactcggccgaagttggctactttcgtgacacaagcacttattcagttatatgccagaatcacaaaactgggctggtttgactgtcagaaggatgactatgtcttcagaaatgcaatcacagacgtcacaaggtttttacaggatagtgttgaatactgcatcattggtgtcacaattttatctcagctaaccaatgaaattaatcaagcagacaccacccatcctttaaccaagcacagaaaaatagcctcttcttttcgcgattcatcattatttgatatcttcacactttcctgcaatttactaaaacaggcttcaggaaagaatctaaacttgaatgatgaaagtcagcatggcttgctcatgcaactgctcaagctcactcataactgcctcaactttgacttcatcggcacttccactgatgagtcctcagacgacctgtgtacagtgcagattcccaccagctggagatcagccttcttagattcttcaaccttgcagctgttttttgacctgtatcattccatccctccttcattttcacctctggtattatcctgcttggtacagatcgcttcagtcagaagatccctgtttaacaatgcagagagggccaagtttctctctcatcttgttgatggtgttaaacgaatactggaaaacccacagagtttatcagacccaaacaattaccatgagttttgcagactactggcccgattgaagagtaactatcaactgggagaattggtaaaggtggaaaactaccctgaggtcatccgattgatagccaacttcacagtgaccagcctacagcactgggaatttgctccaaatagtgtgcactatcttctgagcctgtggcagcggctggcagcctctgtgccgtatgtcaaagccacagagccccacatgctggaaacttacactcctgaggtcaccaaagcctacatcacatcccggttggaatctgtgcacatcatactgagagatggcctggaagatcccctggaggatacggggctggtccagcagcagttggaccagctgtccaccattgggcgttgtgaatatgagaagacgtgtgcactcctcgtgcagttgtttgaccagtcggcccagtcgtaccaggagctgctacagagcgccagcgcaagcccaatggacattgcagtgcaggagggaaggctgacatggctggtttacattattggagcagtgatcggtggccgggtttcttttgccagcactgatgagcaagacgccatggatggtgagcttgtctgtcgggtgctccagctgatgaacctaacagattctcgtttggcccaggcgggtaatgagaagctagagttggccatgctgagcttttttgaacagtttcgtaagatctacattggggaccaagtgcagaaatcctctaagctgtaccgccgactctcagaagttctgggcttgaatgatgagaccatggtcctaagcgtcttcataggaaaaataaatcagccctggagtgccccagaattccaagggcctgggtatgggccagtgtagctttggaaccaatcacctccaagacactacagcttctcaatgacctgtccattgggtacagtagcgtaaggaagctagtgaagcttagtgcggtacagttcatgctgaacaatcacacggtgagtgattttagctttttttcctggccctcctaccacccacacatacactttctcgacacataaaggagatatgtaaactgaggtcccgggtattgctacagcaaagacggtggtcctgattcccacgatactgccagattatacttacgtcatcagagtggctctttgagatccagatgatgtgagttatggtgaagtcacctactgctactcatactgcagataaattagtagtagtgacaacggtagcctgccttc

SEQ ID NO: 439037 - DNA, 446 bp, Homo sapiens
atggtgttaaacgaatactggaaaacccacaggtaagtttatctgagaatttacatatgtataggattagtgtatggccagctgttatgagtcagaaggaaatccatcccaaggcccagtaaacaattcagtctgttcttcagggaagactgaagtgaatctctatttgtaggccaattctgagattatttgcccaaaagaggagcttatatcctcccgcttcagaaatgtaggagttacaggaaagaatcacttcgctataaggaaataaggaagaagctagtcatttttccccccaagaagttaagactctaacatctccgggcacagaggctcacgcctgtaatcccaacagtttgggaggccaaggtgggcagatcacttgaggtcaggagctcaagaccagcctggccaacatagtgaaaccctgtctctactaaaactac

SEQ ID NO: 439038 - DNA, 183 bp, Homo sapiens
tgttgcttcagatatcctaaagaaggatattgtaggaggtggaacgtttctggtgaaagtaactgtacagtctttttaatcgttgtgtttgggttctgccctgcatttaggtattatcctgcttggtacagatcgcttcagtcagaagatccctgtttaacaatgcagagagggccaagtttc

SEQ ID NO: 439039 - DNA, 360 bp, Homo sapiens
gataagatgacccttttaaagtgctttacaatttaaaaattcttgatattcttagtaggatgaagccatattatcccacaagtgcttgcctgaatttcttttttaagggtccaattttagtagacattccattcctccttagagaagaacattcttcaaccctgcagatgacggagggctaatctgccttcccctgcttctctaaccttctgttccactccttgccccacagtatttttctgacctaagaaacagtattgtgaacagccagccaccggagaagcagcaggccatgcacctgtgttttgagaacctgatggaaggcatcgagcgaaatcttcttacgaaaaacagagacag

SEQ ID NO: 439040 - DNA, 458 bp, Homo sapiens
  misc_feature (2)..(2): n is a, c, g, or t
  misc_feature (25)..(26): n is a, c, g, or t
anttcggcacagagaatttgatganncatgtgtggaatcctcatcagattgttacagttttgtcttttcttctattttaacacatttttgccttctactacagcgaactctagttggcctagtaagagacctgagagggatcgctttcgctttcaatgccaagaccagcttcatgatgctctttgaatggatgtatcctaactcaaactaggagcacactacagcctgccttaactggagtgtgattgggtgatagggtccagagacggtgtagggggaagggagggtagtgaggcagagaagatgaagagttagccagaaggcctgcatgtgtcctggaagccaccttatgacagacataaggttgtctgagattagaacatgaatgaagtagtctcccagtttctcttttggatctcaaatataaatgcctgtggaaccatataccactgtagaac

SEQ ID NO: 439041 - DNA, 4862 bp, Homo sapiens
aggcgcagcggcgacggcgtcggcggcggcggcggcagcggctccggccgaggtgcgcgctgggggggagggggggccggagaggagcatgaatggagcaaaatggcggatcatgtgcagagcctggcccaactagagaatctgtgcaaacagctgtatgaaaccacagacacaaccactcgactccaggcagagaaagccttggttgaatttaccaacagccctgattgcctgagcaagtgccagctactcctcgaaagaggaagttcctcttactcccagttactggcagctacatgccttaccaagcttgtatcacgcacaaacaaccccctaccattggaacagcgaatagatattcggaactatgtgctcaactaccttgccactcggccgaagttggctactttcgtgacacaagcacttattcagttatatgccagaatcacaaaactgggctggtttgactgtcagaaggatgactatgtcttcagaaatgcaatcacagacgtcacaaggtttttacaggatagtgttgaatactgcatcattggtgtcacaattttatctcagctaaccaatgaaattaatcaagcagacaccacccatcctttaaccaagcacagaaaaatagcctcttcttttcgcgattcatcattatttgatatcttcacactttcctgcaatttactaaaacaggcttcaggaaagaatctaaacttgaatgatgaaagtcagcatggcttgctcatgcaactgctcaagctcactcataactgcctcaactttgacttcatcggcacttccactgatgagtcctcagacgacctgtgtacagtgcagattcccaccagctggagatcagccttcttagattcttcaaccttgcagctgttttttgacctgtatcattccatccctccttcattttcacctctggtattatcctgcttggtacagatcgcttcagtcagaagatccctgtttaacaatgcagagagggccaagtttctctctcatcttgttgatggtgttaaacgaatactggaaaacccacagagtttatcagacccaaacaattaccatgagttttgcagactactggcccgattgaagagtaactatcaactgggagaattggtaaaggtggaaaactaccctgaggtcatccgattgatagccaacttcacagtgaccagcctacagcactgggaatttgctccaaatagtgtgcactatcttctgagcctgtggcagcggctggcagcctctgtgccgtatgtcaaagccacagagccccacatgctggaaacttacactcctgaggtcaccaaagcctacatcacatcccggttggaatctgtgcacatcatactgagagatggcctggaagatcccctggaggatacggggctggtccagcagcagttggaccagctgtccaccattgggcgttgtgaatatgagaagacgtgtgcactcctcgtgcagttgtttgaccagtcggcccagtcgtaccaggagctgctacagagcgccagcgcaagcccaatggacattgcagtgcaggagggaaggctgacatggctggtttacattattggagcagtgatcggtggccgggtttcttttgccagcactgatgagcaagacgccatggatggtgagcttgtctgtcgggtgctccagctgatgaacctaacagattctcgtttggcccaggcgggtaatgagaagctagagttggccatgctgagcttttttgaacagtttcgtaagatctacattggggaccaagtgcagaaatcctctaagctgtaccgccgactctcagaagttctgggcttgaatgatgagaccatggtcctaagcgtcttcataggaaaaatcatcaccaacttgaagtactggggccgttgtgaaccaatcacctccaagacactacagcttctcaatgacctgtccattgggtacagtagcgtaaggaagctagtgaagcttagtgcggtacagttcatgctgaacaatcacacgagcgagcacttttcatttttgggtattaacaatcagtccaacctgacagacatgcggtgtcggactaccttctacacagcacttgggcgtctcctcatggtggatttaggagaggatgaagatcagtatgagcagttcatgctgccactcacagcagcatttgaggctgtggcccagatgtttagcaccaatagtttcaacgagcaggaggcaaagcgaactctagttggcctagtaagagacctgagagggatcgctttcgctttcaatgccaagaccagcttcatgatgctctttgaatggatatatccatcctatatgccaattctccaacgggcaattgagctctggtaccatgatccagcctgtactacacctgtactcaagttgatggctgaattggttcataataggtcccagcgactccagtttgatgtctcttcccccaatggcatcttactcttccgagaaaccagcaagatgataacaatgtatggcaatcgcatcctgacactaggagaggtcccaaaggatcaggtctatgctctgaagctcaagggcatctccatctgcttctccatgctgaaggctgctctcagtgggagttacgtcaatttcggagtctttcgtctctatggagacgatgccctggacaatgctctgcagaccttcatcaagctgctcctctctattcctcacagtgatctcttggattaccccaagctcagccagtcttattattcactactggaagtcctgacccaggaccatatgaactttattgcaagcctggaacctcacgtcatcatgtatattctctcttccatttctgaaggacttactgcacttgacaccatggtatgcacaggctgctgctcctgcctggaccacattgtgacatacctcttcaagcagctgtcacgtagcaccaagaagaggaccacacccctgaaccaggagagcgaccgctttctgcacatcatgcagcagcatccagagatgatccagcagatgctgtccacggtgctgaacatcatcatctttgaagactgtaggaaccagtggtctatgtcccgaccactacttggcttgatattgcttaatgaaaagtatttttctgacctaagaaacagtattgtgaacagccagccaccggagaagcagcaggccatgcacctgtgttttgagaacctgatggaaggcatcgagcgaaatcttcttacgaaaaacagagacaggttcacccagaacctgtcagcattccgtcgagaagtcaacgactcaatgaagaattccacttatggcgtgaatagcaatgacatgatgagctgacacctccttggactctacctgtacagagcagcgtccctttggtttggcccagaggggcgaacaattgcaagggagagggcctggctgatcctggctcttttctccaggggtgtggggaaaatggcaaaggtcaactagctgcttccccagggaataggggtgtgagtacactcactagggggcagggcgctgctggttcctgggggactgggtgggaagggtggtgggaggagataagagatacaaactgagactccagcctctcctcctggggccacccaagtggggagaacccctagtgtcctgccacaacctgccttgtataaacatgtacattttttcataacattttgaacaaggtttatattgactcaagtttaaaaacaaaaagtgtgactgaaaaatttttacagagtctagtgcaccaatgctgatgtgaggggttgtgtatgcgagtgaagaaaatgtgtattctggtggcctgaagctttactggacaaggatgtgtgagagtgcagagatatatttagtgacacagtagagaggcaaaaaaaaagctaaaattccaaatgtatattttttcgtattgccctgtcctcacccagaaatgatcaattcctgttactgtattaacccttgttattaggaactctaagccatgccagaacaccgtccctccccttggaccgtgtagattctgccctgggtccctagccccttgcagtgataaataactccagctaaaagtgtttggtgttcttatctccaccctctttcctactttgcttaccctcatcctcagacagatgcctcttgcttttaaaagttggatttaacgacgtgttgtagggttcttggtctgtgtgaaggcagagaccagagagaaggaagtgagcccactgctctcctgggagcaatgtgggtgagtccaccagaggccctgctgtgtgtggccaataaattttagtcttccccagccctcgaggcagtgtgtgtggatgtatgcgtgtggatatttatatatgtaccctgcactcatgaatgtatgaactggaggaagttactacagtggaagggttcttaataacaaggtctacctagcatgaagtatttaacattctcccatcccttaaaaaatatacatttttataaaatgaaaaccataataaatgttttgaatattaaaaaaaataataacctacagaggaaaattaatggagacagctatttgccttgtactttttccacaattgttgctgctagttgtacacatctctagttcagctcttgcccacgggacactcatcaattaggttttatttttatttctttcctctacccccagaaacaagcctgttaattttttttccttctcctctggcgactgtgtgatgaatcctttcttgcgtgatcaggttgcggatagacttgtaagggtgtttgctgcatacagtgtaagcattgtgaccgccaataaacttcaatggtttctactg

SEQ ID NO: 439042 - DNA, 2969 bp, Homo sapiens
  misc_feature (62)..(62): n is a, c, g, or t
  misc_feature (74)..(74): n is a, c, g, or t
  misc_feature (76)..(76): n is a, c, g, or t
tagaggatcctgaaaagtgcactcttctatatctacacctccaagacactacagcttctcantgacctctccantnggtacagtagcgtaaggaagctagtgaagcttagtgcggtacagttcatgctgaacaatcacacgagcgagcacttttcatttttgggtattaacaatcagtccaacctgacagacatgcggtgtcggactaccttctacacagcacttgggcgtctcctcatggtggatttaggagaggatgaagatcagtatgagcagttcatgctgccactcacagcagcatttgaggctgtggcccagatgtttagcaccaatagtttcaacgagcaggaggcaaagcgaactctagttggcctagtaagagacctgagagggatcgctttcgctttcaatgccaagaccagcttcatgatgctctttgaatggatatatccatcctatatgccaattctccaacgggcaattgagctctggtaccatgatccagcctgtactacacctgtactcaagttgatggctgaattggttcataataggtcccagcgactccagtttgatgtctcttcccccaatggcatcttactcttccgagaaaccagcaagatgataacaatgtatggcaatcgcatcctgacactaggagaggtcccaaaggatcaggtctatgctctgaagctcaagggcatctccatctgcttctccatgctgaaggctgctctcagtgggagttacgtcaatttcggagtctttcgtctctatggagacgatgccctggacaatgctctgcagaccttcatcaagctgctcctctctattcctcacagtgatctcttggattaccccaagctcagccagtcttattattcactactggaagtcctgacccaggaccatatgaactttattgcaagcctggaacctcacgtcatcatgtatattctctcttccatttctgaaggacttactgcacttgacaccatggtatgcacaggctgctgctcctgcctggaccacattgtgacatacctcttcaagcagctgtcacgtagcaccaagaagaggaccacacccctgaaccaggagagcgaccgctttctgcacatcatgcagcagcatccagagatgatccagcagatgctgtccacggtgctgaacatcatcatctttgaagactgtaggaaccagtggtctatgtcccgaccactacttggcttgatattgcttaatgaaaagtatttttctgacctaagaaacagtattgtgaacagccagccaccggagaagcagcaggccatgcacctgtgttttgagaacctgatggaaggcatcgagcgaaatcttcttacgaaaaacagagacaggttcacccagaacctgtcagcattccgtcgagaagtcaacgactcaatgaagaattccacttatggcgtgaatagcaatgacatgatgagctgacacctccttggactctacctgtacagagcagcgtccctttggtttggcccagaggggcgaacaattgcaagggagagggcctggctgatcctggctcttttctccaggggtgtggggaaaatggcaaaggtcaactagctgcttccccagggaataggggtgtgagtacactcactagggggcagggcgctgctggttcctgggggactgggtgggaagggtggtgggaggagataagagatacaaactgagactccagcctctcctcctggggccacccaagtggggagaacccctagtgtcctgccacaacctgccttgtataaacatgtacattttttcataacattttgaacaaggtttatattgactcaagtttaaaaacaaaaagtgtgactgaaaaatttttacagagtctagtgcaccaatgctgatgtgaggggttgtgtatgcgagtgaagaaaatgtgtattctggtggcctgaagctttactggacaaggatgtgtgagagtgcagagatatatttagtgacacagtagagaggcaaaaaaaaagctaaaattccaaatgtatattttttcgtattgccctgtcctcacccagaaatgatcaattcctgttactgtattaacccttgttattaggaactctaagccatgccagaacaccgtccctccccttggaccgtgtagattctgccctgggtccctagccccttgcagtgataaataactccagctaaaagtgtttggtgttcttatctccaccctctttcctactttgcttaccctcatcctcagacagatgcctcttgcttttaaaagttggatttaacgacgtgttgtagggttcttggtctgtgtgaaggcagagaccagagagaaggaagtgagcccactgctctcctgggagcaatgtgggtgagtccaccagaggccctgctgtgtgtggccaataaattttagtcttccccagccctcgaggcagtgtgtgtggatgtatgcgtgtggatatttatatatgtaccctgcactcatgaatgtatgaactggaggaagttactacagtggaagggttcttaataacaaggtctacctagcatgaagtatttaacattctcccatcccttaaaaaatatacatttttataaaatgaaaaccataataaatgttttgaatattaaaaaaaataataacctacagaggaaaattaatggagacagctatttgccttgtactttttccacaattgttgctgctagttgtacacatctctagttcagctcttgcccacgggacactcatcaattaggttttatttttatttctttcctctacccccagaaacaagcctgttaattttttttccttctcctctggcgactgtgtgatgaatcctttcttgcgtgatcaggttgcggatagacttgtaagggtgtttgctgcatacagtgtaagcattgtgaccgccaataaacttcaatggtttctactg

SEQ ID NO: 439043 - DNA, 4737 bp, Homo sapiens
aggcgcagcggcgacggcgtcggcggcggcggcggcagcggctccggccgaggtgcgcgctgggggggagggggggccggagaggagcatgaatggagcaaaatggcggatcatgtgcagagcctggcccaactagagaatctgtgcaaacagctgtatgaaaccacagacacaaccactcgactccaggcagagaaagccttggttgaatttaccaacagccctgattgcctgagcaagtgccagctactcctcgaaagaggaagttcctcttactcccagttactggcagctacatgccttaccaagcttgtatcacgcacaaacaaccccctaccattggaacagcgaatagatattcggaactatgtgctcaactaccttgccactcggccgaagttggctactttcgtgacacaagcacttattcagttatatgccagaatcacaaaactgggctggtttgactgtcagaaggatgactatgtcttcagaaatgcaatcacagacgtcacaaggtttttacaggatagtgttgaatactgcatcattggtgtcacaattttatctcagctaaccaatgaaattaatcaagcagacaccacccatcctttaaccaagcacagaaaaatagcctcttcttttcgcgattcatcattatttgatatcttcacactttcctgcaatttactaaaacaggcttcaggaaagaatctaaacttgaatgatgaaagtcagcatggcttgctcatgcaactgctcaagctcactcataactgcctcaactttgacttcatcggcacttccactgatgagtcctcagacgacctgtgtacagtgcagattcccaccagctggagatcagccttcttagattcttcaaccttgcagctgttttttgacctgtatcattccatccctccttcattttcacctctggtattatcctgcttggtacagatcgcttcagtcagaagatccctgtttaacaatgcagagagggccaagtttctctctcatcttgttgatggtgttaaacgaatactggaaaacccacagagtttatcagacccaaacaattaccatgagttttgcagactactggcccgattgaagagtaactatcaactgggagaattggtaaaggtggaaaactaccctgaggtcatccgattgatagccaacttcacagtgaccagcctacagcactgggaatttgctccaaatagtgtgcactatcttctgagcctgtggcagcggctggcagcctctgtgccgtatgtcaaagccacagagccccacatgctggaaacttacactcctgaggtcaccaaagcctacatcacatcccggttggaatctgtgcacatcatactgagagatggcctggaagatcccctggaggatacggggctggtccagcagcagttggaccagctgtccaccattgggcgttgtgaatatgagaagacgtgtgcactcctcgtgcagttgtttgaccagtcggcccagtcgtaccaggagctgctacagagcgccagcgcaagcccaatggacattgcagtgcaggagggaaggctgacatggctggtttacattattggagcagtgatcggtggccgggtttcttttgccagcactgatgagcaagacgccatggatggtgagcttgtctgtcgggtgctccagctgatgaacctaacagattctcgtttggcccaggcgggtaatgagaagctagagttggccatgctgagcttttttgaacagtttcgtaagatctacattggggaccaagtgcagaaatcctctaagctgtaccgccgactctcagaagttctgggcttgaatgatgagaccatggtcctaagcgtcttcataggaaaaatcatcaccaacttgaagtactggggccgttgtgaaccaatcacctccaagacactacagcttctcaatgacctgtccattgggtacagtagcgtaaggaagctagtgaagcttagtgcggtacagttcatgctgaacaatcacacgagcgagcacttttcatttttgggtattaacaatcagtccaacctgacagacatgcggtgtcggactaccttctacacagcacttgggcgtctcctcatggtggatttaggagaggatgaagatcagtatgagcagttcatgctgccactcacagcagcatttgaggctgtggcccagatgtttagcaccaatagtttcaacgagcaggaggcaaagcgaactctagttggcctagtaagagacctgagagggatcgctttcgctttcaatgccaagaccagcttcatgatgctctttgaatggatatatccatcctatatgccaattctccaacgggcaattgagctctggtaccatgatccagcctgtactacacctgtactcaagttgatggctgaattggttcataataggtcccagcgactccagtttgatgtctcttcccccaatggcatcttactcttccgagaaaccagcaagatgataacaatgtatggcaatcgcatcctgacactaggagaggtcccaaaggatcaggtctatgctctgaagctcaagggcatctccatctgcttctccatgctgaaggctgctctcagtgggagttacgtcaatttcggagtctttcgtctctatggagacgatgccctggacaatgctctgcagaccttcatcaagctgctcctctctattcctcacagtgatctcttggattaccccaagctcagccagtcttattattcactactggaagtcctgacccaggaccatatgaactttattgcaagcctggaacctcacgtcatcatgtatattctctcttccatttctgaaggacttactgcacttgacaccatggtatgcacaggctgctgctcctgcctggaccacattgtgacatacctcttcaagcagctgtcacgtagcaccaagaagaggaccacacccctgaaccaggagagcgaccgctttctgcacatcatgcagcagcatccagagatgatccagcagatgctgtccacggtgctgaacatcatcatctttgaagactgtaggaaccagtggtctatgtcccgaccactacttggcttgatattgcttaatgaaaagtatttttctgacctaagaaacagtattgtgaacagccagccaccggagaagcagcaggccatgcacctgtgttttgagaacctgatggaaggcatcgagcgaaatcttcttacgaaaaacagagacaggttcacccagaacctgtcagcattccgtcgagaagtcaacgactcaatgaagaattccacttatggcgtgaatagcaatgacatgatgagctgacacctccttggactctacctgtacagagcagcgtccctttggtttggcccagaggggcgaacaattgcaagggagagggcctggctgatcctggctcttttctccaggggtgtggggaaaatggcaaaggtcaactagctgcttccccagggaataggggtgtgagtacactcactagggggcagggcgctgctggttcctgggggactgggtgggaagggtggtgggaggagataagagatacaaactgagactccagcctctcctcctggggccacccaagtggggagaacccctagtgtcctgccacaacctgccttgtataaacatgtacattttttcataacattttgaacaaggtttatattgactcaagtttaaaaacaaaaagtgtgactgaaaaatttttacagagtctagtgcaccaatgctgatgtgaggggttgtgtatgcgagtgaagaaaatgtgtattctggtggcctgaagctttactggacaaggatgtgtgagagtgcagagatatatttagtgacacagtagagaggcaaaaaaaaagctaaaattccaaatgtatattttttcgtattgccctgtcctcacccagaaatgatcaattcctgttactgtattaacccttgttattaggaactctaagccatgccagaacaccgtccctccccttggaccgtgtagattctgccctgggtccctagccccttgcagtgataaataactccagctaaaagtgtttggtgttcttatctccaccctctttcctactttgcttaccctcatcctcagacagatgcctcttgcttttaaaagttggatttaacgacgtgttgtagggttcttggtctgtgtgaaggcagagaccagagagaaggaagtgagcccactgctctcctgggagcaatgtgggtgagtccaccagaggccctgctgtgtgtggccaataaattttagtcttccccagccctcgaggcagtgtgtgtggatgtatgcgtgtggatatttatatatgtaccctgcactcatgaatgtatgaactggaggaagttactacagtggaagggttcttaataacaaggtctacctagcatgaagtatttaacattctcccatcccttaaaaaatatacatttttataaaatgaaaaccataataaatgttttgaatattaaaaaaaataataacctacagaggaaaattaatggagacagctatttgccttgtactttttccacaattgttgctgctagttgtacacatctctagttcagctcttgcccacgggacactcatcaattaggttttatttttatttctttcctctacccccagccatatcagggagatcctctagacca

SEQ ID NO: 439044 - DNA, 4808 bp, Homo sapiens
aggcgcagcggcgacggcgtcggcggcggcggcggcagcggctccggccgaggtgcgcgctgggggggagggggggccggagaggagcatgaatggagcaaaatggcggatcatgtgcagagcctggcccaactagagaatctgtgcaaacagctgtatgaaaccacagacacaaccactcgactccaggcagagaaagccttggttgaatttaccaacagccctgattgcctgagcaagtgccagctactcctcgaaagaggaagttcctcttactcccagttactggcagctacatgccttaccaagcttgtatcacgcacaaacaaccccctaccattggaacagcgaatagatattcggaactatgtgctcaactaccttgccactcggccgaagttggctactttcgtgacacaagcacttattcagttatatgccagaatcacaaaactgggctggtttgactgtcagaaggatgactatgtcttcagaaatgcaatcacagacgtcacaaggtttttacaggatagtgttgaatactgcatcattggtgtcacaattttatctcagctaaccaatgaaattaatcaagcagacaccacccatcctttaaccaagcacagaaaaatagcctcttcttttcgcgattcatcattatttgatatcttcacactttcctgcaatttactaaaacaggcttcaggaaagaatctaaacttgaatgatgaaagtcagcatggcttgctcatgcaactgctcaagctcactcataactgcctcaactttgacttcatcggcacttccactgatgagtcctcagacgacctgtgtacagtgcagattcccaccagctggagatcagccttcttagattcttcaaccttgcagctgttttttgacctgtatcattccatccctccttcattttcacctctggtattatcctgcttggtacagatcgcttcagtcagaagatccctgtttaacaatgcagagagggccaagtttctctctcatcttgttgatggtgttaaacgaatactggaaaacccacagagtttatcagacccaaacaattaccatgagttttgcagactactggcccgattgaagagtaactatcaactgggagaattggtaaaggtggaaaactaccctgaggtcatccgattgatagccaacttcacagtgaccagcctacagcactgggaatttgctccaaatagtgtgcactatcttctgagcctgtggcagcggctggcagcctctgtgccgtatgtcaaagccacagagccccacatgctggaaacttacactcctgaggtcaccaaagcctacatcacatcccggttggaatctgtgcacatcatactgagagatggcctggaagatcccctggaggatacggggctggtccagcagcagttggaccagctgtccaccattgggcgttgtgaatatgagaagacgtgtgcactcctcgtgcagttgtttgaccagtcggcccagtcgtaccaggagctgctacagagcgccagcgcaagcccaatggacattgcagtgcaggagggaaggctgacatggctggtttacattattggagcagtgatcggtggccgggtttcttttgccagcactgatgagcaagacgccatggatggtgagcttgtctgtcgggtgctccagctgatgaacctaacagattctcgtttggcccaggcgggtaatgagaagctagagttggccatgctgagcttttttgaacagtttcgtaagatctacattggggaccaagtgcagaaatcctctaagctgtaccgccgactctcagaagttctgggcttgaatgatgagaccatggtcctaagcgtcttcataggaaaaatcatcaccaacttgaagtactggggccgttgtgaaccaatcacctccaagacactacagcttctcaatgacctgtccattgggtacagtagcgtaaggaagctagtgaagcttagtgcggtacagttcatgctgaacaatcacacgagcgagcacttttcatttttgggtattaacaatcagtccaacctgacagacatgcggtgtcggactaccttctacacagcacttgggcgtctcctcatggtggatttaggagaggatgaagatcagtatgagcagttcatgctgccactcacagcagcatttgaggctgtggcccagatgtttagcaccaatagtttcaacgagcaggaggcaaagcgaactctagttggcctagtaagagacctgagagggatcgctttcgctttcaatgccaagaccagcttcatgatgctctttgaatggatatatccatcctatatgccaattctccaacgggcaattgagctctggtaccatgatccagcctgtactacacctgtactcaagttgatggctgaattggttcataataggtcccagcgactccagtttgatgtctcttcccccaatggcatcttactcttccgagaaaccagcaagatgataacaatgtatggcaatcgcatcctgacactaggagaggtcccaaaggatcaggtctatgctctgaagctcaagggcatctccatctgcttctccatgctgaaggctgctctcagtgggagttacgtcaatttcggagtctttcgtctctatggagacgatgccctggacaatgctctgcagaccttcatcaagctgctcctctctattcctcacagtgatctcttggattaccccaagctcagccagtcttattattcactactggaagtcctgacccaggaccatatgaactttattgcaagcctggaacctcacgtcatcatgtatattctctcttccatttctgaaggacttactgcacttgacaccatggtatgcacaggctgctgctcctgcctggaccacattgtgacatacctcttcaagcagctgtcacgtagcaccaagaagaggaccacacccctgaaccaggagagcgaccgctttctgcacatcatgcagcagcatccagagatgatccagcagatgctgtccacggtgctgaacatcatcatctttgaagactgtaggaaccagtggtctatgtcccgaccactacttggcttgatattgcttaatgaaaagtatttttctgacctaagaaacagtattgtgaacagccagccaccggagaagcagcaggccatgcacctgtgttttgagaacctgatggaaggcatcgagcgaaatcttcttacgaaaaacagagacaggttcacccagaacctgtcagcattccgtcgagaagtcaacgactcaatgaagaattccacttatggcgtgaatagcaatgacatgatgagctgacacctccttggactctacctgtacagagcagcgtccctttggtttggcccagaggggcgaacaattgcaagggagagggcctggctgatcctggctcttttctccaggggtgtggggaaaatggcaaaggtcaactagctgcttccccagggaataggggtgtgagtacactcactagggggcagggcgctgctggttcctgggggactgggtgggaagggtggtgggaggagataagagatacaaactgagactccagcctctcctcctggggccacccaagtggggagaacccctagtgtcctgccacaacctgccttgtataaacatgtacattttttcataacattttgaacaaggtttatattgactcaagtttaaaaacaaaaagtgtgactgaaaaatttttacagagtctagtgcaccaatgctgatgtgaggggttgtgtatgcgagtgaagaaaatgtgtattctggtggcctgaagctttactggacaaggatgtgtgagagtgcagagatatatttagtgacacagtagagaggcaaaaaaaaagctaaaattccaaatgtatattttttcgtattgccctgtcctcacccagaaatgatcaattcctgttactgtattaacccttgttattaggaactctaagccatgccagaacaccgtccctccccttggaccgtgtagattctgccctgggtccctagccccttgcagtgataaataactccagctaaaagtgtttggtgttcttatctccaccctctttcctactttgcttaccctcatcctcagacagatgcctcttgcttttaaaagttggatttaacgacgtgttgtagggttcttggtctgtgtgaaggcagagaccagagagaaggaagtgagcccactgctctcctgggagcaatgtgggtgagtccaccagaggccctgctgtgtgtggccaataaattttagtcttccccagccctcgaggcagtgtgtgtggatgtatgcgtgtggatatttatatatgtaccctgcactcatgaatgtatgaactggaggaagttactacagtggaagggttcttaataacaaggtctacctagcatgaagtatttaacattctcccatcccttaaaaaatatacatttttataaaatgaaaaccataataaatgttttgaatattaaaaaaaataataacctacagaggaattgtacacatctctagttcagctcttgcccacgggacactcatcaattaggttttatttttatttctttcctctacccccagaaacaagcctgttaattttttttccttctcctctggcgactgtgtgatgaatcctttcttgcgtgatcaggttgcggatagacttgtaagggtgtttgctgcatacagtgtaagcattgtgaccgccaataaacttcaatggtttctactg

SEQ ID NO: 439045 - DNA, 2051 bp, Homo sapiens
cattggtaagtgaagttcaaaccaattttaagaacaagaaaggaaatgaatatcttagaagaaaaggtaaccttgaaatagaagactcagatgaagcttcacaaactatttgtctgatttaccctatacagaaaaggccttcagcctaatatactcctgtatttggaatctgtcgttttatcttgggtagcaatacattaggtcactgcctgaaattctccattccattttcagatgctgtccacggtgctgaacatcatcatctttgaagactgtaggaaccagtggtctatgtcccgaccactacttggcttgatattgcttaatgaaaagtatttttctgacctaagaaacagtattgtgaacagccagccaccggagaagcagcaggccatgcacctgtgttttgagaacctgatggaaggcatcgagcgaaatcttcttacgaaaaacagagacaggttcacccagaacctgtcagcattccgtcgagaagtcaacgactcaatgaagaattccacttatggcgtgaatagcaatgacatgatgagctgacacctccttggactctacctgtacagagcagcgtccctttggtttggcccagaggggcgaacaattgcaagggagagggcctggctgatcctggctcttttctccaggggtgtggggaaaatggcaaaggtcaactagctgcttccccagggaataggggtgtgagtacactcactagggggcagggcgctgctggttcctgggggactgggtgggaagggtggtgggaggagataagagatacaaactgagactccagcctctcctcctggggccacccaagtggggagaacccctagtgtcctgccacaacctgccttgtataaacatgtacattttttcataacattttgaacaaggtttatattgactcaagtttaaaaacaaaaagtgtgactgaaaaatttttacagagtctagtgcaccaatgctgatgtgaggggttgtgtatgcgagtgaagaaaatgtgtattctggtggcctgaagctttactggacaaggatgtgtgagagtgcagagatatatttagtgacacagtagagaggcaaaaaaaaagctaaaattccaaatgtatattttttcgtattgccctgtcctcacccagaaatgatcaattcctgttactgtattaacccttgttattaggaactctaagccatgccagaacaccgtccctccccttggaccgtgtagattctgccctgggtccctagccccttgcagtgataaataactccagctaaaagtgtttggtgttcttatctccaccctctttcctactttgcttaccctcatcctcagacagatgcctcttgcttttaaaagttggatttaacgacgtgttgtagggttcttggtctgtgtgaaggcagagaccagagagaaggaagtgagcccactgctctcctgggagcaatgtgggtgagtccaccagaggccctgctgtgtgtggccaataaattttagtcttccccagccctcgaggcagtgtgtgtggatgtatgcgtgtggatatttatatatgtaccctgcactcatgaatgtatgaactggaggaagttactacagtggaagggttcttaataacaaggtctacctagcatgaagtatttaacattctcccatcccttaaaaaatatacatttttataaaatgaaaaccataataaatgttttgaatattaaaaaaaataataacctacagaggaaaattaatggagacagctatttgccttgtactttttccacaattgttgctgctagttgtacacatctctagttcagctcttgcccacgggacactcatcaattaggttttatttttatttctttcctctacccccagaaacaagcctgttaattttttttccttctcctctggcgactgtgtgatgaatcctttcttgcgtgatcaggttgcggatagacttgtaagggtgtttgctgcatacagtgtaagcattgtgaccgccaataaacttcaatggtttctactg

SEQ ID NO: 439046 - DNA, 2295 bp, Homo sapiens
aggcgcagcggcgacggcgtcggcggcggcggcggcagcggctccggccgaggtgcgcgctgggggggagggggggccggagaggagcatgaatggagcaaaatggcggatcatgtgcagagcctggcccaactagagaatctgtgcaaacagctgtatgaaaccacagacacaaccactcgactccaggcagagaaagccttggttgaatttaccaacagccctgattgcctgagcaagtgccagctactcctcgaaagaggaagttcctcttactcccagttactggcagctacatgccttaccaagcttgtatcacgcacaaacaaccccctaccattggaacagcgaatagatattcggaactatgtgctcaactaccttgccactcggccgaagttggctactttcgtgacacaagcacttattcagttatatgccagaatcacaaaactgggctggtttgactgtcagaaggatgactatgtcttcagaaatgcaatcacagacgtcacaaggtttttacaggatagtgttgaatactgcatcattggtgtcacaattttatctcagctaaccaatgaaattaatcaagcagacaccacccatcctttaaccaagcacagaaaaatagcctcttcttttcgcgattcatcattatttgatatcttcacactttcctgcaatttactaaaacaggcttcaggaaagaatctaaacttgaatgatgaaagtcagcatggcttgctcatgcaactgctcaagctcactcataactgcctcaactttgacttcatcggcacttccactgatgagtcctcagacgacctgtgtacagtgcagattcccaccagctggagatcagccttcttagattcttcaaccttgcagctgttttttgacctgtatcattccatccctccttcattttcacctctggtattatcctgcttggtacagatcgcttcagtcagaagatccctgtttaacaatgcagagagggccaagtttctctctcatcttgttgatggtgttaaacgaatactggaaaacccacagagtttatcagacccaaacaattaccatgagttttgcagactactggcccgattgaagagtaactatcaactgggagaattggtaaaggtggaaaactaccctgaggtcatccgattgatagccaacttcacagtgaccagcctacagcactgggaatttgctccaaatagtgtgcactatcttctgagcctgtggcagcggctggcagcctctgtgccgtatgtcaaagccacagagccccacatgctggaaacttacactcctgaggtcaccaaagcctacatcacatcccggttggaatctgtgcacatcatactgagagatggcctggaagatcccctggaggatacggggctggtccagcagcagttggaccagctgtccaccattgggcgttgtgaatatgagaagacgtgtgcactcctcgtgcagttgtttgaccagtcggcccagtcgtaccaggagctgctacagagcgccagcgcaagcccaatggacattgcagtgcaggagggaaggctgacatggctggtttacattattggagcagtgatcggtggccgggtttcttttgccagcactgatgagcaagacgccatggatggtgagcttgtctgtcgggtgctccagctgatgaacctaacagattctcgtttggcccaggcgggtaatgagaagctagagttggccatgctgagcttttttgaacagtttcgtaagatctacattggggaccaagtgcagaaatcctctaagctgtaccgccgactctcagaagttctgggcttgaatgatgagaccatggtcctaagcgtcttcataggaaaaatcatcaccaacttgaagtactggggccgttgtgaaccaatcacctccaagacactacagcttctcaatgacctgtccattgggtacagtagcgtaaggaagctagtgaagcttagtgcggtacagttcatgctgaacaatcacacggtgagtgattttagctttttttcctggccctcctaccacccacacatacactttctcgacacataaaggagatatgtaaactgaggtcccgggtattgctacagcaaagacggtggtcctgattcccacgatactgccagattatacttacgtcatcagagtggctctttgagatccagatgatgtgagttatggtgaagtcacctactgctactcatactgcagataaattagtagtagtgacaacggtagcctgccttc

SEQ ID NO: 439047 - DNA, 1198 bp, Homo sapiens
aggcgcagcggcgacggcgtcggcggcggcggcggcagcggctccggccgaggtgcgcgctgggggggagggggggccggagaggagcatgaatggagcaaaatggcggatcatgtgcagagcctggcccaactagagaatctgtgcaaacagctgtatgaaaccacagacacaaccactcgactccaggcagagaaagccttggttgaatttaccaacagccctgattgcctgagcaagtgccagctactcctcgaaagaggaagttcctcttactcccagttactggcagctacatgccttaccaagcttgtatcacgcacaaacaaccccctaccattggaacagcgaatagatattcggaactatgtgctcaactaccttgccactcggccgaagttggctactttcgtgacacaagcacttattcagttatatgccagaatcacaaaactgggctggtttgactgtcagaaggatgactatgtcttcagaaatgcaatcacagacgtcacaaggtttttacaggatagtgttgaatactgcatcattggtgtcacaattttatctcagctaaccaatgaaattaatcaagtaagtgctacagccttcctcattgaagcagacaccacccatcctttaaccaagcacagaaaaatagcctcttcttttcgcgattcatcattatttgatatcttcacactttcctgcaatttactaaaacaggtgagcatgtagtttgggtcatatttcccagtttcttttgaaagaatgagaatggatgggaacttgttaaatgtcagcttttaactgatcccacgagagtttatgcatctgtttaatcatcatctcttatataagactcatagaggcgttgaagaaactggtcagagtgaccactgaggttggagaaatgattgtcacttccctgtttaagctcaattcccctaggtaaagagcagtaagtgagcatttatcccatactcctatcttaaagggatctagtttacctaactcagagtttgaagttgtgttgttattgtttttataaccacataaaatctttctatatggtgcgaaagcatgttagttttatggtgtttggattcttagtgctctgaaagtaggttcagactatgttgttagcatacagaaaccaggctggttcccctgtcccccgctgagttaaaagcagcac

SEQ ID NO: 439048 - DNA, 2226 bp, Homo sapiens
ctctgacttcttttcttggctaagccgcgtttgtactgtgtcttaccatgcctgaaccggcaaaatccgctccggcccctaaaaagggctccaagaaagccgtcaccaaagcccagaagaaagacggcaagaagcgcaagcgcagccgcaaagagagctactccatctacgtgtacaaggtgctgaagcaggtccaccccgacaccggcatctcgtccaaggccatgggcatcatgaactccttcgtcaacgacatcttcgagcgcatcgcgggagaggcttcccgcctggcgcactacaacaagcgctccaccatcacatcccgcgagatccagacggccgtgcgcctgctgctgcccggcgagctggccaagcacgccgtgtccgagggcaccaaggcggtcaccaagtacaccagctccaagtgagtccctgccgggacctggcgctcgctcgctcgagtcgccggctgcttgactccaaaggctcttttcagagccacccacctaatcactagaaaagagcttgttcacttattcccttagtttcttttcataaagtaagttattttagtgtgaaggtcatgggaaatggcatacgtagctttttaactatttggaactcgaggtccccagtgcgtcattggatttgcttttgaatctagagcgtgtctttactcattgtgctgcttagccttcccaggagtcggttctcaattaggctgttgggaatccgcctctttacccgcccccactcccgccccacacgcgccctggtggctccttgggtctgtttcattctaaaacgaagtggctgagttcggctgtcatttaagagaactccaggacacaattcagcccgggttccgcaaacactgcgtgacagctctgtatgactgacgcttggcagcagcttttgtgtccggtcaccagttctgccgtgcgatggggcctcctgtggataccagccgttctgtgtattttggacgaaggccgcgcagccgggtcccagccttgtcctgattgggcgacaagaatattcaaaattctgcgcctttttctaatttgtagatttcagtttccgtcgttcactttgagactttgaaattcctatttctcattttgttgataatttctgcatttaatggtctgtgctttaaatggtaacgctacggccccaggtcactgcgaggcacttaccatgtagatacgggctcaaaagtcacctctcagagacctacgtcatccactcaggaattcgcgcctctcatacttgcctgtctcattttatcttccttctagcagctgtctgaaattggttcgtctgttttcttgtttatggtattctcaagcccttgacagaccggctagtgtggttttcccgtgcatcttcagcctggcacattatggacacttaaatactacgtattgatctaatattgttgggttaatttttccatcccacccttttcttaatcgcttccgtggatggatgaagggtgctgttcatttccattagatgtatgtgaaggcacagtgaaaatggaaatgttcttggagctacttcctcaaaatgtatccttagtcacctcagtgcaacagctgggagggggccgtgttaagattttttttgctacaaagaggaggtggcaatggtagatccacccttatgcttctcagtttagcataacctcttatggattttcatcaaattcagcgtgttggtcactggaaagagccttttccttctccttttcttactctcccctcatggtgttcccctcttaaaggagaggagcttttaatttacacttaccacctcatttgcttttctggaggccatgcaatataggcgggactacagagttaatctcctttttacaaatgaggccaagagaagcctcattggttcacagtcatgcagctcatactgtccacccttgtattctcagatgcaggacaattgcattttagttttattttgtggaggtgcagaatatttactctttctgtccaacccttgattctgccgaggaagacactgatggtttgatgagtgattcagctgtttttggctaagggcttttggagctgatggcaggggtttgatgaatccaaatgagctctagacattatcacagactgaatagatcttaactgtctcctacatgtgtgttttcaaatgtgtatagatgctattgttattaataaagttaccaattaattt

SEQ ID NO: 439049 - DNA, 815 bp, Homo sapiens
  misc_feature (769)..(769): n is a, c, g, or t
  misc_feature (815)..(815): n is a, c, g, or t
ctctgacttcttttcttggctaagccgcgtttgtactgtgtcttaccatgcctgaaccggcaaaatccgctccggcccctaaaaagggctccaagaaagccgtcaccaaagcccagaagaaagacggcaagaagcgcaagcgcagccgcaaagagagctgtctccagagaagattctcaaagaccaggtgcccacttaactgtgaaaaagatatttgttggtggcattaaagaagacactgaagaacatcacctaagagattattttgaacagtatggaaaaattgaagtgattgaaatcatgattgaccgaggcagtggcaagaaaaggggctttgcctttgtaacctttgacgaccatgactccgtggataagattgtcattcagaaataccatactgtgaatggccacaactgtgaagttagaaaagccctgtcaaagcaagagatggctagtgcttcatccagccaaagaggtcgaagtggttctggaaactttggtggtggtcgtggaggtggtttcggtgggaatgacaacttcggtcgtggaggaaacttcagtggtcgtggtggctttggtggcagccgtggtggtggtggatatggtggcagtggggatggctataatggatttggtaatgatggaagcaattttggaggtggtggaagctacaatgattttgggaattacaaccatcagtcttcaaattttggacccatgaagggaggaaattttggaggcagaagctctggcccctatggcggtggangccaatctttgcaaaaccacgaaaccaagtggcttttgcggttccn

SEQ ID NO: 439050 - DNA, 2172 bp, Homo sapiens
ctctgacttcttttcttggctaagccgcgtttgtactgtgtcttaccatgcctgaaccggcaaaatccgctccggcccctaaaaagggctccaagaaagccgtcaccaaagcccagaagaaagacggcaagaagcgcaagcgcagccgcaaagagagctactccatctacgtgtacaaggtgctgaagcaggtccaccccgacaccggcatctcgtccaaggccatgggcatcatgaactccttcgtcaacgacatcttcgagcgcatcgcgggagaggcttcccgcctggcgcactacaacaagcgctccaccatcacatcccgcgagatccagacggccgtgcgcctgctgctgcccggcgagctggccaagcacgccgtgtccgagggcaccaaggcggtcaccaagtacaccagctccaagtgagtccctgccgggacctggcgctcgctcgctcgagtcgccggctgcttgactccaaaggctcttttcagagccacccacctaatcactagaaaagagcttgttcacttattcccttagtttcttttcataaagtaagttattttagtgtgaaggtcatgggaaatggcatacgtagctttttaactatttggaactcgaggtccccagtgcgtcattggatttgcttttgaatctagagcgtgtctttactcattgtgctgcttagccttcccaggagtcggttctcaattaggctgttgggaatccgcctctttacccgcccccactcccgccccacacgcgccctggtggctccttgggtctgtttcattctaaaacgaagtggctgagttcggctgtcatttaagagaactccaggacacaattcagcccgggttccgcaaacactgcgtgacagctctgtatgactgacgcttggcagcagcttttgtgtccggtcaccagttctgccgtgcgatggggcctcctgtggataccagccgttctgtgtattttggacgaaggccgcgcagccgggtcccagccttgtcctgattgggcgacaagaatattcaaaattctgcgcctttttctaatttgtagatttcagtttccgtcgttcactttgagactttgaaattcctatttctcattttgttgataatttctgcatttaatggtctgtgctttaaatggtaacgctacggccccaggtcactgcgaggcacttaccatgtagatacgggctcaattgcctgtctcattttatcttccttctagcagctgtctgaaattggttcgtctgttttcttgtttatggtattctcaagcccttgacagaccggctagtgtggttttcccgtgcatcttcagcctggcacattatggacacttaaatactacgtattgatctaatattgttgggttaatttttccatcccacccttttcttaatcgcttccgtggatggatgaagggtgctgttcatttccattagatgtatgtgaaggcacagtgaaaatggaaatgttcttggagctacttcctcaaaatgtatccttagtcacctcagtgcaacagctgggagggggccgtgttaagattttttttgctacaaagaggaggtggcaatggtagatccacccttatgcttctcagtttagcataacctcttatggattttcatcaaattcagcgtgttggtcactggaaagagccttttccttctccttttcttactctcccctcatggtgttcccctcttaaaggagaggagcttttaatttacacttaccacctcatttgcttttctggaggccatgcaatataggcgggactacagagttaatctcctttttacaaatgaggccaagagaagcctcattggttcacagtcatgcagctcatactgtccacccttgtattctcagatgcaggacaattgcattttagttttattttgtggaggtgcagaatatttactctttctgtccaacccttgattctgccgaggaagacactgatggtttgatgagtgattcagctgtttttggctaagggcttttggagctgatggcaggggtttgatgaatccaaatgagctctagacattatcacagactgaatagatcttaactgtctcctacatgtgtgttttcaaatgtgtatagatgctattgttattaataaagttaccaattaattt

SEQ ID NO: 439051 - DNA, 1933 bp, Homo sapiens
aacggatattcatagccgtccctgtttgttatttcgatcggggcgggcttcgcttagttacgtgggcgcgggctgtacaatcacgccgtgtccgagggcaccaaggcggtcaccaagtacaccagctccaagtgagtccctgccgggacctggcgctcgctcgctcgagtcgccggctgcttgactccaaaggctcttttcagagccacccacctaatcactagaaaagagcttgttcacttattcccttagtttcttttcataaagtaagttattttagtgtgaaggtcatgggaaatggcatacgtagctttttaactatttggaactcgaggtccccagtgcgtcattggatttgcttttgaatctagagcgtgtctttactcattgtgctgcttagccttcccaggagtcggttctcaattaggctgttgggaatccgcctctttacccgcccccactcccgccccacacgcgccctggtggctccttgggtctgtttcattctaaaacgaagtggctgagttcggctgtcatttaagagaactccaggacacaattcagcccgggttccgcaaacactgcgtgacagctctgtatgactgacgcttggcagcagcttttgtgtccggtcaccagttctgccgtgcgatggggcctcctgtggataccagccgttctgtgtattttggacgaaggccgcgcagccgggtcccagccttgtcctgattgggcgacaagaatattcaaaattctgcgcctttttctaatttgtagatttcagtttccgtcgttcactttgagactttgaaattcctatttctcattttgttgataatttctgcatttaatggtctgtgctttaaatggtaacgctacggccccaggtcactgcgaggcacttaccatgtagatacgggctcaaaagtcacctctcagagacctacgtcatccactcaggaattcgcgcctctcatacttgcctgtctcattttatcttccttctagcagctgtctgaaattggttcgtctgttttcttgtttatggtattctcaagcccttgacagaccggctagtgtggttttcccgtgcatcttcagcctggcacattatggacacttaaatactacgtattgatctaatattgttgggttaatttttccatcccacccttttcttaatcgcttccgtggatggatgaagggtgctgttcatttccattagatgtatgtgaaggcacagtgaaaatggaaatgttcttggagctacttcctcaaaatgtatccttagtcacctcagtgcaacagctgggagggggccgtgttaagattttttttgctacaaagaggaggtggcaatggtagatccacccttatgcttctcagtttagcataacctcttatggattttcatcaaattcagcgtgttggtcactggaaagagccttttccttctccttttcttactctcccctcatggtgttcccctcttaaaggagaggagcttttaatttacacttaccacctcatttgcttttctggaggccatgcaatataggcgggactacagagttaatctcctttttacaaatgaggccaagagaagcctcattggttcacagtcatgcagctcatactgtccacccttgtattctcagatgcaggacaattgcattttagttttattttgtggaggtgcagaatatttactctttctgtccaacccttgattctgccgaggaagacactgatggtttgatgagtgattcagctgtttttggctaagggcttttggagctgatggcaggggtttgatgaatccaaatgagctctagacattatcacagactgaatagatcttaactgtctcctacatgtgtgttttcaaatgtgtatagatgctattgttattaataaagttaccaattaattt

SEQ ID NO: 439052 - DNA, 1933 bp, Homo sapiens
  misc_feature (122)..(122): n is a, c, g, or t
  misc_feature (129)..(129): n is a, c, g, or t
ccgaaaaggcaagagagatatgtatagtcgtactggttattcgtacgggcggcttgcttatttttcagtgctgcgatacacggtcgaggcacagcgtcacaagttacacgcgtaaaggttcntccccanatgtgagtccctgccgggacctggcgctcgctcgctcgagtcgccggctgcttgactccaaaggctcttttcagagccacccacctaatcactagaaaagagcttgttcacttattcccttagtttcttttcataaagtaagttattttagtgtgaaggtcatgggaaatggcatacgtagctttttaactatttggaactcgaggtccccagtgcgtcattggatttgcttttgaatctagagcgtgtctttactcattgtgctgcttagccttcccaggagtcggttctcaattaggctgttgggaatccgcctctttacccgcccccactcccgccccacacgcgccctggtggctccttgggtctgtttcattctaaaacgaagtggctgagttcggctgtcatttaagagaactccaggacacaattcagcccgggttccgcaaacactgcgtgacagctctgtatgactgacgcttggcagcagcttttgtgtccggtcaccagttctgccgtgcgatggggcctcctgtggataccagccgttctgtgtattttggacgaaggccgcgcagccgggtcccagccttgtcctgattgggcgacaagaatattcaaaattctgcgcctttttctaatttgtagatttcagtttccgtcgttcactttgagactttgaaattcctatttctcattttgttgataatttctgcatttaatggtctgtgctttaaatggtaacgctacggccccaggtcactgcgaggcacttaccatgtagatacgggctcaaaagtcacctctcagagacctacgtcatccactcaggaattcgcgcctctcatacttgcctgtctcattttatcttccttctagcagctgtctgaaattggttcgtctgttttcttgtttatggtattctcaagcccttgacagaccggctagtgtggttttcccgtgcatcttcagcctggcacattatggacacttaaatactacgtattgatctaatattgttgggttaatttttccatcccacccttttcttaatcgcttccgtggatggatgaagggtgctgttcatttccattagatgtatgtgaaggcacagtgaaaatggaaatgttcttggagctacttcctcaaaatgtatccttagtcacctcagtgcaacagctgggagggggccgtgttaagattttttttgctacaaagaggaggtggcaatggtagatccacccttatgcttctcagtttagcataacctcttatggattttcatcaaattcagcgtgttggtcactggaaagagccttttccttctccttttcttactctcccctcatggtgttcccctcttaaaggagaggagcttttaatttacacttaccacctcatttgcttttctggaggccatgcaatataggcgggactacagagttaatctcctttttacaaatgaggccaagagaagcctcattggttcacagtcatgcagctcatactgtccacccttgtattctcagatgcaggacaattgcattttagttttattttgtggaggtgcagaatatttactctttctgtccaacccttgattctgccgaggaagacactgatggtttgatgagtgattcagctgtttttggctaagggcttttggagctgatggcaggggtttgatgaatccaaatgagctctagacattatcacagactgaatagatcttaactgtctcctacatgtgtgttttcaaatgtgtatagatgctattgttattaataaagttaccaattaattt

SEQ ID NO: 439053 - DNA, 1388 bp, Homo sapiens
ggtgcctggtacggtcccgaatttttgggatcaacactgcgtgacagctctgtatgactgacgcttggcagcagcttttgtgtccggtcaccagttctgccgtgcgatggggcctcctgtggataccagccgttctgtgtattttggacgaaggccgcgcagccgggtcccagccttgtcctgattgggcgacaagaatattcaaaattctgcgcctttttctaatttgtagatttcagtttccgtcgttcactttgagactttgaaattcctatttctcattttgttgataatttctgcatttaatggtctgtgctttaaatggtaacgctacggccccaggtcactgcgaggcacttaccatgtagatacgggctcaaaagtcacctctcagagacctacgtcatccactcaggaattcgcgcctctcatacttgcctgtctcattttatcttccttctagcagctgtctgaaattggttcgtctgttttcttgtttatggtattctcaagcccttgacagaccggctagtgtggttttcccgtgcatcttcagcctggcacattatggacacttaaatactacgtattgatctaatattgttgggttaatttttccatcccacccttttcttaatcgcttccgtggatggatgaagggtgctgttcatttccattagatgtatgtgaaggcacagtgaaaatggaaatgttcttggagctacttcctcaaaatgtatccttagtcacctcagtgcaacagctgggagggggccgtgttaagattttttttgctacaaagaggaggtggcaatggtagatccacccttatgcttctcagtttagcataacctcttatggattttcatcaaattcagcgtgttggtcactggaaagagccttttccttctccttttcttactctcccctcatggtgttcccctcttaaaggagaggagcttttaatttacacttaccacctcatttgcttttctggaggccatgcaatataggcgggactacagagttaatctcctttttacaaatgaggccaagagaagcctcattggttcacagtcatgcagctcatactgtccacccttgtattctcagatgcaggacaattgcattttagttttattttgtggaggtgcagaatatttactctttctgtccaacccttgattctgccgaggaagacactgatggtttgatgagtgattcagctgtttttggctaagggcttttggagctgatggcaggggtttgatgaatccaaatgagctctagacattatcacagactgaatagatcttaactgtctcctacatgtgtgttttcaaatgtgtatagatgctattgttattaataaagttaccaattaattt

SEQ ID NO: 439054 - DNA, 653 bp, Homo sapiens
tcgagtcggtaccggtcccatgcgcagtctgggagggggccgtgttaagattttttttgctacaaagaggaggtggcaatggtagatccacccttatgcttctcagtttagcataacctcttatggattttcatcaaattcagcgtgttggtcactggaaagagccttttccttctccttttcttactctcccctcatggtgttcccctcttaaaggagaggagcttttaatttacacttaccacctcatttgcttttctggaggccatgcaatataggcgggactacagagttaatctcctttttacaaatgaggccaagagaagcctcattggttcacagtcatgcagctcatactgtccacccttgtattctcagatgcaggacaattgcattttagttttattttgtggaggtgcagaatatttactctttctgtccaacccttgattctgccgaggaagacactgatggtttgatgagtgattcagctgtttttggctaagggcttttggagctgatggcaggggtttgatgaatccaaatgagctctagacattatcacagactgaatagatcttaactgtctcctacatgtgtgttttcaaatgtgtatagatgctattgttattaataaagttaccaattaattt

SEQ ID NO: 439055 - DNA, 608 bp, Homo sapiens
  misc_feature (12)..(12): n is a, c, g, or t
gaggatccctgnccgagatgcatacgggtggcaatggtagatccacccttatgcttctcagtttagcataacctcttatggattttcatcaaattcagcgtgttggtcactggaaagagccttttccttctccttttcttactctcccctcatggtgttcccctcttaaaggagaggagcttttaatttacacttaccacctcatttgcttttctggaggccatgcaatataggcgggactacagagttaatctcctttttacaaatgaggccaagagaagcctcattggttcacagtcatgcagctcatactgtccacccttgtattctcagatgcaggacaattgcattttagttttattttgtggaggtgcagaatatttactctttctgtccaacccttgattctgccgaggaagacactgatggtttgatgagtgattcagctgtttttggctaagggcttttggagctgatggcaggggtttgatgaatccaaatgagctctagacattatcacagactgaatagatcttaactgtctcctacatgtgtgttttcaaatgtgtatagatgctattgttattaataaagttaccaattaattt

SEQ ID NO: 439056 - DNA, 2227 bp, Homo sapiens
tgctaggtacgaggccggggtgttaatcggccgaggctgtgtcttaccatgcctgaaccggcaaaatccgctccggcccctaaaaagggctccaagaaagccgtcaccaaagcccagaagaaagacggcaagaagcgcaagcgcagccgcaaagagagctactccatctacgtgtacaaggtgctgaagcaggtccaccccgacaccggcatctcgtccaaggccatgggcatcatgaactccttcgtcaacgacatcttcgagcgcatcgcgggagaggcttcccgcctggcgcactacaacaagcgctccaccatcacatcccgcgagatccagacggccgtgcgcctgctgctgcccggcgagctggccaagcacgccgtgtccgagggcaccaaggcggtcaccaagtacaccagctccaagtgagtccctgccgggacctggcgctcgctcgctcgagtcgccggctgcttgactccaaaggctcttttcagagccacccacctaatcactagaaaagagcttgttcacttattcccttagtttcttttcataaagtaagttattttagtgtgaaggtcatgggaaatggcatacgtagctttttaactatttggaactcgaggtccccagtgcgtcattggatttgcttttgaatctagagcgtgtctttactcattgtgctgcttagccttcccaggagtcggttctcaattaggctgttgggaatccgcctctttacccgcccccactcccgccccacacgcgccctggtggctccttgggtctgtttcattctaaaacgaagtggctgagttcggctgtcatttaagagaactccaggacacaattcagcccgggttccgcaaacactgcgtgacagctctgtatgactgacgcttggcagcagcttttgtgtccggtcaccagttctgccgtgcgatggggcctcctgtggataccagccgttctgtgtattttggacgaaggccgcgcagccgggtcccagccttgtcctgattgggcgacaagaatattcaaaattctgcgcctttttctaatttgtagatttcagtttccgtcgttcactttgagactttgaaattcctatttctcattttgttgataatttctgcatttaatggtctgtgctttaaatggtaacgctacggccccaggtcactgcgaggcacttaccatgtagatacgggctcaaaagtcacctctcagagacctacgtcatccactcaggaattcgcgcctctcatacttgcctgtctcattttatcttccttctagcagctgtctgaaattggttcgtctgttttcttgtttatggtattctcaagcccttgacagaccggctagtgtggttttcccgtgcatcttcagcctggcacattatggacacttaaatactacgtattgatctaatattgttgggttaatttttccatcccacccttttcttaatcgcttccgtggatggatgaagggtgctgttcatttccattagatgtatgtgaaggcacagtgaaaatggaaatgttcttggagctacttcctcaaaatgtatccttagtcacctcagtgcaacagctgggagggggccgtgttaagattttttttgctacaaagaggaggtggcaatggtagatccacccttatgcttctcagtttagcataacctcttatggattttcatcaaattcagcgtgttggtcactggaaagagccttttccttctccttttcttactctcccctcatggtgttcccctcttaaaggagaggagcttttaatttacacttaccacctcatttgcttttctggaggccatgcaatataggcgggactacagagttaatctcctttttacaaatgaggccaagagaagcctcattggttcacagtcatgcagctcatactgtccacccttgtattctcagatgcaggacaattgcattttagttttattttgtggaggtgcagaatatttactctttctgtccaacccttgattctgccgaggaagacactgatggtttgatgagtgattcagctgtttttggctaagggcttttggagctgatggcaggggtttgatgaatccaaatgagctctagacattatcacagactgaatagatcttaactgtctcctacatgtgtgttttcaaatgtgtatagatgctattgttattaataaagttaccaattaattt

SEQ ID NO: 439057 - DNA, 2346 bp, Homo sapiens
ctctgacttcttttcttggctaagccgcgtttgtactgtgtcttaccatgcctgaaccggcaaaatccgctccggcccctaaaaagggctccaagaaagccgtcaccaaagcccagaagaaagacggcaagaagcgcaagcgcagccgcaaagagagctactccatctacgtgtacaaggtgctgaagcaggtccaccccgacaccggcatctcgtccaaggccatgggcatcatgaactccttcgtcaacgacatcttcgagcgcatcgcgggagaggcttcccgcctggcgcactacaacaagcgctccaccatcacatcccgcgagatccagacggccgtgcgcctgctgctgcccggcgagctggccaagcacgccgtgtccgagggcaccaaggcggtcaccaagtacaccagctccaagtgagtccctgccgggacctggcgctcgctcgctcgagtcgccggctgcttgactccaaaggctcttttcagagccacccacctaatcactagaaaagagcttgttcacttattcccttagtttcttttcataaagtaagttattttagtgtgaaggtcatgggaaatggcatacgtagctttttaactatttggaactcgaggtccccagtgcgtcattggatttgcttttgaatctagagcgtgtctttactcattgtgctgcttagccttcccaggagtcggttctcaattaggctgttgggaatccgcctctttacccgcccccactcccgccccacacgcgccctggtggctccttgggtctgtttcattctaaaacgaagtggctgagttcggctgtcatttaagagaactccaggacacaattcagcccgggttccgcaaacactgcgtgacagctctgtatgactgacgcttggcagcagcttttgtgtccggtcaccagttctgccgtgcgatggggcctcctgtggataccagccgttctgtgtattttggacgaaggccgcgcagccgggtcccagccttgtcctgattgggcgacaagaatattcaaaattctgcgcctttttctaatttgtagatttcagtttccgtcgttcactttgagactttgaaattcctatttctcattttgttgataatttctgcatttaatggtctgtgctttaaatggtaacgctacggccccaggtcactgcgaggcacttaccatgtagatacgggctcaaaagtcacctctcagagacctacgtcatccactcaggaattcgcgcctctcatacttgcctgtctcattttatcttccttctagcagctgtctgaaattggttcgtctgttttcttgtttatggtattctcaagcccttgacagaccggctagtgtggttttcccgtgcatcttcagcctggcacattatggacacttaaatactacgtattgatctaatattgttgggttaatttttccatcccacccttttcttaatcgcttccgtggatggatgaagggtgctgttcatttccattagatgtatgtgaaggcacagtgaaaatggaaatgttcttggagctacttcctcaaaatgtatccttagtcacctcagtgcaacagctgggagggggccgtgttaagattttttttgctacaaagaggaggtggcaatggtagatccacccttatgcttctcagtttagcataacctcttatggattttcatcaaattcagcgtgttggtcactggaaagagccttttccttctccttttcttactctcccctcatggtgttcccctcttaaaggagaggagcttttaatttacacttaccacctcatttgcttttctggaggccatgcaatataggcgggactacagagttaatctcctttttacaaatgaggccaagagaagcctcattggttcacagtcatgcagctcatactgtccacccttgtattctcagatgcaggacaattgcattttagttttattttgtggaggtgcagaatatttactctttctgtccaacccttgattctgccgaggaagacactgatggtttgatgagtgattcagctgtttttggctaagggcttttggagctgatggcaggggtttgatgaatccaaatgagctctagacattatcacagactgaatagatcttaactgtctcctacatgtgtgttttcaaatgtgtatagatgctattgttattaataaagttaccaattaatttgagatcatgactccaggggggccggacccaatggcaaagggatggtacaatcagggccgcgttaaagtggcttggaacctgggtcccattatgcgcggcctttcacgggctatatcgcgt

SEQ ID NO: 439058 - DNA, 1061 bp, Homo sapiens
gtgatttgctggaattgtcattagtgttgacgatgtgtcacactgtgtaagggaatcgcatggagatgggcattccgaactgttaatggggacatgggactccagttgtctctgatcacttgtgtggattttcctggcgtagaacgacagaagccgctagtaagtcgccaagacctacagcaggaattctgcaccaaagggcataaaatcttgttattttaatttgcatctgggagaatgtctgagcaaggagacctgaatcaggcaatagcagaggaaggagggactgagcaggagacggccactccagagaacggcattgttaaatcagaaagtctggatgaagaggagaaactggaactgcagaggcggctggaggctcagaatcaagaaagaagaaaatccaagtcaggagcaggaaaaggtaaactgactcgcagtcttgctgtctgtgaggaatcttctgccagaccaggaggtgaaagtcttcaggatcagagaatgagagcctgcaagcctctctttggattggctgaggagtggtgggagcagggggttgatagaaaacatccagacacacatataagcaagtggccgtgctacctttttagagaataaagaaacagacttttgagtttatatgcaatgccttcattaggtaccaccggcacttacaaaatgtgcggactgaatcccagagaacactggcagatgtatacagtatatggattgtatcgcttccccaatgtttgtaaattcacagtatttggaaaactgccttcattttccagtgtgggaaaaactcttgctacctgtattacttgatctcagacccatacctgatggttcagtctgtccttaagttaaaagaattttgcttttctaatgttatactatttacctgtcagtgtattactgcaacttgaatcactcttttactgttgttggatataaacttatcctgtaccaatgtatttattaacacttgtattttattattgagcatatcaataaaaatattaaaaaataacagattgttttttaccaacaaaaaaaaaatt

SEQ ID NO: 439059 - DNA, 2435 bp, Homo sapiens
agcggagagaagaagcaggcagcttgagacaggtggagctggatcaagctgtgaacgtgatttgctggaagctggtcattagtgttgacgatgtgtcacactgtgtaagggaatcgcatggagatgggcattccgaactgttaatggggacatgggactccagttgtctctgatcacttgtgtggattttcctggcgtagaacgacagaagccgctagtaagtcgccaagacctacagcaggaattctgcaccaaagggcataaaatcttgttattttaatttgcatctgggagaatgtctgagcaaggagacctgaatcaggcaatagcagaggaaggagggactgagcaggagacggccactccagagaacggcattgttaaatcagaaagtctggatgaagaggagaaactggaactgcagaggcggctggaggctcagaatcaagaaagaagaaaatccaagtcaggagcaggaaaaggtaaactgactcgcagtcttgctgtctgtgaggaatcttctgccagaccaggaggtgaaagtcttcaggatcagactctctgaaaactgcaaatggaaaggaattcaaaagaatttagattaaaagttaaataaaaagtaggcacagtagtgctgaattttcctcaaaggctctcttttgataaggctgaaccaaatataatcccaagtatcctctctccttccttgttggagatgtcttacctctcagctccccaaaatgcacttgcctataagaaacacaattgctggttcatatgaacttaggaaatagtgaataaggtgcatttaactttggagaaatacttttatggctttggtggagatttctcaatactgcaaaagttgtccagaaatgaatctgagctgatggtgactttaagttaatattattaatatatcactgcatatttttacccttatttttgctccttacagcaagattagtaggttataaaaatttaaatttaaacaaaattatttcatgacaaaatgggaaacttcacatcatacttatttttgtttgcctttcaggcatcatattagcttttataaaaaatggtcttgctgctgaaattgtacttattttatcagaggctgggtgcagtcaagacaaaagtaaaatggtttacctgagcccaggggagggaaaattgattaagatatcattatttttgtttggtttggttttgcttttttcctcttactttaattgaaatactctgaattcccctcatggaaacagagagcattgagagcactttctttaaaaggaccaaaaataaattcctaatagattttgtcctaagagagtgtttttttttctagcatcattttctttacatgccactcatgtcataaggcatggacaggctatctttcagtggccattactatgtttcgtacacatgctttattttacttgggctctgagaaatgtgtggctttccttcagcattttatttgtgcttctctttttaatggagattgaaaagggagaataatgtgaatatcacggcttatattattaaatgttgattgatggcttgtaatgtactgcacacaatatatgttaactctgcagaatgacagaccctgggagaagtaatgccccagttgtcccccactcctaatgccaggcagagaaggacagcctttatagacttaatctgctttttgtcccatttgacaaggtaccaggaggaaattttttaagggatcaactgtatcacagtgcccactctggacctaagtctagtgtatccatacaattggtgcagagaaataaggtgtaaatggtgctttgttcctgctggttccaagctcagaaaccaagactagctttgtaggagagaatgagagcctgcaagcctctctttggattggctgaggagtggtgggagcagggggttgatagaaaacatccagacacacatataagcaagtggccgtgctacctttttagagaataaagaaacagacttttgagtttatatgcaatgccttcattaggtaccaccggcacttacaaaatgtgcggactgaatcccagagaacactggcagatgtatacagtatatggattgtatcgcttccccaatgtttgtaaattcacagtatttggaaaactgccttcattttccagtgtgggaaaaactcttgctacctgtattacttgatctcagacccatacctgatggttcagtctgtccttaagttaaaagaattttgcttttctaatgttatactatttacctgtcagtgtattactgcaacttgaatcactcttttactgttgttggatataaacttatcctgtaccaatgtatttattaacacttgtattttattattgagcatatcaataaaaatattaaaaaataacagattgttttttaccaacaaaaaaaaaatt

SEQ ID NO: 439060 - DNA, 2413 bp, Homo sapiens
gaacagattttaactctgaaaagccatttccagtgtctatagactattgtgagcctggagaagtagcatttagttgggatagctccactagagctgcctgccaaagacttccttccacaggatcttgtcgcaccagcaactgacaggagcttgggagctcgggagcttgggagagggcttatgtttttaataatgtagctgtcagttcgaagcctggaaatgttgaccctcaaagggcataaaatcttgttattttaatttgcatctgggagaatgtctgagcaaggagacctgaatcaggcaatagcagaggaaggagggactgagcaggagacggccactccagagaacggcattgttaaatcagaaagtctggatgaagaggagaaactggaactgcagaggcggctggaggctcagaatcaagaaagaagaaaatccaagtcaggagcaggaaaaggtaaactgactcgcagtcttgctgtctgtgaggaatcttctgccagaccaggaggtgaaagtcttcaggatcagactctctgaaaactgcaaatggaaaggaattcaaaagaatttagattaaaagttaaataaaaagtaggcacagtagtgctgaattttcctcaaaggctctcttttgataaggctgaaccaaatataatcccaagtatcctctctccttccttgttggagatgtcttacctctcagctccccaaaatgcacttgcctataagaaacacaattgctggttcatatgaacttaggaaatagtgaataaggtgcatttaactttggagaaatacttttatggctttggtggagatttctcaatactgcaaaagttgtccagaaatgaatctgagctgatggtgactttaagttaatattattaatatatcactgcatatttttacccttatttttgctccttacagcaagattagtaggttataaaaatttaaatttaaacaaaattatttcatgacaaaatgggaaacttcacatcatacttatttttgtttgcctttcaggcatcatattagcttttataaaaaatggtcttgctgctgaaattgtacttattttatcagaggctgggtgcagtcaagacaaaagtaaaatggtttacctgagcccaggggagggaaaattgattaagatatcattatttttgtttggtttggttttgcttttttcctcttactttaattgaaatactctgaattcccctcatggaaacagagagcattgagagcactttctttaaaaggaccaaaaataaattcctaatagattttgtcctaagagagtgtttttttttctagcatcattttctttacatgccactcatgtcataaggcatggacaggctatctttcagtggccattactatgtttcgtacacatgctttattttacttgggctctgagaaatgtgtggctttccttcagcattttatttgtgcttctctttttaatggagattgaaaagggagaataatgtgaatatcacggcttatattattaaatgttgattgatggcttgtaatgtactgcacacaatatatgttaactctgcagaatgacagaccctgggagaagtaatgccccagttgtcccccactcctaatgccaggcagagaaggacagcctttatagacttaatctgctttttgtcccatttgacaaggtaccaggaggaaattttttaagggatcaactgtatcacagtgcccactctggacctaagtctagtgtatccatacaattggtgcagagaaataaggtgtaaatggtgctttgttcctgctggttccaagctcagaaaccaagactagctttgtaggagagaatgagagcctgcaagcctctctttggattggctgaggagtggtgggagcagggggttgatagaaaacatccagacacacatataagcaagtggccgtgctacctttttagagaataaagaaacagacttttgagtttatatgcaatgccttcattaggtaccaccggcacttacaaaatgtgcggactgaatcccagagaacactggcagatgtatacagtatatggattgtatcgcttccccaatgtttgtaaattcacagtatttggaaaactgccttcattttccagtgtgggaaaaactcttgctacctgtattacttgatctcagacccatacctgatggttcagtctgtccttaagttaaaagaattttgcttttctaatgttatactatttacctgtcagtgtattactgcaacttgaatcactcttttactgttgttggatataaacttatcctgtaccaatgtatttattaacacttgtattttattattgagcatatcaataaaaatattaaaaaataacagattgttttttaccaacaaaaaaaaaatt

SEQ ID NO: 439061 - DNA, 2378 bp, Homo sapiens
agcggagagaagaagcaggcagcttgagacaggtggagctggatcaagctgtgaacgtgatttgctggaagctggtcattagtgttgacgatgtgtcacactgtgtaagggaatcgcatggagatgggcattccgaactgttaatggggacatgggactccagttgtctctgatcacttgtgtggattttcctggcgtagaacgacagaagccgctagtaagtcgccaagacctacagcaggaattctgcaccaaagggcataaaatcttgttattttaatttgcatctgggagaatgtctgagcaaggagacctgaatcaggcaatagcagaggaaggagggactgagcaggagacggccactccagagaacggcattgttaaatcagaaagtctggatgaagaggagaaactggaactgcagaggcggctggaggctcagaatcaagaaagaagaaaatccaagtcaggagcaggaaaaggtaaactgactcgcagtcttgctgtctgtgaggaatcttctgccagaccaggaggtgaaagtcttcaggatcagactctctgaaaactgcaaatggaaaggaattcaaaagaatttagattaaaagttaaataaacaaatataatcccaagtatcctctctccttccttgttggagatgtcttacctctcagctccccaaaatgcacttgcctataagaaacacaattgctggttcatatgaacttaggaaatagtgaataaggtgcatttaactttggagaaatacttttatggctttggtggagatttctcaatactgcaaaagttgtccagaaatgaatctgagctgatggtgactttaagttaatattattaatatatcactgcatatttttacccttatttttgctccttacagcaagattagtaggttataaaaatttaaatttaaacaaaattatttcatgacaaaatgggaaacttcacatcatacttatttttgtttgcctttcaggcatcatattagcttttataaaaaatggtcttgctgctgaaattgtacttattttatcagaggctgggtgcagtcaagacaaaagtaaaatggtttacctgagcccaggggagggaaaattgattaagatatcattatttttgtttggtttggttttgcttttttcctcttactttaattgaaatactctgaattcccctcatggaaacagagagcattgagagcactttctttaaaaggaccaaaaataaattcctaatagattttgtcctaagagagtgtttttttttctagcatcattttctttacatgccactcatgtcataaggcatggacaggctatctttcagtggccattactatgtttcgtacacatgctttattttacttgggctctgagaaatgtgtggctttccttcagcattttatttgtgcttctctttttaatggagattgaaaagggagaataatgtgaatatcacggcttatattattaaatgttgattgatggcttgtaatgtactgcacacaatatatgttaactctgcagaatgacagaccctgggagaagtaatgccccagttgtcccccactcctaatgccaggcagagaaggacagcctttatagacttaatctgctttttgtcccatttgacaaggtaccaggaggaaattttttaagggatcaactgtatcacagtgcccactctggacctaagtctagtgtatccatacaattggtgcagagaaataaggtgtaaatggtgctttgttcctgctggttccaagctcagaaaccaagactagctttgtaggagagaatgagagcctgcaagcctctctttggattggctgaggagtggtgggagcagggggttgatagaaaacatccagacacacatataagcaagtggccgtgctacctttttagagaataaagaaacagacttttgagtttatatgcaatgccttcattaggtaccaccggcacttacaaaatgtgcggactgaatcccagagaacactggcagatgtatacagtatatggattgtatcgcttccccaatgtttgtaaattcacagtatttggaaaactgccttcattttccagtgtgggaaaaactcttgctacctgtattacttgatctcagacccatacctgatggttcagtctgtccttaagttaaaagaattttgcttttctaatgttatactatttacctgtcagtgtattactgcaacttgaatcactcttttactgttgttggatataaacttatcctgtaccaatgtatttattaacacttgtattttattattgagcatatcaataaaaatattaaaaaataacagattgttttttaccaacaaaaaaaaaatt

SEQ ID NO: 439062 - DNA, 2599 bp, Homo sapiens
tatgtgctattagatttgcaaattgctgatctcccagtgactttccctcttagatcccagttgagtatggttaccttgagaactgtggtattagccatgttagagcatgctccactggggagttctgtgcagtctatttttaatgctatttaatgaaggagcgagcgcctcactcagcaataaaagaagcatgagggaagacagagcagtgcatggttatggatactggacaaggatatttggaaaggttgacgatgtgtcacactgtgtaagggaatcgcatggagatgggcattccgaactgttaatggggacatgggactccagttgtctctgatcacttgtgtggattttcctggcgtagaacgacagaagccgctagtaagtcgccaagacctacagcaggaattctgcaccaaagggcataaaatcttgttattttaatttgcatctgggagaatgtctgagcaaggagacctgaatcaggcaatagcagaggaaggagggactgagcaggagacggccactccagagaacggcattgttaaatcagaaagtctggatgaagaggagaaactggaactgcagaggcggctggaggctcagaatcaagaaagaagaaaatccaagtcaggagcaggaaaaggtaaactgactcgcagtcttgctgtctgtgaggaatcttctgccagaccaggaggtgaaagtcttcaggatcagactctctgaaaactgcaaatggaaaggaattcaaaagaatttagattaaaagttaaataaaaagtaggcacagtagtgctgaattttcctcaaaggctctcttttgataaggctgaaccaaatataatcccaagtatcctctctccttccttgttggagatgtcttacctctcagctccccaaaatgcacttgcctataagaaacacaattgctggttcatatgaacttaggaaatagtgaataaggtgcatttaactttggagaaatacttttatggctttggtggagatttctcaatactgcaaaagttgtccagaaatgaatctgagctgatggtgactttaagttaatattattaatatatcactgcatatttttacccttatttttgctccttacagcaagattagtaggttataaaaatttaaatttaaacaaaattatttcatgacaaaatgggaaacttcacatcatacttatttttgtttgcctttcaggcatcatattagcttttataaaaaatggtcttgctgctgaaattgtacttattttatcagaggctgggtgcagtcaagacaaaagtaaaatggtttacctgagcccaggggagggaaaattgattaagatatcattatttttgtttggtttggttttgcttttttcctcttactttaattgaaatactctgaattcccctcatggaaacagagagcattgagagcactttctttaaaaggaccaaaaataaattcctaatagattttgtcctaagagagtgtttttttttctagcatcattttctttacatgccactcatgtcataaggcatggacaggctatctttcagtggccattactatgtttcgtacacatgctttattttacttgggctctgagaaatgtgtggctttccttcagcattttatttgtgcttctctttttaatggagattgaaaagggagaataatgtgaatatcacggcttatattattaaatgttgattgatggcttgtaatgtactgcacacaatatatgttaactctgcagaatgacagaccctgggagaagtaatgccccagttgtcccccactcctaatgccaggcagagaaggacagcctttatagacttaatctgctttttgtcccatttgacaaggtaccaggaggaaattttttaagggatcaactgtatcacagtgcccactctggacctaagtctagtgtatccatacaattggtgcagagaaataaggtgtaaatggtgctttgttcctgctggttccaagctcagaaaccaagactagctttgtaggagagaatgagagcctgcaagcctctctttggattggctgaggagtggtgggagcagggggttgatagaaaacatccagacacacatataagcaagtggccgtgctacctttttagagaataaagaaacagacttttgagtttatatgcaatgccttcattaggtaccaccggcacttacaaaatgtgcggactgaatcccagagaacactggcagatgtatacagtatatggattgtatcgcttccccaatgtttgtaaattcacagtatttggaaaactgccttcattttccagtgtgggaaaaactcttgctacctgtattacttgatctcagacccatacctgatggttcagtctgtccttaagttaaaagaattttgcttttctaatgttatactatttacctgtcagtgtattactgcaacttgaatcactcttttactgttgttggatataaacttatcctgtaccaatgtatttattaacacttgtattttattattgagcatatcaataaaaatattaaaaaataacagattgttttttaccaacaaaaaaaaaatt

SEQ ID NO: 439063 - DNA, 691 bp, Homo sapiens
agcggagagaagaagcaggcagcttgagacaggtggagctggatcaagctgtgaacgtgatttgctggaagctggtcattagtgttgacgatgtgtcacactgtgtaagggaatcgcatggagatgggcattccgaactgttaatggggacatgggactccagttgtctctgatcacttgtgtggattttcctggcgtagaacgacagaagccgctagtaagtcgccaagacctacagcaggaattctgcaccaaagggcataaaatcttgttattttaatttgcatctgggagaatgtctgagcaaggagacctgaatcaggcaatagcagaggaaggagggactgagcaggagacggccactccagagaacggcattgttaaatcagaaagtctggatgaagaggagaaactggaactgcagaggcggctggaggctcagaatcaagaaagaagaaaatccaagtcaggagcaggaaaaggtaaactgactcgcagtcttgctgtctgtgaggaatcttctgccagaccaggaggtgaaagtcttcaggatcaggaatcaattcatttacagctttccagtttttccagcctgcaagaggaggataaatctaggaaagatgactctgaaagagaaaaagaaaaggataaaaacaaagataaaacctctgaaaaacccaagatcagaatg

SEQ ID NO: 439064 - DNA, 682 bp, Homo sapiens
agaagtagcatttagttgggatagctccactagagctgcctgccaaagacttccttccacaggatcttgtcgcaccagcaactgacaggagcttgggagctcgggagcttgggagagggcttatgtttttaataatgtagctgtcagttcgaagcctggaaatgttgaccctcaaaggtttattgccaaaattagataccatatttatgctgaattattaccttttcaatagttttttttgaccttgcagactactgtattctttatacctagggaagcatgtctatgtttggaacctgcaaataatttttcagtcatcttagagatgctgcagaacatcaatgccacatcttgagtcagaagtcgagggtcatttgttcaaaagttggagaaatatcctcttttgttgcttcttctactctgtagtggagaatggggaactggtagttgtgtgggagttatgtgtctctaagatttgtcgacccattttgatggcaaggtgtattcacaagtgtgtgtaaagggggtgtggatgggacaactgcatctgcctcttgtgcatgccttgggtacttgatttcatcttgttttttcccccttttgtataaaattctcaaaattgctcatttggatttgaatatgaaaggagaaatgaaatctctaaagaatgatagtaaatacc

SEQ ID NO: 439065 - DNA, 338 bp, Homo sapiens
atgatttggcagtctgagaatgcttcctgtttgttttctttattttcctttccttcccttttctttcccccctcctagtcaggagcaggaaaaggtaaactgactcgcagtcttgctgtctgtgaggaatcttctgccagaccaggaggtgaaagtcttcaggatcaggtatatccccttgccattatcattaattgcatgaatgggatccacctttgtgtgcatgactcttaatttggtgttaaacagtgttttgggggagaaaaatataattgaagaaaataattcattttttggctttatcccctgcttatgcaacattctaaaatagtttaatg

SEQ ID NO: 439066 - DNA, 855 bp, Homo sapiens
tatgtgctattagatttgcaaattgctgatctcccagtgactttccctcttagatcccagttgagtatggttaccttgagaactgtggtattagccatgttagagcatgctccactggggagttctgtgcagtctatttttaatgctatttaatgaaggagcgagcgcctcactcagcaataaaagaagcatgagggaagacagagcagtgcatggttatggatactggacaaggatatttggaaaggttgacgatgtgtcacactgtgtaagggaatcgcatggagatgggcattccgaactgttaatggggacatgggactccagttgtctctgatcacttgtgtggattttcctggcgtagaacgacagaagccgctagtaagtcgccaagacctacagcaggaattctgcaccaaagggcataaaatcttgttattttaatttgcatctgggagaatgtctgagcaaggagacctgaatcaggcaatagcagaggaaggagggactgagcaggagacggccactccagagaacggcattgttaaatcagaaagtctggatgaagaggagaaactggaactgcagaggcggctggaggctcagaatcaagaaagaagaaaatccaagtcaggagcaggaaaaggtaaactgactcgcagtcttgctgtctgtgaggaatcttctgccagaccaggaggtgaaagtcttcaggatcaggaatcaattcatttacagctttccagtttttccagcctgcaagaggaggataaatctaggaaagatgactctgaaagagaaaaagaaaaggataaaaacaaagataaaacctctgaaaaacccaagatcagaatg

SEQ ID NO: 439067 - DNA, 3175 bp, Homo sapiens
  misc_feature (1073)..(1073): n is a, c, g, or t
  misc_feature (1807)..(1807): n is a, c, g, or t
  misc_feature (2362)..(2362): n is a, c, g, or t
agattttgaaaattaaatattactgaagatttcgacttccactgttaaatgtacaagatacatgaaatattaaagaaaatgtgtaactttttgtgtaaatacatcttgtcttgttttcattcaaaaacatttcacttttggggttgcgtgtcagatttggcagtataaattctggctatattttttgttgttagatttatttggctgttaagtattgcgatatgactaaacatactgtatacctgatgatcatctgtaaagttagagtatatctttttgctttctttggagttagtgttattccaggatattttacttaatctaaaagttaatttatgttgctcatatattactcaagtatttaaatttagagagaatgccgctctgtttaaagcaatgtgtaaagatgagtttttttaagcatggaatttagggttggggtacaatttgtttctattaagcaagtaccagtttaccaatacatgagtaactgaagtgtaactgttaaatgcttgtatactagtttttctttctgattgtcagtgatttataagctataaatgaccaaggtcctcagactgcttttagcatctgcaacttaaaaaaatgggagttagaaaaagaacaaatgctaaatagagtaacagttaaatgtatgtgtacactcttcccaaatgccaagagtgcagcggtggggtgagattcagatattcatttatttctaagtctgtagttaacatttatgttccctactccctacgtaagccagactttggcaacagtgatagttgattccaggcttatttgacttaaagtcactgaagtggaaactaagaagtggcagttagtgttttacccagcatttctgccttctctcttttcttcatgtgtttttgtctctagcctatgtgtatttgtgtagaataatgtgggatacctgaataatagatttaaaaggaccaagtggtaaaattgggcccaagctgaagtacaggcaaacttgatgtttgaaagataagttttgagaaatgtcattgtattttggagtaaaagaggctatcttagtaataagnaataaacttccataacactaggttagaccacccaataaatctagaaatcagcttttaaaaatattgtctgaagtctaacaaaagttttcacctctaatgtgttctttaagaaatttaaggaacttagccttggattcctgaatagaaaggtaagaattctatcattctggagttgatgaaaacataaattttcaggatgtgaaatgaacagtgatttataaaatggaaatcaaattgtacattagcagagttcttaagctttttgaattgaaggagacctaataattgtgtctttttggttatttagtgacaaacgtggctttcaaactatgcttaaaaagttccggctggacacggtggctcacacctataatcctagcacttggggaggctgaggcagatggattacctgaggtcaggagttcgagaccaacctggccgacatggtgaaacgctgtctctactaaaaatataaaaaattagccgggtgcagtggcgtgcacctgtaatcccagctactctggaggctgaggcaggagaatcacctgaacctgggaggtggaggtttcagtgagctgagatcctgccactgcactccagcctgggcgcaagaccaagacttaaacgcaaaaaaaaaaaaaaaaaaaaaaaaaaagtttcataatacagcatggtctggtagtttgcaaaatggtgtgcttttggggagatacactagcaatttttttaaaaantggaacagtgtgataggaagcctgctggatgatttcttaaatattctaaaatgtaagtcaaatatgttttaataacaaagacttaaatggcttttctccctagagactgaaactagtattcattgtgttcagaacttaattgggcttgaactgagatttaaatctaataaacaagttaataaatgtgtatgttttgttgtgggtttggtagtgatctgtggttctatagggtttaataggaattgcttttgatttgtttctggctttagaatgtgaggcaaattttacattcttggttctattaagattttcttaggcatgctaacatgccaacaaaaagccatgtaagtattgtataaaaagattcacattgttaatttagccattttgaaattcagatgagtgagcaagttgataatggcctcatctctgacctgagaaaaaacaactttgacccttgttcttaaaatgctttaaccttgaagttgcttgagacttaagaggtcatgttgctttaggtttaataaatagccttaactatttggaggggaaaanatgggtcaactttttttttttttttggcgtttgcatgtacaactttctatttttagcctatatttggaaagaaagcacttaacattttaggaattctttttaaagctgcttgcaaagtgttggtgattttactgaaaacttttgagatcttcattttacaggcagacctgtctaactacaagccagacttgggttttctcctgtagtttgaagacacactgactcctgacaaaatgcagcctgcaacttcctggagaacaactcagtgtcacattaaagtttattatgtatttaatgatacactgtttaattgacagttttgcatagtttgtctaactttagagaattaagagcctctcaactgagcagtaaaggtaaggagagctcaatctgcacagagccagtttttagtgtttgatggaaataagatcatcatgcccacttgagacttcagattattctttagcttagtggttgtatgagttacatcttattaaagtcgaaattaatgtagttttctgccttgataacatttcatatgtggtattagttttaaagggtcattaggaaaatgcacatattccatgaattttaagacccatagaaaagttgaagaatgcttaattttcttatccagtaatgtaaacacagagacagaacattgagatgtgcctagttctgtatttacagtttggtctggctgtttgagttctagcgcatttaatgttaataaataaaatactgcattttaaagctgttaagaaattgtccagaacgagaatattgaaataaaaacttcaaggttataatcgc

SEQ ID NO: 439068 - DNA, 3120 bp, Homo sapiens
  misc_feature (1018)..(1018): n is a, c, g, or t
  misc_feature (1752)..(1752): n is a, c, g, or t
  misc_feature (2307)..(2307): n is a, c, g, or t
agattttgaaaattaaatattactgaagatttcgacttccactgttaaatgtacaagatacatgaaatattaaagaaaatgtgtaactttttgtgtaaatacatcttgtcttgttttcattcaaaaacatttcacttttggggttgcgtgtcagatttggcagtataaattctggctatattttttgttgttagatttatttggctgttaagtattgcgatatgactaaacatactgtatacctgatgatcatctgtaaagttagagtatatctttttgctttctttggagttagtgttattccaggatattttacttaatctaaaagttaatttatgttgctcatatattactcaagtatttaaatttagagagaatgccgctctgtttaaagcaatgtgtaaagatgagtttttttaagcatggaatttagggttggggtacaatttgtttctattaagcaagtaccagtttaccaatacatgagtaactgaagtgtaactgttaaatgcttgtatactagtttttctttctgattgtcagtgatttataagctataaatgaccaaggtcctcagactgcttttagcatctgcaacttaaaaaaatgggagttagaaatgccaagagtgcagcggtggggtgagattcagatattcatttatttctaagtctgtagttaacatttatgttccctactccctacgtaagccagactttggcaacagtgatagttgattccaggcttatttgacttaaagtcactgaagtggaaactaagaagtggcagttagtgttttacccagcatttctgccttctctcttttcttcatgtgtttttgtctctagcctatgtgtatttgtgtagaataatgtgggatacctgaataatagatttaaaaggaccaagtggtaaaattgggcccaagctgaagtacaggcaaacttgatgtttgaaagataagttttgagaaatgtcattgtattttggagtaaaagaggctatcttagtaataagnaataaacttccataacactaggttagaccacccaataaatctagaaatcagcttttaaaaatattgtctgaagtctaacaaaagttttcacctctaatgtgttctttaagaaatttaaggaacttagccttggattcctgaatagaaaggtaagaattctatcattctggagttgatgaaaacataaattttcaggatgtgaaatgaacagtgatttataaaatggaaatcaaattgtacattagcagagttcttaagctttttgaattgaaggagacctaataattgtgtctttttggttatttagtgacaaacgtggctttcaaactatgcttaaaaagttccggctggacacggtggctcacacctataatcctagcacttggggaggctgaggcagatggattacctgaggtcaggagttcgagaccaacctggccgacatggtgaaacgctgtctctactaaaaatataaaaaattagccgggtgcagtggcgtgcacctgtaatcccagctactctggaggctgaggcaggagaatcacctgaacctgggaggtggaggtttcagtgagctgagatcctgccactgcactccagcctgggcgcaagaccaagacttaaacgcaaaaaaaaaaaaaaaaaaaaaaaaaaagtttcataatacagcatggtctggtagtttgcaaaatggtgtgcttttggggagatacactagcaatttttttaaaaantggaacagtgtgataggaagcctgctggatgatttcttaaatattctaaaatgtaagtcaaatatgttttaataacaaagacttaaatggcttttctccctagagactgaaactagtattcattgtgttcagaacttaattgggcttgaactgagatttaaatctaataaacaagttaataaatgtgtatgttttgttgtgggtttggtagtgatctgtggttctatagggtttaataggaattgcttttgatttgtttctggctttagaatgtgaggcaaattttacattcttggttctattaagattttcttaggcatgctaacatgccaacaaaaagccatgtaagtattgtataaaaagattcacattgttaatttagccattttgaaattcagatgagtgagcaagttgataatggcctcatctctgacctgagaaaaaacaactttgacccttgttcttaaaatgctttaaccttgaagttgcttgagacttaagaggtcatgttgctttaggtttaataaatagccttaactatttggaggggaaaanatgggtcaactttttttttttttttggcgtttgcatgtacaactttctatttttagcctatatttggaaagaaagcacttaacattttaggaattctttttaaagctgcttgcaaagtgttggtgattttactgaaaacttttgagatcttcattttacaggcagacctgtctaactacaagccagacttgggttttctcctgtagtttgaagacacactgactcctgacaaaatgcagcctgcaacttcctggagaacaactcagtgtcacattaaagtttattatgtatttaatgatacactgtttaattgacagttttgcatagtttgtctaactttagagaattaagagcctctcaactgagcagtaaaggtaaggagagctcaatctgcacagagccagtttttagtgtttgatggaaataagatcatcatgcccacttgagacttcagattattctttagcttagtggttgtatgagttacatcttattaaagtcgaaattaatgtagttttctgccttgataacatttcatatgtggtattagttttaaagggtcattaggaaaatgcacatattccatgaattttaagacccatagaaaagttgaagaatgcttaattttcttatccagtaatgtaaacacagagacagaacattgagatgtgcctagttctgtatttacagtttggtctggctgtttgagttctagcgcatttaatgttaataaataaaatactgcattttaaagctgttaagaaattgtccagaacgagaatattgaaataaaaacttcaaggttataatcgc

SEQ ID NO: 439069 - DNA, 941 bp, Homo sapiens
tccgcgaagctctcctcgcggggcgggccggccggccgcacccccggcctggggcctccggtcgtagtaaagcgcaggcgggcggggaggcgggagcaggagcccgcggccggccagccgaagatggtggcggctactcctcctgtcatacacgtggacctaactgcaccagtagcttttctgagaatacttgctgaaaaggaagttttctggaatggtatttgctaagtggaagccagaagaggaggaaaatgttttgccacgtggatgtgaagatttcctctaaaaggcagacctgtctaactacaagccagacttgggttttctcctgtagtttgaagacacactgactcctgacaaaatgcagcctgcaacttcctggagaacaactcagtgtcacattaaagtttattatgtatttaatgatacactgtttaattgacagttttgcatagtttgtctaactttagagaattaagagcctctcaactgagcagtaaaggtaaggagagctcaatctgcacagagccagtttttagtgtttgatggaaataagatcatcatgcccacttgagacttcagattattctttagcttagtggttgtatgagttacatcttattaaagtcgaaattaatgtagttttctgccttgataacatttcatatgtggtattagttttaaagggtcattaggaaaatgcacatattccatgaattttaagacccatagaaaagttgaagaatgcttaattttcttatccagtaatgtaaacacagagacagaacattgagatgtgcctagttctgtatttacagtttggtctggctgtttgagttctagcgcatttaatgttaataaataaaatactgcattttaaagctgttaagaaattgtccagaacgagaatattgaaataaaaacttcaaggttataatcgc

SEQ ID NO: 439070 - DNA, 678 bp, Homo sapiens
gcaaagatgagacccactaccagagaggttcgcactttttactgaatcactgccatgaatgatgttcctgccaacctgaatgcaaaagtccccacgaatggtgcctggcttagaatctgctggattggtctccccaagcatcactcggcctgtcttcacgacgttcagcccctcccagaccatggccacgaccggccctgagttcatgtacttcaccagcccagggaagaatgggcggtccttcaggtcaatgtagtgctgcttcaggtgttcttcagaggccgggaggaacttcatggccacgaggcggaaccccttctgctcgaagcgcttgatgatcttgcccaccaggccgcactgcatgctgtccggcctgatggtgatgaagacacagcctcactctgtcctccagtctggagtatagtggcacactgcattcttcacctcctgggctcaagtgatcctcctacctcagtctcctgagcagctgggactacaggcgcccaccaccatgcccgactaacttttttcgtatttttttagagatggggtttcaccatgttgcccaggttggtctggaactcctgggctcaagcagtccaccttccctgacctcccaaagtgttgggattacaggcgtgagccactgcacccagccttgtataagtaccttttttt

SEQ ID NO: 439071 - DNA, 768 bp, Homo sapiens
tagagacggggtttcaccgtgttagccaggatggtcttgatctgacctcctgatccacctgcctcagcctcccaaagtgctgggattacaggcatgagccaccacgaccggccagagatttgcactttttactgaatcactgccatgaatgatgttcctgccaacctgaatgcaaaagtccccacgaatggtgcctggcttagaatctgctggattggtctccccaagcatcactcggcctgtcttcacgacgttcagcccctcccagaccatggccacgaccggccctgagttcatgtacttcaccagcccagggaagaatgggcggtccttcaggtcaatgtagtgctgcttcaggtgttcttcagaggccgggaggaacttcatggccacgaggcggaaccccttctgctcgaagcgcttgatgatcttgcccaccaggccgcactgcatgctgtccggcctgatggtgatgaagacacagcctcactctgtcctccagtctggagtatagtggcacactgcattcttcacctcctgggctcaagtgatcctcctacctcagtctcctgagcagctgggactacaggcgcccaccaccatgcccgactaacttttttcgtatttttttagagatggggtttcaccatgttgcccaggttggtctggaactcctgggctcaagcagtccaccttccctgacctcccaaagtgttgggattacaggcgtgagccactgcacccagccttgtataagtaccttttttt

SEQ ID NO: 439072 - DNA, 2421 bp, Homo sapiens
cttccacaggaggtctacacgctttcgcttgtgctgaggccgagggagtcgccattttggatggtgaaccctgaagtcggtgtctgctgcgttcacggcaggattcggttaggaggaacagcacagcatgctgggctctggatttaaagctgagcgcttaagagtgaatttgagattagtcataaatcgccttaaactattggagaaaaagaaaacggaactggcccagaaagcaaggaaggagattgctgactatctggctgctgggaaagatgaacgagctcggatccgtgtggagcacattatccgggaagactacctcgtggaggccatggagatcctggagctgtactgtgacctgctgctggctcggtttggccttatccagtctatgaaggaactagattctggtctggctgaatctgtgtctacattgatctgggctgctcctcgactccagtcagaagtggctgagttgaaaatagttgctgatcagctctgtgccaagtatagcaaggaatatggcaagctatgtaggaccaaccagattggaactgtgaatgacaggctaatgcacaagctgagtgtggaagccccacccaaaatcctggtggagagatacctgattgaaattgcaaagaattacaacgtaccctatgaacctgactctgtggtcatggcagaagctcctcctggggtagagacagatcttattgatgttggattcacagatgatgtgaagaaaggaggccctggaagaggagggagtggtggcttcacagcaccagttggtggacctgatggaacggtgccaatgcccatgcccatgcccatgcctatgccatctgcaaatacgcctttctcatatccactgccaaagggaccatcagatttcaatggactgccaatggggacttatcaggcctttcccaatattcatccacctcagataccagcaactcccccatcgtatgaatctgtagatgacattaatgctgataagaatatctcttctgcacagattgttggtcctggacccaagccagaagcctctgcaaagcttccttccagacctgcagataactatgacaactttgtcctaccagagttgccatctgtgccagacacactaccaactgcatctgctggtgccagcacctcagcatctgaagacattgactttgatgatctttcccggaggtttgaagagctgaaaaagaaaacataggtctcttaaaccaggcaactttcacgttttgggagttgagactgagcaatttctccttgtaacaaagaatctccatgaaattctgtttcatctgttaaccgtcactcagcacaacactccctctgggctctcttcctgctcctccagattctgctgctttccagttctctgttgatcctgagactaacaattggagactgaggccagagcaactggctcctggcagctgtgcttgtccgtttcctgtcagagtgatcccaggtttcctcctggcccgtcccatggtccctccacaggagtgtgagaggatgggggaagcactgtgggaagaccaccaaagatggctggacagtgggagagagcacgttgtgaagcatcccagcctcgtgttgaggttccagacttagaaacagacccctctgtacagggggattgtggtgagtgagaatcaaggccaccttgtgtgttttctcactctcgaatgcaagtgggagagggaaaatgactcgggacgccattgtaacggttcctggaagctgggccctctcattggcatatacagtactcctcgctgcagggcactgtcccaccgggatccagttgcaaagtttgtcttgacagttgaaggcctcgcttagttgtactggattctcagggagccctctgtggccttttgctttgcgtgctgtttcccttgtaccagagggcggcaccgtggaaattctgttttccctgtagcatattgtgttggattgcattactggcagagaaaggacaaggtgccattcaagtcctagggtgggcttccagctgccttaatagaagtactcaagtcttttgggtagtgagctggaaagcctacaggaaaagaggggtacctgttttcatttgaaaactttgattcatggaacctttaaaactaatctcagaaaaatttttggtgcccatgcagctgtagttgttcactgctttcctggatggatgggactcttatgtcataacttctgttactcctttggcccatagctaaggtcatccttccccacaggggtggctttgggattggatgatacagcttttgcttctgtgtagtatacctgtacatacttgtttcaggcagcctttctttaatgttttcagttggtttgtattctgtagctcagtagctgctaataaagttaaagatcctgtgt

SEQ ID NO: 439073 - DNA, 3249 bp, Homo sapiens
tttctgtagcctaggctggagtgctgtgacgtgatcacggtttactgcagcagcgaccttctgggctcaagcgatcttcctgcctcagcctcccgagtagctgagaccacaagtgctcactgctgctcccctaatttttaacttttttttttttttttttgtagcgatgcggtttcactatggtgtccaggctggtctgcaactcccgggctcaagcgatcctcccgccccgcctctcaaagtgctgggaaggtcccttccaggcttaagcagcgataatggttttcaagttaaaaacaaaggtaaccaaggaaaaagttttctctgaataccgagataaattagggaaatcgccagagactgtggtgctgaggaaacactactgaattataccacacagaccggagcgatgctggtccaaagggcaaccggacggcttaaaagcggggcgggggaacgcttagagcccgtagagggacacggaggcgctgggtgaagagtcagggatacgcaggcttcgaaaccccctcggccgctccacccagggggaaagtccagcgaaaggcggcagcagatcttagggagcaactcccggcgtcagagaggcggtactggcagccggttatggaagaatccggaaccaaggcactgggcgcggtgaggccgtgggcgcagagtccgagaatcaacagctgtggctggcctccccgcgcccagagcgaaattaagggcatgcccccagcagctgactcagtcggcgtggcgcttcccccaacgtctgccgtgcccccgccgcgggaagtagtccccggccgcgccgactccaaaggaaaccgagggagggtgccccgagtcagcgcgtgggtcccggcagcggcgatcgcgcagccaatccctggaaaggagggcgtggctatatcggccccgtggatccctccgcccgcgcttgttgtgctgaggccgagggagtcgccattttggatggtgaaccctgaagtcggtgtctgctgcgttcacggcaggattcggttaggaggaacagcacagcatgctgggctctggatttaaagctgagcgcttaagagtgaatttgagattagtcataaatcgccttaaactattggagaaaaagaaaacggaactggcccagaaagcaaggaaggagattgctgactatctggctgctgggaaagatgaacgagctcggatccgtgtggagcacattatccgggaagactacctcgtggaggccatggagatcctggagctgtactgtgacctgctgctggctcggtttggccttatccagtctatgaaggaactagattctggtctggctgaatctgtgtctacattgatctgggctgctcctcgactccagtcagaagtggctgagttgaaaatagttgctgatcagctctgtgccaagtatagcaaggaatatggcaagctatgtaggaccaaccagattggaactgtgaatgacaggctaatgcacaagctgagtgtggaagccccacccaaaatcctggtggagagatacctgattgaaattgcaaagaattacaacgtaccctatgaacctgactctgtggtcatggcagaagctcctcctggggtagagacagatcttattgatgttggattcacagatgatgtgaagaaaggaggccctggaagaggagggagtggtggcttcacagcaccagttggtggacctgatggaacggtgccaatgcccatgcccatgcccatgcctatgccatctgcaaatacgcctttctcatatccactgccaaagggaccagtagatgacattaatgctgataagaatatctcttctgcacagattgttggtcctggacccaagccagaagcctctgcaaagcttccttccagacctgcagataactatgacaactttgtcctaccagagttgccatctgtgccagacacactaccaactgcatctgctggtgccagcacctcagcatctgaagacattgactttgatgatctttcccggaggtttgaagagctgaaaaagaaaacataggtctcttaaaccaggcaactttcacgttttgggagttgagactgagcaatttctccttgtaacaaagaatctccatgaaattctgtttcatctgttaaccgtcactcagcacaacactccctctgggctctcttcctgctcctccagattctgctgctttccagttctctgttgatcctgagactaacaattggagactgaggccagagcaactggctcctggcagctgtgcttgtccgtttcctgtcagagtgatcccaggtttcctcctggcccgtcccatggtccctccacaggagtgtgagaggatgggggaagcactgtgggaagaccaccaaagatggctggacagtgggagagagcacgttgtgaagcatcccagcctcgtgttgaggttccagacttagaaacagacccctctgtacagggggattgtggtgagtgagaatcaaggccaccttgtgtgttttctcactctcgaatgcaagtgggagagggaaaatgactcgggacgccattgtaacggttcctggaagctgggccctctcattggcatatacagtactcctcgctgcagggcactgtcccaccgggatccagttgcaaagtttgtcttgacagttgaaggcctcgcttagttgtactggattctcagggagccctctgtggccttttgctttgcgtgctgtttcccttgtaccagagggcggcaccgtggaaattctgttttccctgtagcatattgtgttggattgcattactggcagagaaaggacaaggtgccattcaagtcctagggtgggcttccagctgccttaatagaagtactcaagtcttttgggtagtgagctggaaagcctacaggaaaagaggggtacctgttttcatttgaaaactttgattcatggaacctttaaaactaatctcagaaaaatttttggtgcccatgcagctgtagttgttcactgctttcctggatggatgggactcttatgtcataacttctgttactcctttggcccatagctaaggtcatccttccccacaggggtggctttgggattggatgatacagcttttgcttctgtgtagtatacctgtacatacttgtttcaggcagcctttctttaatgttttcagttggtttgtattctgtagctcagtagctgctaataaagttaaagatcctgtgt

SEQ ID NO: 439074 - DNA, 2400 bp, Homo sapiens
  misc_feature (30)..(30): n is a, c, g, or t
tgattattgcatagtacgatggctggtgtnaataggcgaggtgaaaaccctgaagtcggtgtctgctgcgttcacggcaggattcggttaggaggaacagcacagcatgctgggctctggatttaaagctgagcgcttaagagtgaatttgagattagtcataaatcgccttaaactattggagaaaaagaaaacggaactggcccagaaagcaaggaaggagattgctgactatctggctgctgggaaagatgaacgagctcggatccgtgtggagcacattatccgggaagactacctcgtggaggccatggagatcctggagctgtactgtgacctgctgctggctcggtttggccttatccagtctatgaaggaactagattctggtctggctgaatctgtgtctacattgatctgggctgctcctcgactccagtcagaagtggctgagttgaaaatagttgctgatcagctctgtgccaagtatagcaaggaatatggcaagctatgtaggaccaaccagattggaactgtgaatgacaggctaatgcacaagctgagtgtggaagccccacccaaaatcctggtggagagatacctgattgaaattgcaaagaattacaacgtaccctatgaacctgactctgtggtcatggcagaagctcctcctggggtagagacagatcttattgatgttggattcacagatgatgtgaagaaaggaggccctggaagaggagggagtggtggcttcacagcaccagttggtggacctgatggaacggtgccaatgcccatgcccatgcccatgcctatgccatctgcaaatacgcctttctcatatccactgccaaagggaccatcagatttcaatggactgccaatggggacttatcaggcctttcccaatattcatccacctcagataccagcaactcccccatcgtatgaatctgtagatgacattaatgctgataagaatatctcttctgcacagattgttggtcctggacccaagccagaagcctctgcaaagcttccttccagacctgcagataactatgacaactttgtcctaccagagttgccatctgtgccagacacactaccaactgcatctgctggtgccagcacctcagcatctgaagacattgactttgatgatctttcccggaggtttgaagagctgaaaaagaaaacataggtctcttaaaccaggcaactttcacgttttgggagttgagactgagcaatttctccttgtaacaaagaatctccatgaaattctgtttcatctgttaaccgtcactcagcacaacactccctctgggctctcttcctgctcctccagattctgctgctttccagttctctgttgatcctgagactaacaattggagactgaggccagagcaactggctcctggcagctgtgcttgtccgtttcctgtcagagtgatcccaggtttcctcctggcccgtcccatggtccctccacaggagtgtgagaggatgggggaagcactgtgggaagaccaccaaagatggctggacagtgggagagagcacgttgtgaagcatcccagcctcgtgttgaggttccagacttagaaacagacccctctgtacagggggattgtggtgagtgagaatcaaggccaccttgtgtgttttctcactctcgaatgcaagtgggagagggaaaatgactcgggacgccattgtaacggttcctggaagctgggccctctcattggcatatacagtactcctcgctgcagggcactgtcccaccgggatccagttgcaaagtttgtcttgacagttgaaggcctcgcttagttgtactggattctcagggagccctctgtggccttttgctttgcgtgctgtttcccttgtaccagagggcggcaccgtggaaattctgttttccctgtagcatattgtgttggattgcattactggcagagaaaggacaaggtgccattcaagtcctagggtgggcttccagctgccttaatagaagtactcaagtcttttgggtagtgagctggaaagcctacaggaaaagaggggtacctgttttcatttgaaaactttgattcatggaacctttaaaactaatctcagaaaaatttttggtgcccatgcagctgtagttgttcactgctttcctggatggatgggactcttatgtcataacttctgttactcctttggcccatagctaaggtcatccttccccacaggggtggctttgggattggatgatacagcttttgcttctgtgtagtatacctgtacatacttgtttcaggcagcctttctttaatgttttcagttggtttgtattctgtagctcagtagctgctaataaagttaaagatcctgtgt

SEQ ID NO: 439075 - DNA, 2385 bp, Homo sapiens
gggctggtactggtcccgggggtgtagggataccctgaagtcggtgtctgctgcgttcacggcaggattcggttaggaggaacagcacagcatgctgggctctggatttaaagctgagcgcttaagagtgaatttgagattagtcataaatcgccttaaactattggagaaaaagaaaacggaactggcccagaaagcaaggaaggagattgctgactatctggctgctgggaaagatgaacgagctcggatccgtgtggagcacattatccgggaagactacctcgtggaggccatggagatcctggagctgtactgtgacctgctgctggctcggtttggccttatccagtctatgaaggaactagattctggtctggctgaatctgtgtctacattgatctgggctgctcctcgactccagtcagaagtggctgagttgaaaatagttgctgatcagctctgtgccaagtatagcaaggaatatggcaagctatgtaggaccaaccagattggaactgtgaatgacaggctaatgcacaagctgagtgtggaagccccacccaaaatcctggtggagagatacctgattgaaattgcaaagaattacaacgtaccctatgaacctgactctgtggtcatggcagaagctcctcctggggtagagacagatcttattgatgttggattcacagatgatgtgaagaaaggaggccctggaagaggagggagtggtggcttcacagcaccagttggtggacctgatggaacggtgccaatgcccatgcccatgcccatgcctatgccatctgcaaatacgcctttctcatatccactgccaaagggaccatcagatttcaatggactgccaatggggacttatcaggcctttcccaatattcatccacctcagataccagcaactcccccatcgtatgaatctgtagatgacattaatgctgataagaatatctcttctgcacagattgttggtcctggacccaagccagaagcctctgcaaagcttccttccagacctgcagataactatgacaactttgtcctaccagagttgccatctgtgccagacacactaccaactgcatctgctggtgccagcacctcagcatctgaagacattgactttgatgatctttcccggaggtttgaagagctgaaaaagaaaacataggtctcttaaaccaggcaactttcacgttttgggagttgagactgagcaatttctccttgtaacaaagaatctccatgaaattctgtttcatctgttaaccgtcactcagcacaacactccctctgggctctcttcctgctcctccagattctgctgctttccagttctctgttgatcctgagactaacaattggagactgaggccagagcaactggctcctggcagctgtgcttgtccgtttcctgtcagagtgatcccaggtttcctcctggcccgtcccatggtccctccacaggagtgtgagaggatgggggaagcactgtgggaagaccaccaaagatggctggacagtgggagagagcacgttgtgaagcatcccagcctcgtgttgaggttccagacttagaaacagacccctctgtacagggggattgtggtgagtgagaatcaaggccaccttgtgtgttttctcactctcgaatgcaagtgggagagggaaaatgactcgggacgccattgtaacggttcctggaagctgggccctctcattggcatatacagtactcctcgctgcagggcactgtcccaccgggatccagttgcaaagtttgtcttgacagttgaaggcctcgcttagttgtactggattctcagggagccctctgtggccttttgctttgcgtgctgtttcccttgtaccagagggcggcaccgtggaaattctgttttccctgtagcatattgtgttggattgcattactggcagagaaaggacaaggtgccattcaagtcctagggtgggcttccagctgccttaatagaagtactcaagtcttttgggtagtgagctggaaagcctacaggaaaagaggggtacctgttttcatttgaaaactttgattcatggaacctttaaaactaatctcagaaaaatttttggtgcccatgcagctgtagttgttcactgctttcctggatggatgggactcttatgtcataacttctgttactcctttggcccatagctaaggtcatccttccccacaggggtggctttgggattggatgatacagcttttgcttctgtgtagtatacctgtacatacttgtttcaggcagcctttctttaatgttttcagttggtttgtattctgtagctcagtagctgctaataaagttaaagatcctgtgt

SEQ ID NO: 439076 - DNA, 3431 bp, Homo sapiens
tttctgtagcctaggctggagtgctgtgacgtgatcacggtttactgcagcagcgaccttctgggctcaagcgatcttcctgcctcagcctcccgagtagctgagaccacaagtgctcactgctgctcccctaatttttaacttttttttttttttttttgtagcgatgcggtttcactatggtgtccaggctggtctgcaactcccgggctcaagcgatcctcccgccccgcctctcaaagtgctgggaaggtcccttccaggcttaagcagcgataatggttttcaagttaaaaacaaaggtaaccaaggaaaaagttttctctgaataccgagataaattagggaaatcgccagagactgtggtgctgaggaaacactactgaattataccacacagaccggagcgatgctggtccaaagggcaaccggacggcttaaaagcggggcgggggaacgcttagagcccgtagagggacacggaggcgctgggtgaagagtcagggatacgcaggcttcgaaaccccctcggccgctccacccagggggaaagtccagcgaaaggcggcagcagatcttagggagcaactcccggcgtcagagaggcggtactggcagccggttatggaagaatccggaaccaaggcactgggcgcggtgaggccgtgggcgcagagtccgagaatcaacagctgtggctggcctccccgcgcccagagcgaaattaagggcatgcccccagcagctgactcagtcggcgtggcgcttcccccaacgtctgccgtgcccccgccgcgggaagtagtccccggccgcgccgactccaaaggaaaccgagggagggtgccccgagtcagcgcgtgggtcccggcagcggcgatcgcgcagccaatccctggaaaggagggcgtggctatatcggccccgtggatccctccgcccgcgcttgttgtgctgaggccgagggagtcgccattttggatggtgaaccctgaagtcggtgtctgctgcgttcacggcaggattcggttaggaggaacagcacagcatgctgggctctggatttaaagctgagcgcttaagagtgaatttgagattagtcataaatcgccttaaactattggagaaaaagaaaacggaactggcccagaaagcaaggaaggagattgctgactatctggctgctgggaaagatgaacgagctcggatccgtgtggagcacattatccgggaagactacctcgtggaggccatggagatcctggagctgtactgtgacctgctgctggctcggtttggccttatccagtctatgaaggaactagattctggtctggctgaatctgtgtctacattgatctgggctgctcctcgactccagtcagaagtggctgagttgaaaatagttgctgatcagctctgtgccaagtatagcaaggaatatggcaagctatgtaggaccaaccagattggaactgtgaatgacaggctaatgcacaagctgagtgtggaagccccacccaaaatcctggtggagagatacctgattgaaattgcaaagaattacaacgtaccctatgaacctgactctgtggtcatggcagaagctcctcctggggtagagacagatcttattgatgttggattcacagatgatgtgaagaaaggaggccctggaagaggagggagtggtggcttcacagcaccagttggtggacctgatggaacggtgccaatgcccatgcccatgcccatgcctatgccatctgcaaatacgcctttctcatatccactgccaaagggaccatcagatttcaatggactgccaatggggacttatcaggcctttcccaatattcatccacctcagataccagcaactcccccatcgtatgaatctgtagatgacattaatgctgataagaatatctcttctgcacagattgttggtcctggacccaagccagaagcctctgcaaagcttccttccagacctgcagataactatgacaactttgtcctaccagagttgccatctgtgccagacacactaccaactgcatctgctggtgccagcacctcagcatctgaagacattgactttgatgatctttcccggaggtttgaagagctgaaaaagaaaacataggtctcttaaaccaggcaactttcacgttttgggagttgagactgagcaatttctccttgtaacaaagaatctccatgaaattctgtttcatctgttaaccgtcactcagcacaacactccctctgggctctcttcctgctcctccagattctgctgctttccagttctctgttgatcctgagactaacaattggagactgaggccagagcaactggctcctggcagctgtgcttgtccgtttcctgtcagagtgatcccaggtttcctcctggcccgtcccatggtccctccacaggagtgtgagaggatgggggaagcactgtgggaagaccaccaaagatggctggacagtgggagagagcacgttgtgaagcatcccagcctcgtgttgaggttccagacttagaaacagacccctctgtacagggggattgtggtgagtgagaatcaaggccaccttgtgtgttttctcactctcgaatgcaagtgggagagggaaaatgactcgggacgccattgtaacggttcctggaagctgggccctctcattggcatatacagtactcctcgctgcagggcactgtcccaccgggatccagttgcaaagtttgtcttgacagttgaaggcctcgcttagttgtactggattctcagggagccctctgtggccttttgctttgcgtgctgtttcccttgtaccagagggcggcaccgtggaaattctgttttccctgtagcatattgtgttggattgcattactggcagagaaaggacaaggtgccattcaagtcctagggtgggcttccagctgccttaatagaagtactcaagtcttttgggtagtgagctggaaagcctacaggaaaagaggggtacctgttttcatttgaaaactttgattcatggaacctttaaaactaatctcagaaaaatttttggtgcccatgcagctgtagttgttcactgctttcctggatggatgggactcttatgtcataacttctgttactcctttggcccatagctaaggtcatccttccccacaggggtggctttgggattggatgatacagcttttgcttctgtgtagtatacctgtacatacttgtttcaggcagcctttctttaatgttttcagttggtttgtattctgtagctcagtagctgctaataaagttaaagatcctgtgtgtggtcttcgtgggcgtggggcgtcgtgtgggcggggtggggtggtggtgggcgggggggtggcggtggcggtggtggtggggtgggga

SEQ ID NO: 439077 - DNA, 3362 bp, Homo sapiens
tttctgtagcctaggctggagtgctgtgacgtgatcacggtttactgcagcagcgaccttctgggctcaagcgatcttcctgcctcagcctcccgagtagctgagaccacaagtgctcactgctgctcccctaatttttaacttttttttttttttttttgtagcgatgcggtttcactatggtgtccaggctggtctgcaactcccgggctcaagcgatcctcccgccccgcctctcaaagtgctgggaaggtcccttccaggcttaagcagcgataatggttttcaagttaaaaacaaaggtaaccaaggaaaaagttttctctgaataccgagataaattagggaaatcgccagagactgtggtgctgaggaaacactactgaattataccacacagaccggagcgatgctggtccaaagggcaaccggacggcttaaaagcggggcgggggaacgcttagagcccgtagagggacacggaggcgctgggtgaagagtcagggatacgcaggcttcgaaaccccctcggccgctccacccagggggaaagtccagcgaaaggcggcagcagatcttagggagcaactcccggcgtcagagaggcggtactggcagccggttatggaagaatccggaaccaaggcactgggcgcggtgaggccgtgggcgcagagtccgagaatcaacagctgtggctggcctccccgcgcccagagcgaaattaagggcatgcccccagcagctgactcagtcggcgtggcgcttcccccaacgtctgccgtgcccccgccgcgggaagtagtccccggccgcgccgactccaaaggaaaccgagggagggtgccccgagtcagcgcgtgggtcccggcagcggcgatcgcgcagccaatccctggaaaggagggcgtggctatatcggccccgtggatccctccgcccgcgcttgttgtgctgaggccgagggagtcgccattttggatggtgaaccctgaagtcggtgtctgctgcgttcacggcaggattcggttaggaggaacagcacagcatgctgggctctggatttaaagctgagcgcttaagagtgaatttgagattagtcataaatcgccttaaactattggagaaaaagaaaacggaactggcccagaaagcaaggaaggagattgctgactatctggctgctgggaaagatgaacgagctcggatccgtgtggagcacattatccgggaagactacctcgtggaggccatggagatcctggagctgtactgtgacctgctgctggctcggtttggccttatccagtctatgaaggaactagattctggtctggctgaatctgtgtctacattgatctgggctgctcctcgactccagtcagaagtggctgagttgaaaatagttgctgatcagctctgtgccaagtatagcaaggaatatggcaagctatgtaggaccaaccagattggaactgtgaatgacaggctaatgcacaagctgagtgtggaagccccacccaaaatcctggtggagagatacctgattgaaattgcaaagaattacaacgtaccctatgaacctgactctgtggtcatggcagaagctcctcctggggtagagacagatcttattgatgttggattcacagatgatgtgaagaaaggaggccctggaagaggagggagtggtggcttcacagcaccagttggtggacctgatggaacggtgccaatgcccatgcccatgcccatgcctatgccatctgcaaatacgcctttctcatatccactgccaaagggaccatcagatttcaatggactgccaatggggacttatcaggcctttcccaatattcatccacctcagataccagcaactcccccatcgtatgaatctgtagatgacattaatgctgataagaatatctcttctgcacagattgttggtcctggacccaagccagaagcctctgcaaagcttccttccagacctgcagataactatgacaactttgtcctaccagagttgccatctgtgccagacacactaccaactgcatctgctggtgccagcacctcagcatctgaagacattgactttgatgatctttcccggaggtttgaagagctgaaaaagaaaacataggtctcttaaaccaggcaactttcacgttttgggagttgagactgagcaatttctccttgtaacaaagaatctccatgaaattctgtttcatctgttaaccgtcactcagcacaacactccctctgggctctcttcctgctcctccagattctgctgctttccagttctctgttgatcctgagactaacaattggagactgaggccagagcaactggctcctggcagctgtgcttgtccgtttcctgtcagagtgatcccaggtttcctcctggcccgtcccatggtccctccacaggagtgtgagaggatgggggaagcactgtgggaagaccaccaaagatggctggacagtgggagagagcacgttgtgaagcatcccagcctcgtgttgaggttccagacttagaaacagacccctctgtacagggggattgtggtgagtgagaatcaaggccaccttgtgtgttttctcactctcgaatgcaagtgggagagggaaaatgactcgggacgccattgtaacggttcctggaagctgggccctctcattggcatatacagtactcctcgctgcagggcactgtcccaccgggatccagttgcaaagtttgtcttgacagttgaaggcctcgcttagttgtactggattctcagggagccctctgtggccttttgctttgcgtgctgtttcccttgtaccagagggcggcaccgtggaaattctgttttccctgtagcatattgtgttggattgcattactggcagagaaaggacaaggtgccattcaagtcctagggtgggcttccagctgccttaatagaagtactcaagtcttttgggtagtgagctggaaagcctacaggaaaagaggggtacctgttttcatttgaaaactttgattcatggaacctttaaaactaatctcagaaaaatttttggtgcccatgcagctgtagttgttcactgctttcctggatggatgggactcttatgtcataacttctgttactcctttggcccatagctaaggtcatccttccccacaggggtggctttgggattggatgatacagcttttgcttctgtgtagtatacctgtacatacttgtttcaggcagcctttctttaatgttttcagttggtttgtattctgtagctcagtagctgctaataaagttaaagatcctgtgtaaaattagaaaaaaaaaaaa

SEQ ID NO: 439078 - DNA, 3366 bp, Homo sapiens
tttctgtagcctaggctggagtgctgtgacgtgatcacggtttactgcagcagcgaccttctgggctcaagcgatcttcctgcctcagcctcccgagtagctgagaccacaagtgctcactgctgctcccctaatttttaacttttttttttttttttttgtagcgatgcggtttcactatggtgtccaggctggtctgcaactcccgggctcaagcgatcctcccgccccgcctctcaaagtgctgggaaggtcccttccaggcttaagcagcgataatggttttcaagttaaaaacaaaggtaaccaaggaaaaagttttctctgaataccgagataaattagggaaatcgccagagactgtggtgctgaggaaacactactgaattataccacacagaccggagcgatgctggtccaaagggcaaccggacggcttaaaagcggggcgggggaacgcttagagcccgtagagggacacggaggcgctgggtgaagagtcagggatacgcaggcttcgaaaccccctcggccgctccacccagggggaaagtccagcgaaaggcggcagcagatcttagggagcaactcccggcgtcagagaggcggtactggcagccggttatggaagaatccggaaccaaggcactgggcgcggtgaggccgtgggcgcagagtccgagaatcaacagctgtggctggcctccccgcgcccagagcgaaattaagggcatgcccccagcagctgactcagtcggcgtggcgcttcccccaacgtctgccgtgcccccgccgcgggaagtagtccccggccgcgccgactccaaaggaaaccgagggagggtgccccgagtcagcgcgtgggtcccggcagcggcgatcgcgcagccaatccctggaaaggagggcgtggctatatcggccccgtggatccctccgcccgcgcttgttgtgctgaggccgagggagtcgccattttggatggtgaaccctgaagtcggtgtctgctgcgttcacggcaggattcggttagtcattgtgcttcttctgtttctaggaggaacagcacagcatgctgggctctggatttaaagctgagcgcttaagagtgaatttgagattagtcataaatcgccttaaactattggagaaaaagaaaacggaactggcccagaaagcaaggaaggagattgctgactatctggctgctgggaaagatgaacgagctcggatccgtgtggagcacattatccgggaagactacctcgtggaggccatggagatcctggagctgtactgtgacctgctgctggctcggtttggccttatccagtctatgaaggaactagattctggtctggctgaatctgtgtctacattgatctgggctgctcctcgactccagtcagaagtggctgagttgaaaatagttgctgatcagctctgtgccaagtatagcaaggaatatggcaagctatgtaggaccaaccagattggaactgtgaatgacaggctaatgcacaagctgagtgtggaagccccacccaaaatcctggtggagagatacctgattgaaattgcaaagaattacaacgtaccctatgaacctgactctgtggtcatggcagaagctcctcctggggtagagacagatcttattgatgttggattcacagatgatgtgaagaaaggaggccctggaagaggagggagtggtggcttcacagcaccagttggtggacctgatggaacggtgccaatgcccatgcccatgcccatgcctatgccatctgcaaatacgcctttctcatatccactgccaaagggaccatcagatttcaatggactgccaatggggacttatcaggcctttcccaatattcatccacctcagataccagcaactcccccatcgtatgaatctgtagatgacattaatgctgataagaatatctcttctgcacagattgttggtcctggacccaagccagaagcctctgcaaagcttccttccagacctgcagataactatgacaactttgtcctaccagagttgccatctgtgccagacacactaccaactgcatctgctggtgccagcacctcagcatctgaagacattgactttgatgatctttcccggaggtttgaagagctgaaaaagaaaacataggtctcttaaaccaggcaactttcacgttttgggagttgagactgagcaatttctccttgtaacaaagaatctccatgaaattctgtttcatctgttaaccgtcactcagcacaacactccctctgggctctcttcctgctcctccagattctgctgctttccagttctctgttgatcctgagactaacaattggagactgaggccagagcaactggctcctggcagctgtgcttgtccgtttcctgtcagagtgatcccaggtttcctcctggcccgtcccatggtccctccacaggagtgtgagaggatgggggaagcactgtgggaagaccaccaaagatggctggacagtgggagagagcacgttgtgaagcatcccagcctcgtgttgaggttccagacttagaaacagacccctctgtacagggggattgtggtgagtgagaatcaaggccaccttgtgtgttttctcactctcgaatgcaagtgggagagggaaaatgactcgggacgccattgtaacggttcctggaagctgggccctctcattggcatatacagtactcctcgctgcagggcactgtcccaccgggatccagttgcaaagtttgtcttgacagttgaaggcctcgcttagttgtactggattctcagggagccctctgtggccttttgctttgcgtgctgtttcccttgtaccagagggcggcaccgtggaaattctgttttccctgtagcatattgtgttggattgcattactggcagagaaaggacaaggtgccattcaagtcctagggtgggcttccagctgccttaatagaagtactcaagtcttttgggtagtgagctggaaagcctacaggaaaagaggggtacctgttttcatttgaaaactttgattcatggaacctttaaaactaatctcagaaaaatttttggtgcccatgcagctgtagttgttcactgctttcctggatggatgggactcttatgtcataacttctgttactcctttggcccatagctaaggtcatccttccccacaggggtggctttgggattggatgatacagcttttgcttctgtgtagtatacctgtacatacttgtttcaggcagcctttctttaatgttttcagttggtttgtattctgtagctcagtagctgctaataaagttaaagatcctgtgt

SEQ ID NO: 439079 - DNA, 2474 bp, Homo sapiens
aggctggtctcgaattaccgacttcagcgatgcggtttcactatggtgtccaggctggtctgcaactcccgggctcaagcgatcctcccgccccgcctctcaaagtgctgggaaggtcccttccaggcttaagcagcgataatggttttcaagttaaaaacaaaggaggaacagcacagcatgctgggctctggatttaaagctgagcgcttaagagtgaatttgagattagtcataaatcgccttaaactattggagaaaaagaaaacggaactggcccagaaagcaaggaaggagattgctgactatctggctgctgggaaagatgaacgagctcggatccgtgtggagcacattatccgggaagactacctcgtggaggccatggagatcctggagctgtactgtgacctgctgctggctcggtttggccttatccagtctatgaaggaactagattctggtctggctgaatctgtgtctacattgatctgggctgctcctcgactccagtcagaagtggctgagttgaaaatagttgctgatcagctctgtgccaagtatagcaaggaatatggcaagctatgtaggaccaaccagattggaactgtgaatgacaggctaatgcacaagctgagtgtggaagccccacccaaaatcctggtggagagatacctgattgaaattgcaaagaattacaacgtaccctatgaacctgactctgtggtcatggcagaagctcctcctggggtagagacagatcttattgatgttggattcacagatgatgtgaagaaaggaggccctggaagaggagggagtggtggcttcacagcaccagttggtggacctgatggaacggtgccaatgcccatgcccatgcccatgcctatgccatctgcaaatacgcctttctcatatccactgccaaagggaccatcagatttcaatggactgccaatggggacttatcaggcctttcccaatattcatccacctcagataccagcaactcccccatcgtatgaatctgtagatgacattaatgctgataagaatatctcttctgcacagattgttggtcctggacccaagccagaagcctctgcaaagcttccttccagacctgcagataactatgacaactttgtcctaccagagttgccatctgtgccagacacactaccaactgcatctgctggtgccagcacctcagcatctgaagacattgactttgatgatctttcccggaggtttgaagagctgaaaaagaaaacataggtctcttaaaccaggcaactttcacgttttgggagttgagactgagcaatttctccttgtaacaaagaatctccatgaaattctgtttcatctgttaaccgtcactcagcacaacactccctctgggctctcttcctgctcctccagattctgctgctttccagttctctgttgatcctgagactaacaattggagactgaggccagagcaactggctcctggcagctgtgcttgtccgtttcctgtcagagtgatcccaggtttcctcctggcccgtcccatggtccctccacaggagtgtgagaggatgggggaagcactgtgggaagaccaccaaagatggctggacagtgggagagagcacgttgtgaagcatcccagcctcgtgttgaggttccagacttagaaacagacccctctgtacagggggattgtggtgagtgagaatcaaggccaccttgtgtgttttctcactctcgaatgcaagtgggagagggaaaatgactcgggacgccattgtaacggttcctggaagctgggccctctcattggcatatacagtactcctcgctgcagggcactgtcccaccgggatccagttgcaaagtttgtcttgacagttgaaggcctcgcttagttgtactggattctcagggagccctctgtggccttttgctttgcgtgctgtttcccttgtaccagagggcggcaccgtggaaattctgttttccctgtagcatattgtgttggattgcattactggcagagaaaggacaaggtgccattcaagtcctagggtgggcttccagctgccttaatagaagtactcaagtcttttgggtagtgagctggaaagcctacaggaaaagaggggtacctgttttcatttgaaaactttgattcatggaacctttaaaactaatctcagaaaaatttttggtgcccatgcagctgtagttgttcactgctttcctggatggatgggactcttatgtcataacttctgttactcctttggcccatagctaaggtcatccttccccacaggggtggctttgggattggatgatacagcttttgcttctgtgtagtatacctgtacatacttgtttcaggcagcctttctttaatgttttcagttggtttgtattctgtagctcagtagctgctaataaagttaaagatcctgtgt

SEQ ID NO: 439080 - DNA, 2794 bp, Homo sapiens
tttctgtagcctaggctggagtgctgtgacgtgatcacggtttactgcagcagcgaccttctgggctcaagcgatcttcctgcctcagcctcccgagtagctgagaccacaagtgctcactgctgctcccctaatttttaacttttttttttttttttttgtagcgatgcggtttcactatggtgtccaggctggtctgcaactcccgggctcaagcgatcctcccgccccgcctctcaaagtgctgggaaggtcccttccaggcttaagcagcgataatggttttcaagttaaaaacaaaggtaaccaaggaaaaagttttctctgaataccgagataaattagggaaatcgccagagactgtggtgctgaggaaacactactgaattataccacacagaccggagcgatgctggtccaaagggcaaccggacggcttaaaagcggggcgggggaacgcttagagcccgtagagggacacggaggcgctgggtgaagagtcagggatacgcaggcttcgaaaccccctcggccgctccacccagggggaaagtccagcgaaaggcggcagcagatcttagggagcaactcccggcgtcagagaggcggtactggcagccggttatggaagaatccggaaccaaggcactgggcgcggtgaggccgtgggcgcagagtccgagaatcaacagctgtggctggcctccccgcgcccagagcgaaattaagggcatgcccccagcagctgactcagtcggcgtggcgcttcccccaacgtctgccgtgcccccgccgcgggaagtagtccccggccgcgccgactccaaaggaaaccgagggagggtgccccgagtcagcgcgtgggtcccggcagcggcgatcgcgcagccaatccctggaaaggagggcgtggctatatcggccccgtggatccctccgcccgcgcttgttgtgctgaggccgagggagtcgccattttggatggtgaaccctgaagtcggtgtctgctgcgttcacggcaggattcggttaggaggaacagcacagcatgctgggctctggatttaaagctgagcgcttaagagtgaatttgagattagtcataaatcgccttaaactattggagaaaaagaaaacggaactggcccagaaagcaaggaaggagattgctgactatctggctgctgggaaagatgaacgagctcggatccgtgtggagcacattatccgggaagactacctcgtggaggccatggagatcctggagctgtactgtgacctgctgctggctcggtttggccttatccagtctatgaaggaactagattctggtctggctgaatctgtgtctacattgatctgggctgctcctcgactccagtcagaagtggctgagttgaaaatagttgctgatcagctctgtgccaagtatagcaaggaatatggcaagctatgtaggaccaaccagattggaactgtgaatgacaggctaatgcacaagctgagtgtggaagccccacccaaaatcctggtggagagatacctgattgaaattgcaaagaattacaacgtaccctatgaacctgactctgtggtcatggcagaagctcctcctggggtagagacagatcttattgatgttggattcacagatgatgtgaagaaaggaggccctggaagaggagggagtggtggcttcacagcaccagttggtggacctgatggaacggtgccaatgcccatgcccatgcccatgcctatgccatctgcaaatacgcctttctcatatccactgccaaagggaccatcagatttcaatggactgccaatggggacttatcaggcctttcccaatattcatccacctcagataccagcaactcccccatcgtatgaatctgtagatgacattaatgctgataagaatatctcttctgcacagattgttggtcctggacccaagccagaagcctctgcaaagcttccttccagacctgcagataactatgacaactttgtcctaccagagttgccatctgtgccagacacactaccaactgcatctgctggtgccagcacctcagcatctgaagacattgactttgatgatctttcccggaggtttgaagagctgaaaaagaaaacataggtctcttaaaccaggcaactttcacgttttgggagttgagactgagcaatttctccttgtaacaaagaatctccatgaaattctgtttcatctgttaaccgtcactcagcacaacactccctctgggctctcttcctgctcctccagattctgctgctttccagttctctgttgatcctgagactaacaattggagactgaggccagagcaactggctcctggcagctgtgcttgtccgtttcctgtcagagtgatcccaggtttcctcctggcccgtcccatggtccctccacaggagtgtgagaggatgggggaagcactgtgggaagaccaccaaagatggctggacagtgggagagagcacgttgtgaagcatcccagcctcgtgttgaggttccagacttagaaacagacccctctgtacagggggattgtggtgagtgagaatcaaggccaccttgtgtgttttctcactctcgaatgcaagtgggagagggaaaatgactcgggacgccattgtaacggttcctggaagctgtgcttgtccgtttcctgtcagagttgatcccaggtttcctcctggacctgtcccatggtccctccacaggagtgtgagcacggaggaggcggaattcggggtaccg

SEQ ID NO: 439081 - DNA, 3275 bp, Homo sapiens
  misc_feature (1501)..(1501): n is a, c, g, or t
  misc_feature (1508)..(1508): n is a, c, g, or t
  misc_feature (1512)..(1512): n is a, c, g, or t
  misc_feature (1533)..(1533): n is a, c, g, or t
tttctgtagcctaggctggagtgctgtgacgtgatcacggtttactgcagcagcgaccttctgggctcaagcgatcttcctgcctcagcctcccgagtagctgagaccacaagtgctcactgctgctcccctaatttttaacttttttttttttttttttgtagcgatgcggtttcactatggtgtccaggctggtctgcaactcccgggctcaagcgatcctcccgccccgcctctcaaagtgctgggaaggtcccttccaggcttaagcagcgataatggttttcaagttaaaaacaaaggtaaccaaggaaaaagttttctctgaataccgagataaattagggaaatcgccagagactgtggtgctgaggaaacactactgaattataccacacagaccggagcgatgctggtccaaagggcaaccggacggcttaaaagcggggcgggggaacgcttagagcccgtagagggacacggaggcgctgggtgaagagtcagggatacgcaggcttcgaaaccccctcggccgctccacccagggggaaagtccagcgaaaggcggcagcagatcttagggagcaactcccggcgtcagagaggcggtactggcagccggttatggaagaatccggaaccaaggcactgggcgcggtgaggccgtgggcgcagagtccgagaatcaacagctgtggctggcctccccgcgcccagagcgaaattaagggcatgcccccagcagctgactcagtcggcgtggcgcttcccccaacgtctgccgtgcccccgccgcgggaagtagtccccggccgcgccgactccaaaggaaaccgagggagggtgccccgagtcagcgcgtgggtcccggcagcggcgatcgcgcagccaatccctggaaaggagggcgtggctatatcggccccgtggatccctccgcccgcgcttgttgtgctgaggccgagggagtcgccattttggatggtgaaccctgaagtcggtgtctgctgcgttcacggcaggattcggttaggaggaacagcacagcatgctgggctctggatttaaagctgagcgcttaagagtgaatttgagattagtcataaatcgccttaaactattggagaaaaagaaaacggaactggcccagaaagcaaggaaggagattgctgactatctggctgctgggaaagatgaacgagctcggatccgtgtggagcacattatccgggaagactacctcgtggaggccatggagatcctggagctgtactgtgacctgctgctggctcggtttggccttatccagtctatgaaggaactagattctggtctggctgaatctgtgtctacattgatctgggctgctcctcgactccagtcagaagtggctgagttgaaaatagttgctgatcagctctgtgccaagtatagcaaggaatatggcaagctatgtaggaccaaccagattggaactgtgaatgacaggagctgagtgtgnaagcccnaccnttgcctgactctgtggtcatngcagaagctcctcctggggtagagacagatcttattgatgttggattcacagatgatgtgaagaaaggaggccctggaagaggagggagtggtggcttcacagcaccagttggtggacctgatggaacggtgccaatgcccatgcccatgcccatgcctatgccatctgcaaatacgcctttctcatatccactgccaaagggaccatcagatttcaatggactgccaatggggacttatcaggcctttcccaatattcatccacctcagataccagcaactcccccatcgtatgaatctgtagatgacattaatgctgataagaatatctcttctgcacagattgttggtcctggacccaagccagaagcctctgcaaagcttccttccagacctgcagataactatgacaactttgtcctaccagagttgccatctgtgccagacacactaccaactgcatctgctggtgccagcacctcagcatctgaagacattgactttgatgatctttcccggaggtttgaagagctgaaaaagaaaacataggtctcttaaaccaggcaactttcacgttttgggagttgagactgagcaatttctccttgtaacaaagaatctccatgaaattctgtttcatctgttaaccgtcactcagcacaacactccctctgggctctcttcctgctcctccagattctgctgctttccagttctctgttgatcctgagactaacaattggagactgaggccagagcaactggctcctggcagctgtgcttgtccgtttcctgtcagagtgatcccaggtttcctcctggcccgtcccatggtccctccacaggagtgtgagaggatgggggaagcactgtgggaagaccaccaaagatggctggacagtgggagagagcacgttgtgaagcatcccagcctcgtgttgaggttccagacttagaaacagacccctctgtacagggggattgtggtgagtgagaatcaaggccaccttgtgtgttttctcactctcgaatgcaagtgggagagggaaaatgactcgggacgccattgtaacggttcctggaagctgggccctctcattggcatatacagtactcctcgctgcagggcactgtcccaccgggatccagttgcaaagtttgtcttgacagttgaaggcctcgcttagttgtactggattctcagggagccctctgtggccttttgctttgcgtgctgtttcccttgtaccagagggcggcaccgtggaaattctgttttccctgtagcatattgtgttggattgcattactggcagagaaaggacaaggtgccattcaagtcctagggtgggcttccagctgccttaatagaagtactcaagtcttttgggtagtgagctggaaagcctacaggaaaagaggggtacctgttttcatttgaaaactttgattcatggaacctttaaaactaatctcagaaaaatttttggtgcccatgcagctgtagttgttcactgctttcctggatggatgggactcttatgtcataacttctgttactcctttggcccatagctaaggtcatccttccccacaggggtggctttgggattggatgatacagcttttgcttctgtgtagtatacctgtacatacttgtttcaggcagcctttctttaatgttttcagttggtttgtattctgtagctcagtagctgctaataaagttaaagatcctgtgt

SEQ ID NO: 439082 - DNA, 1622 bp, Homo sapiens
aaatcaaaggagttcaacatagtatctacctgattggaaaaaatgcaggggcagtttctttggaacaggctctgttgcatttggtgagcaacttaacttttggaaacacaggggcttacaccagtactttctccagtgacactattgctgtctcctctggtaacaatctttgtgtttcaggtagatgacattaatgctgataagaatatctcttctgcacagattgttggtcctggacccaagccagaagcctctgcaaagcttccttccagacctgcagataactatgacaactttgtcctaccagagttgccatctgtgccagacacactaccaactgcatctgctggtgccagcacctcagcatctgaagacattgactttgatgatctttcccggaggtttgaagagctgaaaaagaaaacataggtctcttaaaccaggcaactttcacgttttgggagttgagactgagcaatttctccttgtaacaaagaatctccatgaaattctgtttcatctgttaaccgtcactcagcacaacactccctctgggctctcttcctgctcctccagattctgctgctttccagttctctgttgatcctgagactaacaattggagactgaggccagagcaactggctcctggcagctgtgcttgtccgtttcctgtcagagtgatcccaggtttcctcctggcccgtcccatggtccctccacaggagtgtgagaggatgggggaagcactgtgggaagaccaccaaagatggctggacagtgggagagagcacgttgtgaagcatcccagcctcgtgttgaggttccagacttagaaacagacccctctgtacagggggattgtggtgagtgagaatcaaggccaccttgtgtgttttctcactctcgaatgcaagtgggagagggaaaatgactcgggacgccattgtaacggttcctggaagctgggccctctcattggcatatacagtactcctcgctgcagggcactgtcccaccgggatccagttgcaaagtttgtcttgacagttgaaggcctcgcttagttgtactggattctcagggagccctctgtggccttttgctttgcgtgctgtttcccttgtaccagagggcggcaccgtggaaattctgttttccctgtagcatattgtgttggattgcattactggcagagaaaggacaaggtgccattcaagtcctagggtgggcttccagctgccttaatagaagtactcaagtcttttgggtagtgagctggaaagcctacaggaaaagaggggtacctgttttcatttgaaaactttgattcatggaacctttaaaactaatctcagaaaaatttttggtgcccatgcagctgtagttgttcactgctttcctggatggatgggactcttatgtcataacttctgttactcctttggcccatagctaaggtcatccttccccacaggggtggctttgggattggatgatacagcttttgcttctgtgtagtatacctgtacatacttgtttcaggcagcctttctttaatgttttcagttggtttgtattctgtagctcagtagctgctaataaagttaaagatcctgtgt

SEQ ID NO: 439083 - DNA, 1488 bp, Homo sapiens
tttctcctgtgttttgatcattttatttttactgccaaaggggatctgagtcatttctctggtatttgtaacgttgtgctccttgccctaattaggtcctggacccaagccagaagcctctgcaaagcttccttccagacctgcagataactatgacaactttgtcctaccagagttgccatctgtgccagacacactaccaactgcatctgctggtgccagcacctcagcatctgaagacattgactttgatgatctttcccggaggtttgaagagctgaaaaagaaaacataggtctcttaaaccaggcaactttcacgttttgggagttgagactgagcaatttctccttgtaacaaagaatctccatgaaattctgtttcatctgttaaccgtcactcagcacaacactccctctgggctctcttcctgctcctccagattctgctgctttccagttctctgttgatcctgagactaacaattggagactgaggccagagcaactggctcctggcagctgtgcttgtccgtttcctgtcagagtgatcccaggtttcctcctggcccgtcccatggtccctccacaggagtgtgagaggatgggggaagcactgtgggaagaccaccaaagatggctggacagtgggagagagcacgttgtgaagcatcccagcctcgtgttgaggttccagacttagaaacagacccctctgtacagggggattgtggtgagtgagaatcaaggccaccttgtgtgttttctcactctcgaatgcaagtgggagagggaaaatgactcgggacgccattgtaacggttcctggaagctgggccctctcattggcatatacagtactcctcgctgcagggcactgtcccaccgggatccagttgcaaagtttgtcttgacagttgaaggcctcgcttagttgtactggattctcagggagccctctgtggccttttgctttgcgtgctgtttcccttgtaccagagggcggcaccgtggaaattctgttttccctgtagcatattgtgttggattgcattactggcagagaaaggacaaggtgccattcaagtcctagggtgggcttccagctgccttaatagaagtactcaagtcttttgggtagtgagctggaaagcctacaggaaaagaggggtacctgttttcatttgaaaactttgattcatggaacctttaaaactaatctcagaaaaatttttggtgcccatgcagctgtagttgttcactgctttcctggatggatgggactcttatgtcataacttctgttactcctttggcccatagctaaggtcatccttccccacaggggtggctttgggattggatgatacagcttttgcttctgtgtagtatacctgtacatacttgtttcaggcagcctttctttaatgttttcagttggtttgtattctgtagctcagtagctgctaataaagttaaagatcctgtgt

SEQ ID NO: 439084 - DNA, 2445 bp, Homo sapiens
tttctgtagcctaggctggagtgctgtgacgtgatcacggtttactgcagcagcgaccttctgggctcaagcgatcttcctgcctcagcctcccgagtagctgagaccacaagtgctcactgctgctcccctaatttttaacttttttttttttttttttgtagcgatgcggtttcactatggtgtccaggctggtctgcaactcccgggctcaagcgatcctcccgccccgcctctcaaagtgctgggaaggtcccttccaggcttaagcagcgataatggttttcaagttaaaaacaaaggtaaccaaggaaaaagttttctctgaataccgagataaattagggaaatcgccagagactgtggtgctgaggaaacactactgaattataccacacagaccggagcgatgctggtccaaagggcaaccggacggcttaaaagcggggcgggggaacgcttagagcccgtagagggacacggaggcgctgggtgaagagtcagggatacgcaggcttcgaaaccccctcggccgctccacccagggggaaagtccagcgaaaggcggcagcagatcttagggagcaactcccggcgtcagagaggcggtactggcagccggttatggaagaatccggaaccaaggcactgggcgcggtgaggccgtgggcgcagagtccgagaatcaacagctgtggctggcctccccgcgcccagagcgaaattaagggcatgcccccagcagctgactcagtcggcgtggcgcttcccccaacgtctgccgtgcccccgccgcgggaagtagtccccggccgcgccgactccaaaggaaaccgagggagggtgccccgagtcagcgcgtgggtcccggcagcggcgatcgcgcagccaatccctggaaaggagggcgtggctatatcggccccgtggatccctccgcccgcgcttgttgtgctgaggccgagggagtcgccattttggatggtgaaccctgaagtcggtgtctgctgcgttcacggcaggattcggttaggaggaacagcacagcatgctgggctctggatttaaagctgagcgcttaagagtgaatttgagattagtcataaatcgccttaaactattggagaaaaagaaaacatctgtgccagacacactaccaactgcatctgctggtgccagcacctcagcatctgaagacattgactttgatgatctttcccggaggtttgaagagctgaaaaagaaaacataggtctcttaaaccaggcaactttcacgttttgggagttgagactgagcaatttctccttgtaacaaagaatctccatgaaattctgtttcatctgttaaccgtcactcagcacaacactccctctgggctctcttcctgctcctccagattctgctgctttccagttctctgttgatcctgagactaacaattggagactgaggccagagcaactggctcctggcagctgtgcttgtccgtttcctgtcagagtgatcccaggtttcctcctggcccgtcccatggtccctccacaggagtgtgagaggatgggggaagcactgtgggaagaccaccaaagatggctggacagtgggagagagcacgttgtgaagcatcccagcctcgtgttgaggttccagacttagaaacagacccctctgtacagggggattgtggtgagtgagaatcaaggccaccttgtgtgttttctcactctcgaatgcaagtgggagagggaaaatgactcgggacgccattgtaacggttcctggaagctgggccctctcattggcatatacagtactcctcgctgcagggcactgtcccaccgggatccagttgcaaagtttgtcttgacagttgaaggcctcgcttagttgtactggattctcagggagccctctgtggccttttgctttgcgtgctgtttcccttgtaccagagggcggcaccgtggaaattctgttttccctgtagcatattgtgttggattgcattactggcagagaaaggacaaggtgccattcaagtcctagggtgggcttccagctgccttaatagaagtactcaagtcttttgggtagtgagctggaaagcctacaggaaaagaggggtacctgttttcatttgaaaactttgattcatggaacctttaaaactaatctcagaaaaatttttggtgcccatgcagctgtagttgttcactgctttcctggatggatgggactcttatgtcataacttctgttactcctttggcccatagctaaggtcatccttccccacaggggtggctttgggattggatgatacagcttttgcttctgtgtagtatacctgtacatacttgtttcaggcagcctttctttaatgttttcagttggtttgtattctgtagctcagtagctgctaataaagttaaagatcctgtgt

SEQ ID NO: 439085 - DNA, 1645 bp, Homo sapiens
  misc_feature (1586)..(1586): n is a, c, g, or t
tttctgtagcctaggctggagtgctgtgacgtgatcacggtttactgcagcagcgaccttctgggctcaagcgatcttcctgcctcagcctcccgagtagctgagaccacaagtgctcactgctgctcccctaatttttaacttttttttttttttttttgtagcgatgcggtttcactatggtgtccaggctggtctgcaactcccgggctcaagcgatcctcccgccccgcctctcaaagtgctgggaaggtcccttccaggcttaagcagcgataatggttttcaagttaaaaacaaaggtaaccaaggaaaaagttttctctgaataccgagataaattagggaaatcgccagagactgtggtgctgaggaaacactactgaattataccacacagaccggagcgatgctggtccaaagggcaaccggacggcttaaaagcggggcgggggaacgcttagagcccgtagagggacacggaggcgctgggtgaagagtcagggatacgcaggcttcgaaaccccctcggccgctccacccagggggaaagtccagcgaaaggcggcagcagatcttagggagcaactcccggcgtcagagaggcggtactggcagccggttatggaagaatccggaaccaaggcactgggcgcggtgaggccgtgggcgcagagtccgagaatcaacagctgtggctggcctccccgcgcccagagcgaaattaagggcatgcccccagcagctgactcagtcggcgtggcgcttcccccaacgtctgccgtgcccccgccgcgggaagtagtccccggccgcgccgactccaaaggaaaccgagggagggtgccccgagtcagcgcgtgggtcccggcagcggcgatcgcgcagccaatccctggaaaggagggcgtggctatatcggccccgtggatccctccgcccgcgcttgttgtgctgaggccgagggagtcgccattttggatggtgaaccctgaagtcggtgtctgctgcgttcacggcaggattcggttaggaggaacagcacagcatgctgggctctggatttaaagctgagcgcttaagagtgaatttgagattagtcataaatcgccttaaactattggagaaaaagaaaacggaactggcccagaaagcaaggaaggagattgctgactatctggctgctgggaaagatgaacgagctcggatccgtgtggagcacattatccgggaagactacctcgtggaggccatggagatcctggagctgtactgtgacctgctgctggctcggtttggccttatccagtctatgaaggaactagattctggtctggctgaatctgtgtctacattgatctgggctgctcctcgactccagtcagaagtggctgagttgaaaatagttgctgatcagctctgtgccaagtatagcaaggaatatggcaagctatgtaggaccaaccagattggaactgtgaatgacaggctaatgcacaagctgagtgtggaagccccacccaaaatcctggtggagagatacctgattgaaattgcaaagaattacaacgctatgaatgtatttngggagcattctatgcacttgcattcactctcctacttacaggactcaacatactaatca

SEQ ID NO: 439086 - DNA, 1809 bp, Homo sapiens
tttctgtagcctaggctggagtgctgtgacgtgatcacggtttactgcagcagcgaccttctgggctcaagcgatcttcctgcctcagcctcccgagtagctgagaccacaagtgctcactgctgctcccctaatttttaacttttttttttttttttttgtagcgatgcggtttcactatggtgtccaggctggtctgcaactcccgggctcaagcgatcctcccgccccgcctctcaaagtgctgggaaggtcccttccaggcttaagcagcgataatggttttcaagttaaaaacaaaggtaaccaaggaaaaagttttctctgaataccgagataaattagggaaatcgccagagactgtggtgctgaggaaacactactgaattataccacacagaccggagcgatgctggtccaaagggcaaccggacggcttaaaagcggggcgggggaacgcttagagcccgtagagggacacggaggcgctgggtgaagagtcagggatacgcaggcttcgaaaccccctcggccgctccacccagggggaaagtccagcgaaaggcggcagcagatcttagggagcaactcccggcgtcagagaggcggtactggcagccggttatggaagaatccggaaccaaggcactgggcgcggtgaggccgtgggcgcagagtccgagaatcaacagctgtggctggcctccccgcgcccagagcgaaattaagggcatgcccccagcagctgactcagtcggcgtggcgcttcccccaacgtctgccgtgcccccgccgcgggaagtagtccccggccgcgccgactccaaaggaaaccgagggagggtgccccgagtcagcgcgtgggtcccggcagcggcgatcgcgcagccaatccctggaaaggagggcgtggctatatcggccccgtggatccctccgcccgcgcttgttgtgctgaggccgagggagtcgccattttggatggtgaaccctgaagtcggtgtctgctgcgttcacggcaggattcggttaggaggaacagcacagcatgctgggctctggatttaaagctgagcgcttaagagtgaatttgagattagtcataaatcgccttaaactattggagaaaaagaaaacggaactggcccagaaagcaaggaaggagattgctgactatctggctgctggagctgtactgtgacctgctgctggctcggtttggccttatccagtctatgaaggaactagattctggtctggctgaatctgtgtctacattgatctgggctgctcctcgactccagtcagaagtggctgagttgaaaatagttgctgatcagctctgtgccaagtatagcaaggaatatggcaagctatgtaggaccaaccagattggaactgtgaatgacaggctaatgcacaagctgagtgtggaagccccacccaaaatcctggtggagagatacctgattgaaattgcaaagaattacaacgtaccctatgaacctgactctgtggtcatggcagaagctcctcctggggtagagacagatcttattgatgttggattcacagatgatgtgaagaaaggaggccctggaagaggagggagtggtggcttcacagcaccagttggtggacctgatggaacggtgccaatgcccatgcccatgcccatgcctatgccatctgcaaatacgcctttctcatatccactgccaaagggaccagtagatgacattaatgctgataagaatatctcttctgcacagattgttggtgagtagtatcaatcagaaacctgcagag

SEQ ID NO: 439087 - DNA, 483 bp, Homo sapiens
aaaacacttttcatataggtttactgaatatctttgggatctgttatagtcatactagtagttttttccacaaatgaataaaccaccaattattaccaggcagaacaacctttgtagataagatggtcattggtagtaagaaagtctcgttagagttttcccttgtaaacactgaagcacttgattcaataaagaatagcctttggctctagatctttaaaaatctggaatcctgaccacatgtggtccttttgggcatttttaaggatcttgaatatttatatatatttagtatgagaatataaatgtatttctttctcccttcccatacccaaaccttcgagattgcaaactggaggcagtgtctctgatgttgcctttctcctcttacagtcagatttcaatggactgccaatggggacttatcaggcctttcccaatattcatccacctcagataccagcaactcccccatcgtatgaa

SEQ ID NO: 439088 - DNA, 460 bp, Homo sapiens
ttctgccctttgtgacttttagactgagtaccttttttgcagagaaagggacatactctgttgttgtggcattaggtcacctgactcttgagttggaaatgtcaagccacatgagctatattttctacctagacagagtagcaaattctacagtagaggggatgggattagatttgctaaaggagaggagctaggatatagtagaaacacccagttcttcctgttggggggagattggcctgtaggccagatgcaagtgctctactgctgtgagatcggagtgggatttgtgtcttagcggaactggcccagaaagcaaggaaggagattgctgactatctggctgctgggaaagatgaacgagctcggatccgtgtggagcacattatccgggaagactacctcgtggaggccatggagatcctggagctgtactgtgacctgctgctggctcggtttg

SEQ ID NO: 439089 - DNA, 3342 bp, Homo sapiens
tttctgtagcctaggctggagtgctgtgacgtgatcacggtttactgcagcagcgaccttctgggctcaagcgatcttcctgcctcagcctcccgagtagctgagaccacaagtgctcactgctgctcccctaatttttaacttttttttttttttttttgtagcgatgcggtttcactatggtgtccaggctggtctgcaactcccgggctcaagcgatcctcccgccccgcctctcaaagtgctgggaaggtcccttccaggcttaagcagcgataatggttttcaagttaaaaacaaaggtaaccaaggaaaaagttttctctgaataccgagataaattagggaaatcgccagagactgtggtgctgaggaaacactactgaattataccacacagaccggagcgatgctggtccaaagggcaaccggacggcttaaaagcggggcgggggaacgcttagagcccgtagagggacacggaggcgctgggtgaagagtcagggatacgcaggcttcgaaaccccctcggccgctccacccagggggaaagtccagcgaaaggcggcagcagatcttagggagcaactcccggcgtcagagaggcggtactggcagccggttatggaagaatccggaaccaaggcactgggcgcggtgaggccgtgggcgcagagtccgagaatcaacagctgtggctggcctccccgcgcccagagcgaaattaagggcatgcccccagcagctgactcagtcggcgtggcgcttcccccaacgtctgccgtgcccccgccgcgggaagtagtccccggccgcgccgactccaaaggaaaccgagggagggtgccccgagtcagcgcgtgggtcccggcagcggcgatcgcgcagccaatccctggaaaggagggcgtggctatatcggccccgtggatccctccgcccgcgcttgttgtgctgaggccgagggagtcgccattttggatggtgaaccctgaagtcggtgtctgctgcgttcacggcaggattcggttaggaggaacagcacagcatgctgggctctggatttaaagctgagcgcttaagagtgaatttgagattagtcataaatcgccttaaactattggagaaaaagaaaacggaactggcccagaaagcaaggaaggagattgctgactatctggctgctgggaaagatgaacgagctcggatccgtgtggagcacattatccgggaagactacctcgtggaggccatggagatcctggagctgtactgtgacctgctgctggctcggtttggccttatccagtctatgaaggaactagattctggtctggctgaatctgtgtctacattgatctgggctgctcctcgactccagtcagaagtggctgagttgaaaatagttgctgatcagctctgtgccaagtatagcaaggaatatggcaagctatgtaggaccaaccagattggaactgtgaatgacaggctaatgcacaagctgagtgtggaagccccacccaaaatcctggtggagagatacctgattgaaattgcaaagaattacaacgtaccctatgaacctgactctgtggtcatggcagaagctcctcctggggtagagacagatcttattgatgttggattcacagatgatgtgaagaaaggaggccctggaagaggagggagtggtggcttcacagcaccagttggtggacctgatggaacggtgccaatgcccatgcccatgcccatgcctatgccatctgcaaatacgcctttctcatatccactgccaaagggaccatcagatttcaatggactgccaatggggacttatcaggcctttcccaatattcatccacctcagataccagcaactcccccatcgtatgaatctgtagatgacattaatgctgataagaatatctcttctgcacagattgttggtcctggacccaagccagaagcctctgcaaagcttccttccagacctgcagataactatgacaactttgtcctaccagagttgccatctgtgccagacacactaccaactgcatctgctggtgccagcacctcagcatctgaagacattgactttgatgatctttcccggaggtttgaagagctgaaaaagaaaacataggtctcttaaaccaggcaactttcacgttttgggagttgagactgagcaatttctccttgtaacaaagaatctccatgaaattctgtttcatctgttaaccgtcactcagcacaacactccctctgggctctcttcctgctcctccagattctgctgctttccagttctctgttgatcctgagactaacaattggagactgaggccagagcaactggctcctggcagctgtgcttgtccgtttcctgtcagagtgatcccaggtttcctcctggcccgtcccatggtccctccacaggagtgtgagaggatgggggaagcactgtgggaagaccaccaaagatggctggacagtgggagagagcacgttgtgaagcatcccagcctcgtgttgaggttccagacttagaaacagacccctctgtacagggggattgtggtgagtgagaatcaaggccaccttgtgtgttttctcactctcgaatgcaagtgggagagggaaaatgactcgggacgccattgtaacggttcctggaagctgggccctctcattggcatatacagtactcctcgctgcagggcactgtcccaccgggatccagttgcaaagtttgtcttgacagttgaaggcctcgcttagttgtactggattctcagggagccctctgtggccttttgctttgcgtgctgtttcccttgtaccagagggcggcaccgtggaaattctgttttccctgtagcatattgtgttggattgcattactggcagagaaaggacaaggtgccattcaagtcctagggtgggcttccagctgccttaatagaagtactcaagtcttttgggtagtgagctggaaagcctacaggaaaagaggggtacctgttttcatttgaaaactttgattcatggaacctttaaaactaatctcagaaaaatttttggtgcccatgcagctgtagttgttcactgctttcctggatggatgggactcttatgtcataacttctgttactcctttggcccatagctaaggtcatccttccccacaggggtggctttgggattggatgatacagcttttgcttctgtgtagtatacctgtacatacttgtttcaggcagcctttctttaatgttttcagttggtttgtattctgtagctcagtagctgctaataaagttaaagatcctgtgt

SEQ ID NO: 439090 - DNA, 3288 bp, Homo sapiens
tttctgtagcctaggctggagtgctgtgacgtgatcacggtttactgcagcagcgaccttctgggctcaagcgatcttcctgcctcagcctcccgagtagctgagaccacaagtgctcactgctgctcccctaatttttaacttttttttttttttttttgtagcgatgcggtttcactatggtgtccaggctggtctgcaactcccgggctcaagcgatcctcccgccccgcctctcaaagtgctgggaaggtcccttccaggcttaagcagcgataatggttttcaagttaaaaacaaaggtaaccaaggaaaaagttttctctgaataccgagataaattagggaaatcgccagagactgtggtgctgaggaaacactactgaattataccacacagaccggagcgatgctggtccaaagggcaaccggacggcttaaaagcggggcgggggaacgcttagagcccgtagagggacacggaggcgctgggtgaagagtcagggatacgcaggcttcgaaaccccctcggccgctccacccagggggaaagtccagcgaaaggcggcagcagatcttagggagcaactcccggcgtcagagaggcggtactggcagccggttatggaagaatccggaaccaaggcactgggcgcggtgaggccgtgggcgcagagtccgagaatcaacagctgtggctggcctccccgcgcccagagcgaaattaagggcatgcccccagcagctgactcagtcggcgtggcgcttcccccaacgtctgccgtgcccccgccgcgggaagtagtccccggccgcgccgactccaaaggaaaccgagggagggtgccccgagtcagcgcgtgggtcccggcagcggcgatcgcgcagccaatccctggaaaggagggcgtggctatatcggccccgtggatccctccgcccgcgcttgttgtgctgaggccgagggagtcgccattttggatggtgaaccctgaagtcggtgtctgctgcgttcacggcaggattcggttaggaggaacagcacagcatgctgggctctggatttaaagctgagcgcttaagagtgaatttgagattagtcataaatcgccttaaactattggagaaaaagaaaacggaactggcccagaaagcaaggaaggagattgctgactatctggctgctgggaaagatgaacgagctcggatccgtgtggagcacattatccgggaagactacctcgtggaggccatggagatcctggagctgtactgtgacctgctgctggctcggtttggccttatccagtctatgaaggaactagattctggtctggctgaatctgtgtctacattgatctgggctgctcctcgactccagtcagaagtggctgagttgaaaatagttgctgatcagctctgtgccaagtatagcaaggaatatggcaagctatgtaggaccaaccagattggaactgtgaatgacaggctaatgcacaagctgagtgtggaagccccacccaaaatcctggtggagagatacctgattgaaattgcaaagaattacaacgtaccctatgaacctgactctgtggtcatggcagaagctcctcctggggtagagacagatcttattgatgttggattcacagatgatgtgaagaaaggaggccctggaagaggagggagtggtggcttcacagcaccagttggtggacctgatggaacggtgccaatgcccatgcccatgcccatgcctatgccatctgcaaatacgcctttctcatatccactgccaaagggaccatcagatttcaatggactgccaatggggacttatcaggcctttcccaatattcatccacctcagataccagcaactcccccatcgtatgaatctgtagatgacattaatgctgataagaatatctcttctgcacagattgttggtcctggacccaagccagaagcctctgcaaagcttccttccagacctgcagataactatgacaactttgtcctaccagagttgccatctgtgccagacacactaccaactgcatctgctggtgccagcacctcagcatctgaagacattgactttgatgatctttcccggaggtttgaagagctgaaaaagacaatttctccttgtaacaaagaatctccatgaaattctgtttcatctgttaaccgtcactcagcacaacactccctctgggctctcttcctgctcctccagattctgctgctttccagttctctgttgatcctgagactaacaattggagactgaggccagagcaactggctcctggcagctgtgcttgtccgtttcctgtcagagtgatcccaggtttcctcctggcccgtcccatggtccctccacaggagtgtgagaggatgggggaagcactgtgggaagaccaccaaagatggctggacagtgggagagagcacgttgtgaagcatcccagcctcgtgttgaggttccagacttagaaacagacccctctgtacagggggattgtggtgagtgagaatcaaggccaccttgtgtgttttctcactctcgaatgcaagtgggagagggaaaatgactcgggacgccattgtaacggttcctggaagctgggccctctcattggcatatacagtactcctcgctgcagggcactgtcccaccgggatccagttgcaaagtttgtcttgacagttgaaggcctcgcttagttgtactggattctcagggagccctctgtggccttttgctttgcgtgctgtttcccttgtaccagagggcggcaccgtggaaattctgttttccctgtagcatattgtgttggattgcattactggcagagaaaggacaaggtgccattcaagtcctagggtgggcttccagctgccttaatagaagtactcaagtcttttgggtagtgagctggaaagcctacaggaaaagaggggtacctgttttcatttgaaaactttgattcatggaacctttaaaactaatctcagaaaaatttttggtgcccatgcagctgtagttgttcactgctttcctggatggatgggactcttatgtcataacttctgttactcctttggcccatagctaaggtcatccttccccacaggggtggctttgggattggatgatacagcttttgcttctgtgtagtatacctgtacatacttgtttcaggcagcctttctttaatgttttcagttggtttgtattctgtagctcagtagctgctaataaagttaaagatcctgtgt

SEQ ID NO: 439091 - DNA, 2385 bp, Homo sapiens
tcagtggggctgggtggtcgatcggccgaggaccctgaagtcggtgtctgctgcgttcacggcaggattcggttaggaggaacagcacagcatgctgggctctggatttaaagctgagcgcttaagagtgaatttgagattagtcataaatcgccttaaactattggagaaaaagaaaacggaactggcccagaaagcaaggaaggagattgctgactatctggctgctgggaaagatgaacgagctcggatccgtgtggagcacattatccgggaagactacctcgtggaggccatggagatcctggagctgtactgtgacctgctgctggctcggtttggccttatccagtctatgaaggaactagattctggtctggctgaatctgtgtctacattgatctgggctgctcctcgactccagtcagaagtggctgagttgaaaatagttgctgatcagctctgtgccaagtatagcaaggaatatggcaagctatgtaggaccaaccagattggaactgtgaatgacaggctaatgcacaagctgagtgtggaagccccacccaaaatcctggtggagagatacctgattgaaattgcaaagaattacaacgtaccctatgaacctgactctgtggtcatggcagaagctcctcctggggtagagacagatcttattgatgttggattcacagatgatgtgaagaaaggaggccctggaagaggagggagtggtggcttcacagcaccagttggtggacctgatggaacggtgccaatgcccatgcccatgcccatgcctatgccatctgcaaatacgcctttctcatatccactgccaaagggaccatcagatttcaatggactgccaatggggacttatcaggcctttcccaatattcatccacctcagataccagcaactcccccatcgtatgaatctgtagatgacattaatgctgataagaatatctcttctgcacagattgttggtcctggacccaagccagaagcctctgcaaagcttccttccagacctgcagataactatgacaactttgtcctaccagagttgccatctgtgccagacacactaccaactgcatctgctggtgccagcacctcagcatctgaagacattgactttgatgatctttcccggaggtttgaagagctgaaaaagaaaacataggtctcttaaaccaggcaactttcacgttttgggagttgagactgagcaatttctccttgtaacaaagaatctccatgaaattctgtttcatctgttaaccgtcactcagcacaacactccctctgggctctcttcctgctcctccagattctgctgctttccagttctctgttgatcctgagactaacaattggagactgaggccagagcaactggctcctggcagctgtgcttgtccgtttcctgtcagagtgatcccaggtttcctcctggcccgtcccatggtccctccacaggagtgtgagaggatgggggaagcactgtgggaagaccaccaaagatggctggacagtgggagagagcacgttgtgaagcatcccagcctcgtgttgaggttccagacttagaaacagacccctctgtacagggggattgtggtgagtgagaatcaaggccaccttgtgtgttttctcactctcgaatgcaagtgggagagggaaaatgactcgggacgccattgtaacggttcctggaagctgggccctctcattggcatatacagtactcctcgctgcagggcactgtcccaccgggatccagttgcaaagtttgtcttgacagttgaaggcctcgcttagttgtactggattctcagggagccctctgtggccttttgctttgcgtgctgtttcccttgtaccagagggcggcaccgtggaaattctgttttccctgtagcatattgtgttggattgcattactggcagagaaaggacaaggtgccattcaagtcctagggtgggcttccagctgccttaatagaagtactcaagtcttttgggtagtgagctggaaagcctacaggaaaagaggggtacctgttttcatttgaaaactttgattcatggaacctttaaaactaatctcagaaaaatttttggtgcccatgcagctgtagttgttcactgctttcctggatggatgggactcttatgtcataacttctgttactcctttggcccatagctaaggtcatccttccccacaggggtggctttgggattggatgatacagcttttgcttctgtgtagtatacctgtacatacttgtttcaggcagcctttctttaatgttttcagttggtttgtattctgtagctcagtagctgctaataaagttaaagatcctgtgt

SEQ ID NO: 439092 - DNA, 3363 bp, Homo sapiens
  misc_feature (3344)..(3344): n is a, c, g, or t
  misc_feature (3348)..(3348): n is a, c, g, or t
  misc_feature (3350)..(3350): n is a, c, g, or t
tttctgtagcctaggctggagtgctgtgacgtgatcacggtttactgcagcagcgaccttctgggctcaagcgatcttcctgcctcagcctcccgagtagctgagaccacaagtgctcactgctgctcccctaatttttaacttttttttttttttttttgtagcgatgcggtttcactatggtgtccaggctggtctgcaactcccgggctcaagcgatcctcccgccccgcctctcaaagtgctgggaaggtcccttccaggcttaagcagcgataatggttttcaagttaaaaacaaaggtaaccaaggaaaaagttttctctgaataccgagataaattagggaaatcgccagagactgtggtgctgaggaaacactactgaattataccacacagaccggagcgatgctggtccaaagggcaaccggacggcttaaaagcggggcgggggaacgcttagagcccgtagagggacacggaggcgctgggtgaagagtcagggatacgcaggcttcgaaaccccctcggccgctccacccagggggaaagtccagcgaaaggcggcagcagatcttagggagcaactcccggcgtcagagaggcggtactggcagccggttatggaagaatccggaaccaaggcactgggcgcggtgaggccgtgggcgcagagtccgagaatcaacagctgtggctggcctccccgcgcccagagcgaaattaagggcatgcccccagcagctgactcagtcggcgtggcgcttcccccaacgtctgccgtgcccccgccgcgggaagtagtccccggccgcgccgactccaaaggaaaccgagggagggtgccccgagtcagcgcgtgggtcccggcagcggcgatcgcgcagccaatccctggaaaggagggcgtggctatatcggccccgtggatccctccgcccgcgcttgttgtgctgaggccgagggagtcgccattttggatggtgaaccctgaagtcggtgtctgctgcgttcacggcaggattcggttaggaggaacagcacagcatgctgggctctggatttaaagctgagcgcttaagagtgaatttgagattagtcataaatcgccttaaactattggagaaaaagaaaacggaactggcccagaaagcaaggaaggagattgctgactatctggctgctgggaaagatgaacgagctcggatccgtgtggagcacattatccgggaagactacctcgtggaggccatggagatcctggagctgtactgtgacctgctgctggctcggtttggccttatccagtctatgaaggaactagattctggtctggctgaatctgtgtctacattgatctgggctgctcctcgactccagtcagaagtggctgagttgaaaatagttgctgatcagctctgtgccaagtatagcaaggaatatggcaagctatgtaggaccaaccagattggaactgtgaatgacaggctaatgcacaagctgagtgtggaagccccacccaaaatcctggtggagagatacctgattgaaattgcaaagaattacaacgtaccctatgaacctgactctgtggtcatggcagaagctcctcctggggtagagacagatcttattgatgttggattcacagatgatgtgaagaaaggaggccctggaagaggagggagtggtggcttcacagcaccagttggtggacctgatggaacggtgccaatgcccatgcccatgcccatgcctatgccatctgcaaatacgcctttctcatatccactgccaaagggaccatcagatttcaatggactgccaatggggacttatcaggcctttcccaatattcatccacctcagataccagcaactcccccatcgtatgaatctgtagatgacattaatgctgataagaatatctcttctgcacagattgttggtcctggacccaagccagaagcctctgcaaagcttccttccagacctgcagataactatgacaactttgtcctaccagagttgccatctgtgccagacacactaccaactgcatctgctggtgccagcacctcagcatctgaagacattgactttgatgatctttcccggaggtttgaagagctgaaaaagaaaacataggtctcttaaaccaggcaactttcacgttttgggagttgagactgagcaatttctccttgtaacaaagaatctccatgaaattctgtttcatctgttaaccgtcactcagcacaacactccctctgggctctcttcctgctcctccagattctgctgctttccagttctctgttgatcctgagactaacaattggagactgaggccagagcaactggctcctggcagctgtgcttgtccgtttcctgtcagagtgatcccaggtttcctcctggcccgtcccatggtccctccacaggagtgtgagaggatgggggaagcactgtgggaagaccaccaaagatggctggacagtgggagagagcacgttgtgaagcatcccagcctcgtgttgaggttccagacttagaaacagacccctctgtacagggggattgtggtgagtgagaatcaaggccaccttgtgtgttttctcactctcgaatgcaagtgggagagggaaaatgactcgggacgccattgtaacggttcctggaagctgggccctctcattggcatatacagtactcctcgctgcagggcactgtcccaccgggatccagttgcaaagtttgtcttgacagttgaaggcctcgcttagttgtactggattctcagggagccctctgtggccttttgctttgcgtgctgtttcccttgtaccagagggcggcaccgtggaaattctgttttccctgtagcatattgtgttggattgcattactggcagagaaaggacaaggtgccattcaagtcctagggtgggcttccagctgccttaatagaagtactcaagtcttttgggtagtgagctggaaagcctacaggaaaagaggggtacctgttttcatttgaaaactttgattcatggaacctttaaaactaatctcagaaaaatttttggtgcccatgcagctgtagttgttcactgctttcctggatggatgggactcttatgtcataacttctgttactcctttggcccatagctaaggtcatccttccccacaggggtggctttgggattggatgatacagcttttgcttctgtgtagtatacctgtacatacttgtttcaggcagcctttctttaatgttttcagttggtttgtattctgtagctcagtagctgctaataaagttaaagatcctgtgtanaaananaacaaacaaaagg

SEQ ID NO: 439093 - DNA, 3207 bp, Homo sapiens
tttctgtagcctaggctggagtgctgtgacgtgatcacggtttactgcagcagcgaccttctgggctcaagcgatcttcctgcctcagcctcccgagtagctgagaccacaagtgctcactgctgctcccctaatttttaacttttttttttttttttttgtagcgatgcggtttcactatggtgtccaggctggtctgcaactcccgggctcaagcgatcctcccgccccgcctctcaaagtgctgggaaggtcccttccaggcttaagcagcgataatggttttcaagttaaaaacaaaggtaaccaaggaaaaagttttctctgaataccgagataaattagggaaatcgccagagactgtggtgctgaggaaacactactgaattataccacacagaccggagcgatgctggtccaaagggcaaccggacggcttaaaagcggggcgggggaacgcttagagcccgtagagggacacggaggcgctgggtgaagagtcagggatacgcaggcttcgaaaccccctcggccgctccacccagggggaaagtccagcgaaaggcggcagcagatcttagggagcaactcccggcgtcagagaggcggtactggcagccggttatggaagaatccggaaccaaggcactgggcgcggtgaggccgtgggcgcagagtccgagaatcaacagctgtggctggcctccccgcgcccagagcgaaattaagggcatgcccccagcagctgactcagtcggcgtggcgcttcccccaacgtctgccgtgcccccgccgcgggaagtagtccccggccgcgccgactccaaaggaaaccgagggagggtgccccgagtcagcgcgtgggtcccggcagcggcgatcgcgcagccaatccctggaaaggagggcgtggctatatcggccccgtggatccctccgcccgcgcttgttgtgctgaggccgagggagtcgccattttggatggtgaaccctgaagtcggtgtctgctgcgttcacggcaggattcggttaggaggaacagcacagcatgctgggctctggatttaaagctgagcgcttaagagtgaatttgagattagtcataaatcgccttaaactattggagaaaaagaaaacggaactggcccagaaagcaaggaaggagattgctgactatctggctgctgggaaagatgaacgagctcggatccgtgtggagcacattatccgggaagactacctcgtggaggccatggagatcctggagctgtactgtgacctgctgctggctcggtttggccttatccagtctatgaaggaactagattctggtctggctgaatctgtgtctacattgatctgggctgctcctcgactccagtcagaagtggctgagttgaaaatagttgctgatcagctctgtgccaagtatagcaaggaatatggcaagctatgtaggaccaaccagattggaactgtgaatgacaggctaatgcacaagctgagtgtggaagccccacccaaaatcctggtggagagatacctgattgaaattgcaaagaattacaacgtaccctatgaacctgactctgtggtcatggcagaagctcctcctggggtagagacagatcttattgatgttggattcacagatgatgtgaagaaaggaggccctggaagaggagggagtggtggcttcacagcaccagttggtggacctgatggaacggtgccaatgcccatgcccatgcccatgcctatgccatctgcaaatacgcctttctcatatccactgccaaagggaccatcagatttcaatggactgccaatggggacttatcaggcctttcccaatattcatccacctcagataccagcaactcccccatcgtatgaatctgtagatgacattaatgctgataagaatatctcttctgcacagattgttggtcctggacccaagccagaagcctctgcaaagcttccttccagacctgcagataactatgacaactttgtcctaccagagttgccatctgtgccagacacactaccaactgcatctgctggtgccagcacctcagcatctgaagacattgactttgatgatctttcccggaggtttgaagagctgaaaaagaaaacataggtctcttaaaccaggcaactttcacgttttgggagttgagactgagcaatttctccttgtaacaaagaatctccatgaaattctgtttcatctgttaaccgtcactcagcacaacactccctctgggctctcttcctgctcctccagattctgctgctttccagttctctgttgatcctgagactaacaattggagactgaggccagagcaactggctcctggcagctgtgcttgtccgtttcctgtcagagtgatcccaggtttcctcctggcccgtcccatggtccctccacaggagtgtgagaggatgggggaagcactgtgggaagaccaccaaagatggctggacagtgggagagagcacgttgtgaagcatcccagcctcgtgttgaggttccagacttagaaacagacccctctgtacagggggattgtggtgagtgagaatcaaggccaccttgtgtgttttctcactctcgaatgcaagtgggagagggaaaatgactcgggacgccattgtaacggttcctggaagctgggccctctcattggcatatacagtactcctcgctgcagggcactgtcccaccgggatccagttgcaaagtttgtcttgacagttgaaggcctcgcttagttgtactggattctcagggagccctctgtggccttttgctttgcgtgctgtttcccttgtaccagagggcggcaccgtggaaattctgttttccctgtagcatattgtgttggattgcattactggcagagaaaggacaaggtgccattcaagtcctagggtgggcttccagctgccttaatagaagtactcaagtcttttgggtagtgagctggaaagcctacaggaaaagaggggtacctgttttcatttgaaaactttgattcatggaacctttaaaactaatctcagaaaaatttttggtgcccatgcagctgtagttgttcactgctttcctggatggatgggactcttatgtcataacttctgttactcctttggcccaacacggtgcgttggcccaacggtgcgttggcccaa

SEQ ID NO: 439094 - DNA, 2352 bp, Homo sapiens
gccgggtgttaattcggcgaggcgtcacggaggattcggttaggaggaacagcacagcatgctgggctctggatttaaagctgagcgcttaagagtgaatttgagattagtcataaatcgccttaaactattggagaaaaagaaaacggaactggcccagaaagcaaggaaggagattgctgactatctggctgctgggaaagatgaacgagctcggatccgtgtggagcacattatccgggaagactacctcgtggaggccatggagatcctggagctgtactgtgacctgctgctggctcggtttggccttatccagtctatgaaggaactagattctggtctggctgaatctgtgtctacattgatctgggctgctcctcgactccagtcagaagtggctgagttgaaaatagttgctgatcagctctgtgccaagtatagcaaggaatatggcaagctatgtaggaccaaccagattggaactgtgaatgacaggctaatgcacaagctgagtgtggaagccccacccaaaatcctggtggagagatacctgattgaaattgcaaagaattacaacgtaccctatgaacctgactctgtggtcatggcagaagctcctcctggggtagagacagatcttattgatgttggattcacagatgatgtgaagaaaggaggccctggaagaggagggagtggtggcttcacagcaccagttggtggacctgatggaacggtgccaatgcccatgcccatgcccatgcctatgccatctgcaaatacgcctttctcatatccactgccaaagggaccatcagatttcaatggactgccaatggggacttatcaggcctttcccaatattcatccacctcagataccagcaactcccccatcgtatgaatctgtagatgacattaatgctgataagaatatctcttctgcacagattgttggtcctggacccaagccagaagcctctgcaaagcttccttccagacctgcagataactatgacaactttgtcctaccagagttgccatctgtgccagacacactaccaactgcatctgctggtgccagcacctcagcatctgaagacattgactttgatgatctttcccggaggtttgaagagctgaaaaagaaaacataggtctcttaaaccaggcaactttcacgttttgggagttgagactgagcaatttctccttgtaacaaagaatctccatgaaattctgtttcatctgttaaccgtcactcagcacaacactccctctgggctctcttcctgctcctccagattctgctgctttccagttctctgttgatcctgagactaacaattggagactgaggccagagcaactggctcctggcagctgtgcttgtccgtttcctgtcagagtgatcccaggtttcctcctggcccgtcccatggtccctccacaggagtgtgagaggatgggggaagcactgtgggaagaccaccaaagatggctggacagtgggagagagcacgttgtgaagcatcccagcctcgtgttgaggttccagacttagaaacagacccctctgtacagggggattgtggtgagtgagaatcaaggccaccttgtgtgttttctcactctcgaatgcaagtgggagagggaaaatgactcgggacgccattgtaacggttcctggaagctgggccctctcattggcatatacagtactcctcgctgcagggcactgtcccaccgggatccagttgcaaagtttgtcttgacagttgaaggcctcgcttagttgtactggattctcagggagccctctgtggccttttgctttgcgtgctgtttcccttgtaccagagggcggcaccgtggaaattctgttttccctgtagcatattgtgttggattgcattactggcagagaaaggacaaggtgccattcaagtcctagggtgggcttccagctgccttaatagaagtactcaagtcttttgggtagtgagctggaaagcctacaggaaaagaggggtacctgttttcatttgaaaactttgattcatggaacctttaaaactaatctcagaaaaatttttggtgcccatgcagctgtagttgttcactgctttcctggatggatgggactcttatgtcataacttctgttactcctttggcccatagctaaggtcatccttccccacaggggtggctttgggattggatgatacagcttttgcttctgtgtagtatacctgtacatacttgtttcaggcagcctttctttaatgttttcagttggtttgtattctgtagctcagtagctgctaataaagttaaagatcctgtgt

SEQ ID NO: 439095 - DNA, 3290 bp, Homo sapiens
tttctgtagcctaggctggagtgctgtgacgtgatcacggtttactgcagcagcgaccttctgggctcaagcgatcttcctgcctcagcctcccgagtagctgagaccacaagtgctcactgctgctcccctaatttttaacttttttttttttttttttgtagcgatgcggtttcactatggtgtccaggctggtctgcaactcccgggctcaagcgatcctcccgccccgcctctcaaagtgctgggaaggtcccttccaggcttaagcagcgataatggttttcaagttaaaaacaaaggtaaccaaggaaaaagttttctctgaataccgagataaattagggaaatcgccagagactgtggtgctgaggaaacactactgaattataccacacagaccggagcgatgctggtccaaagggcaaccggacggcttaaaagcggggcgggggaacgcttagagcccgtagagggacacggaggcgctgggtgaagagtcagggatacgcaggcttcgaaaccccctcggccgctccacccagggggaaagtccagcgaaaggcggcagcagatcttagggagcaactcccggcgtcagagaggcggtactggcagccggttatggaagaatccggaaccaaggcactgggcgcggtgaggccgtgggcgcagagtccgagaatcaacagctgtggctggcctccccgcgcccagagcgaaattaagggcatgcccccagcagctgactcagtcggcgtggcgcttcccccaacgtctgccgtgcccccgccgcgggaagtagtccccggccgcgccgactccaaaggaaaccgagggagggtgccccgagtcagcgcgtgggtcccggcagcggcgatcgcgcagccaatccctggaaaggagggcgtggctatatcggccccgtggatccctccgcccgcgcttgttgtgctgaggccgagggagtcgccattttggatggtgaaccctgaagtcggtgtctgctgcgttcacggcaggattcggttaggaggaacagcacagcatgctgggctctggatttaaagctgagcgcttaagagtgaatttgagattagtcataaatcgccttaaactattggagaaaaagaaaacggaactggcccagaaagcaaggaaggagattgctgactatctggctgctgggaaagatgaacgagctcggatccgtgtggagcacattatccgggaagactacctcgtggaggccatggagatcctggagctgtactgtgacctgctgctggctcggtttggccttatccagtctatgaaggaactagattctggtctggctgaatctgtgtctacattgatctgggctgctcctcgactccagtcagaagtggctgagttgaaaatagttgctgatcagctctgtgccaagtatagcaaggaatatggcaagctatgtaggaccaaccagattggaactgtgaatgacaggctaatgcacaagctgagtgtggaagccccacccaaaatcctggtggagagatacctgattgaaattgcaaagaattacaacgtaccctatgaacctgactctgtggtcatgatgatgtgaagaaaggaggccctggaagaggagggagtggtggcttcacagcaccagttggtggacctgatggaacggtgccaatgcccatgcccatgcccatgcctatgccatctgcaaatacgcctttctcatatccactgccaaagggaccatcagatttcaatggactgccaatggggacttatcaggcctttcccaatattcatccacctcagataccagcaactcccccatcgtatgaatctgtagatgacattaatgctgataagaatatctcttctgcacagattgttggtcctggacccaagccagaagcctctgcaaagcttccttccagacctgcagataactatgacaactttgtcctaccagagttgccatctgtgccagacacactaccaactgcatctgctggtgccagcacctcagcatctgaagacattgactttgatgatctttcccggaggtttgaagagctgaaaaagaaaacataggtctcttaaaccaggcaactttcacgttttgggagttgagactgagcaatttctccttgtaacaaagaatctccatgaaattctgtttcatctgttaaccgtcactcagcacaacactccctctgggctctcttcctgctcctccagattctgctgctttccagttctctgttgatcctgagactaacaattggagactgaggccagagcaactggctcctggcagctgtgcttgtccgtttcctgtcagagtgatcccaggtttcctcctggcccgtcccatggtccctccacaggagtgtgagaggatgggggaagcactgtgggaagaccaccaaagatggctggacagtgggagagagcacgttgtgaagcatcccagcctcgtgttgaggttccagacttagaaacagacccctctgtacagggggattgtggtgagtgagaatcaaggccaccttgtgtgttttctcactctcgaatgcaagtgggagagggaaaatgactcgggacgccattgtaacggttcctggaagctgggccctctcattggcatatacagtactcctcgctgcagggcactgtcccaccgggatccagttgcaaagtttgtcttgacagttgaaggcctcgcttagttgtactggattctcagggagccctctgtggccttttgctttgcgtgctgtttcccttgtaccagagggcggcaccgtggaaattctgttttccctgtagcatattgtgttggattgcattactggcagagaaaggacaaggtgccattcaagtcctagggtgggcttccagctgccttaatagaagtactcaagtcttttgggtagtgagctggaaagcctacaggaaaagaggggtacctgttttcatttgaaaactttgattcatggaacctttaaaactaatctcagaaaaatttttggtgcccatgcagctgtagttgttcactgctttcctggatggatgggactcttatgtcataacttctgttactcctttggcccatagctaaggtcatccttccccacaggggtggctttgggattggatgatacagcttttgcttctgtgtagtatacctgtacatacttgtttcaggcagcctttctttaatgttttcagttggtttgtattctgtagctcagtagctgctaataaagttaaagatcctgtgt

SEQ ID NO: 439096 - DNA, 2590 bp, Homo sapiens
tttctgtagcctaggctggagtgctgtgacgtgatcacggtttactgcagcagcgaccttctgggctcaagcgatcttcctgcctcagcctcccgagtagctgagaccacaagtgctcactgctgctcccctaatttttaacttttttttttttttttttgtagcgatgcggtttcactatggtgtccaggctggtctgcaactcccgggctcaagcgatcctcccgccccgcctctcaaagtgctgggaaggtcccttccaggcttaagcagcgataatggttttcaagttaaaaacaaaggtaaccaaggaaaaagttttctctgaataccgagataaattagggaaatcgccagagactgtggtgctgaggaaacactactgaattataccacacagaccggagcgatgctggtccaaagggcaaccggacggcttaaaagcggggcgggggaacgcttagagcccgtagagggacacggaggcgctgggtgaagagtcagggatacgcaggcttcgaaaccccctcggccgctccacccagggggaaagtccagcgaaaggcggcagcagatcttagggagcaactcccggcgtcagagaggcggtactggcagccggttatggaagaatccggaaccaaggcactgggcgcggtgaggccgtgggcgcagagtccgagaatcaacagctgtggctggcctccccgcgcccagagcgaaattaagggcatgcccccagcagctgactcagtcggcgtggcgcttcccccaacgtctgccgtgcccccgccgcgggaagtagtccccggccgcgccgactccaaaggaaaccgagggagggtgccccgagtcagcgcgtgggtcccggcagcggcgatcgcgcagccaatccctggaaaggagggcgtggctatatcggccccgtggatccctccgcccgcgcttgttgtgctgaggccgagggagtcgccattttggatggtgaaccctgaagtcggtgtctgctgcgttcacggcaggattcggttaggaggaacagcacagcatgctgggctctggatttaaagctgagcgcttaagagtgaatttgagattagtcataaatcgccttaaactattggagaaaaagaaaacggaactggcccagaaagcaaggaaggagattgctgactatctggctgctgggaaagatgaacgagctcggatccgtgtggagcacattatccgggaagactacctcgtggaggccatggagatcctggagctgtactgtgacctgctgctggctcggtttggccttatccagtctatgaaggaactagattctggtctggctgaatctgtgtctacattgatctgggctgctcctcgactccagtcagaagtggctgagttgaaaatagttgctgatcagctctgtgccaagtatagcaaggaatatggcaagctatgtaggaccaaccagattggaactgtgaatgacaggctaatgcacaagctgagtgtggaagccccacccaaaatcctggtggagagatacctgattgaaattgcaaagaattacaacgtaccctatgaacctgactctgtggtcatggcagaagctcctcctggggtagagacagatcttattgatgttggattcacagatgatgtgaagaaaggaggccctggaagaggagggagtggtggcttcacagcaccagttggtggacctgatggaacggtgccaatgcccatgcccatgcccatgcctatgccatctgcaaatacgcctttctcatatccactgccaaagggaccatcagatttcaatggactgccaatggggacttatcaggcctttcccaatattcatccacctcagataccagcaactcccccatcgtatgaatctgtagatgacattaatgctgataagaatatctcttctgcacagattgttggtcctggacccaagccagaagcctctgcaaagcttccttccagacctgcagataactatgacaactttgtcctaccagagttgccatctgtgccagacacactaccaactgcatctgctggtgccagcacctcagcatctgaagacattgactttgatgatctttcccggaggtttgaagagctgaaaaagaaaacataggtctcttaaaccaggcaactttcacgttttgggagttgagactgagcaatttctccttgtaacaaagaatctccatgaaattctgtttcatctgttaaccgtcactcagcacaacgagcggctcctcgtgtggcgcgtggggggggaggaggacagaggctgcggtttgactttgttaatttttcttttgttatattgtatttgctagtctctgactttcctcaaaacgaaggtggaatttactacgtgtgtgtcaggatctggtgttttgaattggtgcctgcctatagagatatattcacagttcaaaagtcaggtgctgagagaatggtttaaagacaaattcaatgaaggtactattgttgtcgatatagttgttgatgagttcgtttggttttcgtgatattttcccgcaactgagcctgtcgaagagcacccaaa

SEQ ID NO: 439097 - DNA, 2061 bp, Homo sapiens
tttctgtagcctaggctggagtgctgtgacgtgatcacggtttactgcagcagcgaccttctgggctcaagcgatcttcctgcctcagcctcccgagtagctgagaccacaagtgctcactgctgctcccctaatttttaacttttttttttttttttttgtagcgatgcggtttcactatggtgtccaggctggtctgcaactcccgggctcaagcgatcctcccgccccgcctctcaaagtgctgggaaggtcccttccaggcttaagcagcgataatggttttcaagttaaaaacaaaggtaaccaaggaaaaagttttctctgaataccgagataaattagggaaatcgccagagactgtggtgctgaggaaacactactgaattataccacacagaccggagcgatgctggtccaaagggcaaccggacggcttaaaagcggggcgggggaacgcttagagcccgtagagggacacggaggcgctgggtgaagagtcagggatacgcaggcttcgaaaccccctcggccgctccacccagggggaaagtccagcgaaaggcggcagcagatcttagggagcaactcccggcgtcagagaggcggtactggcagccggttatggaagaatccggaaccaaggcactgggcgcggtgaggccgtgggcgcagagtccgagaatcaacagctgtggctggcctccccgcgcccagagcgaaattaagggcatgcccccagcagctgactcagtcggcgtggcgcttcccccaacgtctgccgtgcccccgccgcgggaagtagtccccggccgcgccgactccaaaggaaaccgagggagggtgccccgagtcagcgcgtgggtcccggcagcggcgatcgcgcagccaatccctggaaaggagggcgtggctatatcggccccgtggatccctccgcccgcgcttgttgtgctgaggccgagggagtcgccattttggatggtgaaccctgaagtcggtgtctgctgcgttcacggcaggattcggttaggaggaacagcacagcatgctgggctctggatttaaagctgagcgcttaagagtgaatttgagattagtcataaatcgccttaaactattggagaaaaagaaaacggaactggcccagaaagcaaggaaggagattgctgactatctggctgctgggaaagatgaacgagctcggatccgtgtggagcacattatccgggaagactacctcgtggaggccatggagatcctggagctgtactgtgacctgctgctggctcggtttggccttatccagtctatgaaggaactagattctggtctggctgaatctgtgtctacattgatctgggctgctcctcgactccagtcagaagtggctgagttgaaaatagttgctgatcagctctgtgccaagtatagcaaggaatatggcaagctatgtaggaccaaccagattggaactgtgaatgacaggttgaaggcctcgcttagttgtactggattctcagggagccctctgtggccttttgctttgcgtgctgtttcccttgtaccagagggcggcaccgtggaaattctgttttccctgtagcatattgtgttggattgcattactggcagagaaaggacaaggtgccattcaagtcctagggtgggcttccagctgccttaatagaagtactcaagtcttttgggtagtgagctggaaagcctacaggaaaagaggggtacctgttttcatttgaaaactttgattcatggaacctttaaaactaatctcagaaaaatttttggtgcccatgcagctgtagttgttcactgctttcctggatggatgggactcttatgtcataacttctgttactcctttggcccatagctaaggtcatccttccccacaggggtggctttgggattggatgatacagcttttgcttctgtgtagtatacctgtacatacttgtttcaggcagcctttctttaatgttttcagttggtttgtattctgtagctcagtagctgctaataaagttaaagatcctgtgt

SEQ ID NO: 439098 - DNA, 1400 bp, Homo sapiens
tttctgtagcctaggctggagtgctgtgacgtgatcacggtttactgcagcagcgaccttctgggctcaagcgatcttcctgcctcagcctcccgagtagctgagaccacaagtgctcactgctgctcccctaatttttaacttttttttttttttttttgtagcgatgcggtttcactatggtgtccaggctggtctgcaactcccgggctcaagcgatcctcccgccccgcctctcaaagtgctgggaaggtcccttccaggcttaagcagcgataatggttttcaagttaaaaacaaaggtaaccaaggaaaaagttttctctgaataccgagataaattagggaaatcgccagagactgtggtgctgaggaaacactactgaattataccacacagaccggagcgatgctggtccaaagggcaaccggacggcttaaaagcggggcgggggaacgcttagagcccgtagagggacacggaggcgctgggtgaagagtcagggatacgcaggcttcgaaaccccctcggccgctccacccagggggaaagtccagcgaaaggcggcagcagatcttagggagcaactcccggcgtcagagaggcggtactggcagccggttatggaagaatccggaaccaaggcactgggcgcggtgaggccgtgggcgcagagtccgagaatcaacagctgtggctggcctccccgcgcccagagcgaaattaagggcatgcccccagcagctgactcagtcggcgtggcgcttcccccaacgtctgccgtgcccccgccgcgggaagtagtccccggccgcgccgactccaaaggaaaccgagggagggtgccccgagtcagcgcgtgggtcccggcagcggcgatcgcgcagccaatccctggaaaggagggcgtggctatatcggccccgtggatccctccgcccgcgcttgttgtgctgaggccgagggagtcgccattttggatggtgaaccctgaagtcggtgtctgctgcgttcacggcaggattcggttaggaggaacagcacagcatgctgggctctggatttaaagctgagcgcttaagagtgaatttgagattagtcataaatcgccttaaactattggagaaaaagaaaaaaaaatttttggtgcccatgcagctgtagttgttcactgctttcctggatggatgggactcttatgtcataacttctgttactcctttggcccatagctaaggtcatccttccccacaggggtggctttgggattggatgatacagcttttgcttctgtgtagtatacctgtacatacttgtttcaggcagcctttctttaatgttttcagttggtttgtattctgtagctcagtagctgctaataaagttaaagatcctgtgt

SEQ ID NO: 439099 - DNA, 501 bp, Homo sapiens
  misc_feature (114)..(114): n is a, c, g, or t
  misc_feature (132)..(132): n is a, c, g, or t
  misc_feature (134)..(134): n is a, c, g, or t
  misc_feature (141)..(141): n is a, c, g, or t
cgatttatttcggtaattccagggttttcccactaaatatgttggaaaacaaggtccagttagtcttaataggactcactatagttggaaatgggtctcgggccgcccctcttnccgtctctctcactctcncnctctctntctctctctctctctctctctctctctctctctctctctctctctctctctcctcgtgccgaattcggcaggatgggaaaggagctcttcagttggagatctaggcagtgggttaagccagacccctaaagtgaccctttcctcttctgccctattcttctcagaccctcagaaagacatccaatttttttaaatccctgtagctccaagcctggtctcatttgcttccctgccaggctcatcgtgtgtataccacatttgtgccccactgacctgaaggttccatgtaactgtatacacatgaatacttaaatgccaacatttaaaataatttgataaagtctttgtagccactcagca

SEQ ID NO: 439100 - DNA, 5668 bp, Homo sapiens
gggggaatcgcgtaatggcggacacaggcagggcgagcgcggctgggggcgtagcgcgctgagggggtccggccgtttggcagcccgcgaggcggtccgcgggagcacactctgtgcggagactgggcggccggccgacccttcctgtcgctgacggcgactgcgggaggccaggttgtttttcaccattcagaacattgcctgaagcaggtccaccatgccgttagtaacgaggaacatcgagccaaggcacctgtgccgtcagacgttgcctagcgttagaagcgagctggaatgcgtgaccaacatcaccctggcaaatgtcatccgacagctgggcagcctgagtaaatatgcagaggacatttttggagagctctttactcaggcaaatacctttgcctctcgggtaagctcccttgctgagagggtcgaccgactacaggttaaagtcactcagctggatcccaaggaagaagaagtgtcactgcaaggaatcaacacccgaaaagccttcagaagttccaccattcaagaccagaagctttttgacagaaactctctcccagtgcctgtcttagaaacatacaatacctgtgatactcctccccctctcaacaatcttaccccttacagggacgatggaaaagaggcactcaaattctacacagacccttcatacttctttgatctttggaaggagaagatgctgcaggacaccaaggatatcatgaaagagaagagaaagcataggaaagaaaagaaagataatccaaatcgagggaatgtaaacccacgtaaaatcaagacacgtaaggaagagtgggagaaaatgaagatggggcaagaatttgtggagtccaaagaaaagctggggacttctgggtatccacccactttggtgtaccagaatggcagcattggctgtgttgaaaacgtggatgcaagtagctatccgccaccaccacagtcagactctgcttcttcaccttctccttccttctccgaggacaacttgcctcctccaccagcagaattcagttacccagtggacaaccaaagaggatctggtttggctggacccaaaagatccagtgtggtcagcccaagccatccaccaccagctcctcctctaggctctccaccaggccctaaacccgggtttgctccaccacctgcccctccgccacctccgcctccaatgataggcatcccacctccaccaccgcctgtaggatttgggtctccagggacgcctccaccaccctcacccccatctttcccacctcaccctgattttgctgcccctccacctcctcctccaccaccagcagctgactacccaactctgccaccacctcccttgtcccagccaacaggaggagcacctcctcctccccctcctcctcctcctccggggccccctcctccccctttcactggtgcagatggccagcctgctataccaccaccgctttctgataccaccaagcccaagtcctccttgcctgccgtgagcgatgcccgtagcgacctgctttcagccatccgtcaaggttttcagctgcgcagggttgaggagcagcgggaacaagagaagcgggatgttgtgggcaatgacgtggccaccatcttgtctcgtcgcattgctgttgagtacagtgactcagaagatgactcctctgaatttgatgaggacgactggtccgattaactctttctgcctgctgcccaccttctttttctttccttcctacctgccttctttgatgccaaccccaacagacccgtagggggagaaaagggaggaaaaaagtaattttaaggggccaaagctttccctgaagcaaccaaagatatatccaagtgcttcctccaagtcaacatgtatttcctctccccattttcaggccctgtggggctcctgaggttcagtagctgggatgttccctctttccttcaagtgcctgttgcatattgaaaggaaggagaaatcccaaagcagattcctttgatcgggtttctgttggagatggggcttcccttaggagccatattcaactacagccttctaaaacctgtgccctcagccacttcgaatgccagccaccttctggttctaaaacggggagtggtctgaatgaacacagctgacccctttcccgcgcactgaaagggcagagtaggccgaagggtccaagggccagactgcctcaccctctgccctaatcagcagggtgggcctgccttttgctaagcgatctctatgcctgggatgccctttattccaggaggcatcaagcctctaaagaatgtctcacctcctctgcccaaaaatgatgcctttctgtaggctggtgttgttgcctccctcccaggatccctttggtgagtatggtgttcaggatgcaccaccaccacctctagataccttcaggcaacacagcccagttttaacctctagtatccatgaccaaactatccctgacacatgaggacaggggcctcttctggctgtcaggagcaaagcctgaagacttggagctgcaggactggaagaacagtggagccccgtgggtctcaccctttaaggatgctgaggcctagagatgggaagtgacttgctcaaggtcacacaattggatagtgacatagctagagcgcagagttcctgattccaagtcacctgtgctttctgggaccaaagaatgggcacctgctggagtccgggcagagctttctcagttgtattgctactccagacctcaccataggttggggtcccagtaggaaggctcagggtctgtgccagccctgtcggtgctgctcagaccttcatagcctctcttgtcattctttgttgccccttttctgtcaccagccaaccacatagccttgggaccagcctctctgggggaccagaagtagtgagagaaggaaggggataggcagctttgacaggtgctgctttcaattcctctgcaactcctcccccttttatttccccaatttaaacaaagattctgccaactgtggaaacttcagtccctcaggctggcagccatgccagtacctgcctgggggtggggggtgcctggcagccatgaagcaggctgaaaggcagaggggctccaggtcctgtttccagctcccctcactgcacatggtgaagctcgctccctccctccctcccttcccgcttttcccagagctaatacacaggtgctattattcagaaaaaaactggtcagctctagccaacagtgaggtttcttttcttctgccctaactattgtgtagcctcttatgctgaaatcggcttctgctggcttctccggctttcagagccctgaaacaaagagaaacaggatctgtccctacccagcacagcaaatggttgtagtaattgccaaagccctcataaagccctccggcttgaggagagagtgtatagtcatgggttctgcctctgtgcccttgctggccgcttctcctctgccttctttcctggaactcagggtgtggggactgagcctgtaggggacagcatgccgtcttgctgtggccactcccaagtgtgccctcttccctctttacacatcaggtgtctctggcacaggacttggcactaagctccatgctgagacaccaggctatgtgggcccccaccttgtttcccagcctgcaccttagaagccgaaggtgctttcatcagaaccctaaaatggtcgttgaaggcgcctgggccgcagcccagcagtagttggagaggcaggcagagggcagtggttctcccaaataggagacctggggcctggccaggccagggtttgggcctaatggctttgactaaattacccccatcctccttgcccggaaaagggagagctagagccactcactgtcattctgctctgaccttgaagggggcggtgttggcctggcttctggaatggactgagtccatcgtggaaagggctgggggcaggaggaggtggggaggggcactgcctgcggaaggtaggattagatcattagctcagtgacctcctagggtttcgatgtgctatgttctcatcctacagttggtttggtaatgatctgcaagtcccggagagcaacagcacagctctgcctgacgctctcattaaaatctatgcagccaagctcggcactttgtagcagccggccttgcgaagcctcctcagctcggggggccggggacccagtgagccgagaggccctctgggctccacttatgcatatgcaccaaaaaaaaaaaaaaaaaaaaaagggtttttttagaacccagagccctttaagatgataaaggacccaatgcaggtaatcctgtttttggactcacgtaatgtagaatgcaaagtttagtgattatttaatctgggcctaagctagtgagagtatggaacaatggcccataaggactcctaagcgccgaagccaaggagcctcctcccttcctggttcaccccgcccaagggacctgcccccattcctgtggccctggggcccagcttccaatagtgtcagaagcaacttgtggctttgccttggttgtgagatgggtacattccaaaggagcagcctgggggagggggcaggctcagccagcccttggaggctcagagcagctggcccaggctccagctcgcctccagtggaagcccgagcgccctcagaaacgaccctggccaatgtcaacgcagagccgaggcggtgttgtcacggctaatgtgaaatctcttcccgtggcgcccatcctctgactctgcagtgccagcttggacagattgaggtctctgtggctttggtgaccctgcttaagcattcccaccgtgtcccagctctgctctaggactgcctcccactgcggcccctcacctgacttcagggtatggggagggagggagccagtgctccaaggccagggggctttgctcatgagagatgtcaggcttcctggaggcatcaggctttgagccctgctggggtccaactgacctgggaccaggtgtcgcgcagagatgtgcctcattctgtgcctccttctgtgcctcctaccatgttccctttaactgtgcctcagtgtgggttagggaacaattttgttattgtattaagtttattcagttaattcacttgaggaactaaccagtttttactttctgtctagaatgatgtacatgtagtagagtaagccataatgctcccaaagtgccttgttttctctgatacaaacatatttataaggacatattcctgtgggttcttgggtgtgtttgccacatcaagattttagggaaggggggtatatgtgtagtagggatgccgtttgaaaacaggcactcttcccctgaggatgggaaaggagctcttcagttggagatctaggcagtgggttaagccagacccctaaagtgaccctttcctcttctgccctattcttctcagaccctcagaaagacatccaatttttttaaatccctgtagctccaagcctggtctcatttgcttccctgccaggctcatcgtgtgtataccacatttgtgccccactgacctgaaggttccatgtaactgtatacacatgaatacttaaatgccaacatttaaaataatttgataaagtctttgtagccactcagca

SEQ ID NO: 439101 - DNA, 5628 bp, Homo sapiens
cagcctgctataccaccaccgctttctgataccaccaagcccaagtcctccttgcctgccgggagcacactctgtgcggagactgggcggccggccgacccttcctgtcgctgacggcgactgcgggaggccaggttgtttttcaccattcagaacattgcctgaagcaggtccaccatgccgttagtaacgaggaacatcgagccaaggcacctgtgccgtcagacgttgcctagcgttagaagcgagctggaatgcgtgaccaacatcaccctggcaaatgtcatccgacagctgggcagcctgagtaaatatgcagaggacatttttggagagctctttactcaggcaaatacctttgcctctcgggtaagctcccttgctgagagggtcgaccgactacaggttaaagtcactcagctggatcccaaggaagaagaagtgtcactgcaaggaatcaacacccgaaaagccttcagaagttccaccattcaagaccagaagctttttgacagaaactctctcccagtgcctgtcttagaaacatacaatacctgtgatactcctccccctctcaacaatcttaccccttacagggacgatggaaaagaggcactcaaattctacacagacccttcatacttctttgatctttggaaggagaagatgctgcaggacaccaaggatatcatgaaagagaagagaaagcataggaaagaaaagaaagataatccaaatcgagggaatgtaaacccacgtaaaatcaagacacgtaaggaagagtgggagaaaatgaagatggggcaagaatttgtggagtccaaagaaaagctggggacttctgggtatccacccactttggtgtaccagaatggcagcattggctgtgttgaaaacgtggatgcaagtagctatccgccaccaccacagtcagactctgcttcttcaccttctccttccttctccgaggacaacttgcctcctccaccagcagaattcagttacccagtggacaaccaaagaggatctggtttggctggacccaaaagatccagtgtggtcagcccaagccatccaccaccagctcctcctctaggctctccaccaggccctaaacccgggtttgctccaccacctgcccctccgccacctccgcctccaatgataggcatcccacctccaccaccgcctgtaggatttgggtctccagggacgcctccaccaccctcacccccatctttcccacctcaccctgattttgctgcccctccacctcctcctccaccaccagcagctgactacccaactctgccaccacctcccttgtcccagccaacaggaggagcacctcctcctccccctcctcctcctcctccggggccccctcctccccctttcactggtgcagatggccagcctgctataccaccaccgctttctgataccaccaagcccaagtcctccttgcctgccgtgagcgatgcccgtagcgacctgctttcagccatccgtcaaggttttcagctgcgcagggttgaggagcagcgggaacaagagaagcgggatgttgtgggcaatgacgtggccaccatcttgtctcgtcgcattgctgttgagtacagtgactcagaagatgactcctctgaatttgatgaggacgactggtccgattaactctttctgcctgctgcccaccttctttttctttccttcctacctgccttctttgatgccaaccccaacagacccgtagggggagaaaagggaggaaaaaagtaattttaaggggccaaagctttccctgaagcaaccaaagatatatccaagtgcttcctccaagtcaacatgtatttcctctccccattttcaggccctgtggggctcctgaggttcagtagctgggatgttccctctttccttcaagtgcctgttgcatattgaaaggaaggagaaatcccaaagcagattcctttgatcgggtttctgttggagatggggcttcccttaggagccatattcaactacagccttctaaaacctgtgccctcagccacttcgaatgccagccaccttctggttctaaaacggggagtggtctgaatgaacacagctgacccctttcccgcgcactgaaagggcagagtaggccgaagggtccaagggccagactgcctcaccctctgccctaatcagcagggtgggcctgccttttgctaagcgatctctatgcctgggatgccctttattccaggaggcatcaagcctctaaagaatgtctcacctcctctgcccaaaaatgatgcctttctgtaggctggtgttgttgcctccctcccaggatccctttggtgagtatggtgttcaggatgcaccaccaccacctctagataccttcaggcaacacagcccagttttaacctctagtatccatgaccaaactatccctgacacatgaggacaggggcctcttctggctgtcaggagcaaagcctgaagacttggagctgcaggactggaagaacagtggagccccgtgggtctcaccctttaaggatgctgaggcctagagatgggaagtgacttgctcaaggtcacacaattggatagtgacatagctagagcgcagagttcctgattccaagtcacctgtgctttctgggaccaaagaatgggcacctgctggagtccgggcagagctttctcagttgtattgctactccagacctcaccataggttggggtcccagtaggaaggctcagggtctgtgccagccctgtcggtgctgctcagaccttcatagcctctcttgtcattctttgttgccccttttctgtcaccagccaaccacatagccttgggaccagcctctctgggggaccagaagtagtgagagaaggaaggggataggcagctttgacaggtgctgctttcaattcctctgcaactcctcccccttttatttccccaatttaaacaaagattctgccaactgtggaaacttcagtccctcaggctggcagccatgccagtacctgcctgggggtggggggtgcctggcagccatgaagcaggctgaaaggcagaggggctccaggtcctgtttccagctcccctcactgcacatggtgaagctcgctccctccctccctcccttcccgcttttcccagagctaatacacaggtgctattattcagaaaaaaactggtcagctctagccaacagtgaggtttcttttcttctgccctaactattgtgtagcctcttatgctgaaatcggcttctgctggcttctccggctttcagagccctgaaacaaagagaaacaggatctgtccctacccagcacagcaaatggttgtagtaattgccaaagccctcataaagccctccggcttgaggagagagtgtatagtcatgggttctgcctctgtgcccttgctggccgcttctcctctgccttctttcctggaactcagggtgtggggactgagcctgtaggggacagcatgccgtcttgctgtggccactcccaagtgtgccctcttccctctttacacatcaggtgtctctggcacaggacttggcactaagctccatgctgagacaccaggctatgtgggcccccaccttgtttcccagcctgcaccttagaagccgaaggtgctttcatcagaaccctaaaatggtcgttgaaggcgcctgggccgcagcccagcagtagttggagaggcaggcagagggcagtggttctcccaaataggagacctggggcctggccaggccagggtttgggcctaatggctttgactaaattacccccatcctccttgcccggaaaagggagagctagagccactcactgtcattctgctctgaccttgaagggggcggtgttggcctggcttctggaatggactgagtccatcgtggaaagggctgggggcaggaggaggtggggaggggcactgcctgcggaaggtaggattagatcattagctcagtgacctcctagggtttcgatgtgctatgttctcatcctacagttggtttggtaatgatctgcaagtcccggagagcaacagcacagctctgcctgacgctctcattaaaatctatgcagccaagctcggcactttgtagcagccggccttgcgaagcctcctcagctcggggggccggggacccagtgagccgagaggccctctgggctccacttatgcatatgcaccaaaaaaaaaaaaaaaaaaaaaagggtttttttagaacccagagccctttaagatgataaaggacccaatgcaggtaatcctgtttttggactcacgtaatgtagaatgcaaagtttagtgattatttaatctgggcctaagctagtgagagtatggaacaatggcccataaggactcctaagcgccgaagccaaggagcctcctcccttcctggttcaccccgcccaagggacctgcccccattcctgtggccctggggcccagcttccaatagtgtcagaagcaacttgtggctttgccttggttgtgagatgggtacattccaaaggagcagcctgggggagggggcaggctcagccagcccttggaggctcagagcagctggcccaggctccagctcgcctccagtggaagcccgagcgccctcagaaacgaccctggccaatgtcaacgcagagccgaggcggtgttgtcacggctaatgtgaaatctcttcccgtggcgcccatcctctgactctgcagtgccagcttggacagattgaggtctctgtggctttggtgaccctgcttaagcattcccaccgtgtcccagctctgctctaggactgcctcccactgcggcccctcacctgacttcagggtatggggagggagggagccagtgctccaaggccagggggctttgctcatgagagatgtcaggcttcctggaggcatcaggctttgagccctgctggggtccaactgacctgggaccaggtgtcgcgcagagatgtgcctcattctgtgcctccttctgtgcctcctaccatgttccctttaactgtgcctcagtgtgggttagggaacaattttgttattgtattaagtttattcagttaattcacttgaggaactaaccagtttttactttctgtctagaatgatgtacatgtagtagagtaagccataatgctcccaaagtgccttgttttctctgatacaaacatatttataaggacatattcctgtgggttcttgggtgtgtttgccacatcaagattttagggaaggggggtatatgtgtagtagggatgccgtttgaaaacaggcactcttcccctgaggatgggaaaggagctcttcagttggagatctaggcagtgggttaagccagacccctaaagtgaccctttcctcttctgccctattcttctcagaccctcagaaagacatccaatttttttaaatccctgtagctccaagcctggtctcatttgcttccctgccaggctcatcgtgtgtataccacatttgtgccccactgacctgaaggttccatgtaactgtatacacatgaatacttaaatgccaacatttaaaataatttgataaagtctttgtagccactcagca

SEQ ID NO: 439102 - DNA, 5404 bp, Homo sapiens
agaggaaccagtggtagaaatcccctctgatgtaccaggaaatccgaatatcctcagggagatctctgtggccatgcagatcatcagaagtaatcaggatccctgctgctatcacctgtacttgccctgacaatgcacattcatctaccaggaattgaaagtaaggctaaggttcttaaaaagtctgataagtagagaggtgccattcgggggcattgaaatgctggtatgggagaggaggtatgcaatcgattcaaatgacttcttgattccttggtgtaaaaactgctaactggtaggtgtttggaatattggatttggttgggagctcatctgtctactgacagctacttgtcttcatttctatcccagggacgatggaaaagaggcactcaaattctacacagacccttcatacttctttgatctttggaaggagaagatgctgcaggacaccaaggatatcatgaaagagaagagaaagcataggaaagaaaagaaagataatccaaatcgagggaatgtaaacccacgtaaaatcaagacacgtaaggaagagtgggagaaaatgaagatggggcaagaatttgtggagtccaaagaaaagctggggacttctgggtatccacccactttggtgtaccagaatggcagcattggctgtgttgaaaacgtggatgcaagtagctatccgccaccaccacagtcagactctgcttcttcaccttctccttccttctccgaggacaacttgcctcctccaccagcagaattcagttacccagtggacaaccaaagaggatctggtttggctggacccaaaagatccagtgtggtcagcccaagccatccaccaccagctcctcctctaggctctccaccaggccctaaacccgggtttgctccaccacctgcccctccgccacctccgcctccaatgataggcatcccacctccaccaccgcctgtaggatttgggtctccagggacgcctccaccaccctcacccccatctttcccacctcaccctgattttgctgcccctccacctcctcctccaccaccagcagctgactacccaactctgccaccacctcccttgtcccagccaacaggaggagcacctcctcctccccctcctcctcctcctccggggccccctcctccccctttcactggtgcagatggccagcctgctataccaccaccgctttctgataccaccaagcccaagtcctccttgcctgccgtgagcgatgcccgtagcgacctgctttcagccatccgtcaaggttttcagctgcgcagggttgaggagcagcgggaacaagagaagcgggatgttgtgggcaatgacgtggccaccatcttgtctcgtcgcattgctgttgagtacagtgactcagaagatgactcctctgaatttgatgaggacgactggtccgattaactctttctgcctgctgcccaccttctttttctttccttcctacctgccttctttgatgccaaccccaacagacccgtagggggagaaaagggaggaaaaaagtaattttaaggggccaaagctttccctgaagcaaccaaagatatatccaagtgcttcctccaagtcaacatgtatttcctctccccattttcaggccctgtggggctcctgaggttcagtagctgggatgttccctctttccttcaagtgcctgttgcatattgaaaggaaggagaaatcccaaagcagattcctttgatcgggtttctgttggagatggggcttcccttaggagccatattcaactacagccttctaaaacctgtgccctcagccacttcgaatgccagccaccttctggttctaaaacggggagtggtctgaatgaacacagctgacccctttcccgcgcactgaaagggcagagtaggccgaagggtccaagggccagactgcctcaccctctgccctaatcagcagggtgggcctgccttttgctaagcgatctctatgcctgggatgccctttattccaggaggcatcaagcctctaaagaatgtctcacctcctctgcccaaaaatgatgcctttctgtaggctggtgttgttgcctccctcccaggatccctttggtgagtatggtgttcaggatgcaccaccaccacctctagataccttcaggcaacacagcccagttttaacctctagtatccatgaccaaactatccctgacacatgaggacaggggcctcttctggctgtcaggagcaaagcctgaagacttggagctgcaggactggaagaacagtggagccccgtgggtctcaccctttaaggatgctgaggcctagagatgggaagtgacttgctcaaggtcacacaattggatagtgacatagctagagcgcagagttcctgattccaagtcacctgtgctttctgggaccaaagaatgggcacctgctggagtccgggcagagctttctcagttgtattgctactccagacctcaccataggttggggtcccagtaggaaggctcagggtctgtgccagccctgtcggtgctgctcagaccttcatagcctctcttgtcattctttgttgccccttttctgtcaccagccaaccacatagccttgggaccagcctctctgggggaccagaagtagtgagagaaggaaggggataggcagctttgacaggtgctgctttcaattcctctgcaactcctcccccttttatttccccaatttaaacaaagattctgccaactgtggaaacttcagtccctcaggctggcagccatgccagtacctgcctgggggtggggggtgcctggcagccatgaagcaggctgaaaggcagaggggctccaggtcctgtttccagctcccctcactgcacatggtgaagctcgctccctccctccctcccttcccgcttttcccagagctaatacacaggtgctattattcagaaaaaaactggtcagctctagccaacagtgaggtttcttttcttctgccctaactattgtgtagcctcttatgctgaaatcggcttctgctggcttctccggctttcagagccctgaaacaaagagaaacaggatctgtccctacccagcacagcaaatggttgtagtaattgccaaagccctcataaagccctccggcttgaggagagagtgtatagtcatgggttctgcctctgtgcccttgctggccgcttctcctctgccttctttcctggaactcagggtgtggggactgagcctgtaggggacagcatgccgtcttgctgtggccactcccaagtgtgccctcttccctctttacacatcaggtgtctctggcacaggacttggcactaagctccatgctgagacaccaggctatgtgggcccccaccttgtttcccagcctgcaccttagaagccgaaggtgctttcatcagaaccctaaaatggtcgttgaaggcgcctgggccgcagcccagcagtagttggagaggcaggcagagggcagtggttctcccaaataggagacctggggcctggccaggccagggtttgggcctaatggctttgactaaattacccccatcctccttgcccggaaaagggagagctagagccactcactgtcattctgctctgaccttgaagggggcggtgttggcctggcttctggaatggactgagtccatcgtggaaagggctgggggcaggaggaggtggggaggggcactgcctgcggaaggtaggattagatcattagctcagtgacctcctagggtttcgatgtgctatgttctcatcctacagttggtttggtaatgatctgcaagtcccggagagcaacagcacagctctgcctgacgctctcattaaaatctatgcagccaagctcggcactttgtagcagccggccttgcgaagcctcctcagctcggggggccggggacccagtgagccgagaggccctctgggctccacttatgcatatgcaccaaaaaaaaaaaaaaaaaaaaaagggtttttttagaacccagagccctttaagatgataaaggacccaatgcaggtaatcctgtttttggactcacgtaatgtagaatgcaaagtttagtgattatttaatctgggcctaagctagtgagagtatggaacaatggcccataaggactcctaagcgccgaagccaaggagcctcctcccttcctggttcaccccgcccaagggacctgcccccattcctgtggccctggggcccagcttccaatagtgtcagaagcaacttgtggctttgccttggttgtgagatgggtacattccaaaggagcagcctgggggagggggcaggctcagccagcccttggaggctcagagcagctggcccaggctccagctcgcctccagtggaagcccgagcgccctcagaaacgaccctggccaatgtcaacgcagagccgaggcggtgttgtcacggctaatgtgaaatctcttcccgtggcgcccatcctctgactctgcagtgccagcttggacagattgaggtctctgtggctttggtgaccctgcttaagcattcccaccgtgtcccagctctgctctaggactgcctcccactgcggcccctcacctgacttcagggtatggggagggagggagccagtgctccaaggccagggggctttgctcatgagagatgtcaggcttcctggaggcatcaggctttgagccctgctggggtccaactgacctgggaccaggtgtcgcgcagagatgtgcctcattctgtgcctccttctgtgcctcctaccatgttccctttaactgtgcctcagtgtgggttagggaacaattttgttattgtattaagtttattcagttaattcacttgaggaactaaccagtttttactttctgtctagaatgatgtacatgtagtagagtaagccataatgctcccaaagtgccttgttttctctgatacaaacatatttataaggacatattcctgtgggttcttgggtgtgtttgccacatcaagattttagggaaggggggtatatgtgtagtagggatgccgtttgaaaacaggcactcttcccctgaggatgggaaaggagctcttcagttggagatctaggcagtgggttaagccagacccctaaagtgaccctttcctcttctgccctattcttctcagaccctcagaaagacatccaatttttttaaatccctgtagctccaagcctggtctcatttgcttccctgccaggctcatcgtgtgtataccacatttgtgccccactgacctgaaggttccatgtaactgtatacacatgaatacttaaatgccaacatttaaaataatttgataaagtctttgtagccactcagca

SEQ ID NO: 439103 - DNA, 4261 bp, Homo sapiens
tgagttcttaaagactgaagacaggctattctctggtgcagatggccagcctgctataccaccaccgctttctgataccaccaagcccaagtcctccttgcctgccgtgagcgatgcccgtagcgacctgctttcagccatccgtcaaggttttcagctgcgcagggttgaggagcagcgggaacaagagaagcgggatgttgtgggcaatgacgtggccaccatcttgtctcgtcgcattgctgttgagtacagtgactcagaagatgactcctctgaatttgatgaggacgactggtccgattaactctttctgcctgctgcccaccttctttttctttccttcctacctgccttctttgatgccaaccccaacagacccgtagggggagaaaagggaggaaaaaagtaattttaaggggccaaagctttccctgaagcaaccaaagatatatccaagtgcttcctccaagtcaacatgtatttcctctccccattttcaggccctgtggggctcctgaggttcagtagctgggatgttccctctttccttcaagtgcctgttgcatattgaaaggaaggagaaatcccaaagcagattcctttgatcgggtttctgttggagatggggcttcccttaggagccatattcaactacagccttctaaaacctgtgccctcagccacttcgaatgccagccaccttctggttctaaaacggggagtggtctgaatgaacacagctgacccctttcccgcgcactgaaagggcagagtaggccgaagggtccaagggccagactgcctcaccctctgccctaatcagcagggtgggcctgccttttgctaagcgatctctatgcctgggatgccctttattccaggaggcatcaagcctctaaagaatgtctcacctcctctgcccaaaaatgatgcctttctgtaggctggtgttgttgcctccctcccaggatccctttggtgagtatggtgttcaggatgcaccaccaccacctctagataccttcaggcaacacagcccagttttaacctctagtatccatgaccaaactatccctgacacatgaggacaggggcctcttctggctgtcaggagcaaagcctgaagacttggagctgcaggactggaagaacagtggagccccgtgggtctcaccctttaaggatgctgaggcctagagatgggaagtgacttgctcaaggtcacacaattggatagtgacatagctagagcgcagagttcctgattccaagtcacctgtgctttctgggaccaaagaatgggcacctgctggagtccgggcagagctttctcagttgtattgctactccagacctcaccataggttggggtcccagtaggaaggctcagggtctgtgccagccctgtcggtgctgctcagaccttcatagcctctcttgtcattctttgttgccccttttctgtcaccagccaaccacatagccttgggaccagcctctctgggggaccagaagtagtgagagaaggaaggggataggcagctttgacaggtgctgctttcaattcctctgcaactcctcccccttttatttccccaatttaaacaaagattctgccaactgtggaaacttcagtccctcaggctggcagccatgccagtacctgcctgggggtggggggtgcctggcagccatgaagcaggctgaaaggcagaggggctccaggtcctgtttccagctcccctcactgcacatggtgaagctcgctccctccctccctcccttcccgcttttcccagagctaatacacaggtgctattattcagaaaaaaactggtcagctctagccaacagtgaggtttcttttcttctgccctaactattgtgtagcctcttatgctgaaatcggcttctgctggcttctccggctttcagagccctgaaacaaagagaaacaggatctgtccctacccagcacagcaaatggttgtagtaattgccaaagccctcataaagccctccggcttgaggagagagtgtatagtcatgggttctgcctctgtgcccttgctggccgcttctcctctgccttctttcctggaactcagggtgtggggactgagcctgtaggggacagcatgccgtcttgctgtggccactcccaagtgtgccctcttccctctttacacatcaggtgtctctggcacaggacttggcactaagctccatgctgagacaccaggctatgtgggcccccaccttgtttcccagcctgcaccttagaagccgaaggtgctttcatcagaaccctaaaatggtcgttgaaggcgcctgggccgcagcccagcagtagttggagaggcaggcagagggcagtggttctcccaaataggagacctggggcctggccaggccagggtttgggcctaatggctttgactaaattacccccatcctccttgcccggaaaagggagagctagagccactcactgtcattctgctctgaccttgaagggggcggtgttggcctggcttctggaatggactgagtccatcgtggaaagggctgggggcaggaggaggtggggaggggcactgcctgcggaaggtaggattagatcattagctcagtgacctcctagggtttcgatgtgctatgttctcatcctacagttggtttggtaatgatctgcaagtcccggagagcaacagcacagctctgcctgacgctctcattaaaatctatgcagccaagctcggcactttgtagcagccggccttgcgaagcctcctcagctcggggggccggggacccagtgagccgagaggccctctgggctccacttatgcatatgcaccaaaaaaaaaaaaaaaaaaaaaagggtttttttagaacccagagccctttaagatgataaaggacccaatgcaggtaatcctgtttttggactcacgtaatgtagaatgcaaagtttagtgattatttaatctgggcctaagctagtgagagtatggaacaatggcccataaggactcctaagcgccgaagccaaggagcctcctcccttcctggttcaccccgcccaagggacctgcccccattcctgtggccctggggcccagcttccaatagtgtcagaagcaacttgtggctttgccttggttgtgagatgggtacattccaaaggagcagcctgggggagggggcaggctcagccagcccttggaggctcagagcagctggcccaggctccagctcgcctccagtggaagcccgagcgccctcagaaacgaccctggccaatgtcaacgcagagccgaggcggtgttgtcacggctaatgtgaaatctcttcccgtggcgcccatcctctgactctgcagtgccagcttggacagattgaggtctctgtggctttggtgaccctgcttaagcattcccaccgtgtcccagctctgctctaggactgcctcccactgcggcccctcacctgacttcagggtatggggagggagggagccagtgctccaaggccagggggctttgctcatgagagatgtcaggcttcctggaggcatcaggctttgagccctgctggggtccaactgacctgggaccaggtgtcgcgcagagatgtgcctcattctgtgcctccttctgtgcctcctaccatgttccctttaactgtgcctcagtgtgggttagggaacaattttgttattgtattaagtttattcagttaattcacttgaggaactaaccagtttttactttctgtctagaatgatgtacatgtagtagagtaagccataatgctcccaaagtgccttgttttctctgatacaaacatatttataaggacatattcctgtgggttcttgggtgtgtttgccacatcaagattttagggaaggggggtatatgtgtagtagggatgccgtttgaaaacaggcactcttcccctgaggatgggaaaggagctcttcagttggagatctaggcagtgggttaagccagacccctaaagtgaccctttcctcttctgccctattcttctcagaccctcagaaagacatccaatttttttaaatccctgtagctccaagcctggtctcatttgcttccctgccaggctcatcgtgtgtataccacatttgtgccccactgacctgaaggttccatgtaactgtatacacatgaatacttaaatgccaacatttaaaataatttgataaagtctttgtagccactcagca

SEQ ID NO: 439104 - DNA, 4381 bp, Homo sapiens
tccccacttcaaagccttatgagaagtcctcaccagcctgaaagtgtgtaaaccagaaaggacagcaggctgcctttcagacacacctgtgacatcagggccatcaatttcataaactcatcttcttctgcttttccataacaaccttctttttctctatcctttccaataccacttacccattggtggccactccctcttacccagttccagatggattccaaggctgaggacacgccttcctcacccttctgtctctttgccactaggttttcagctgcgcagggttgaggagcagcgggaacaagagaagcgggatgttgtgggcaatgacgtggccaccatcttgtctcgtcgcattgctgttgagtacagtgactcagaagatgactcctctgaatttgatgaggacgactggtccgattaactctttctgcctgctgcccaccttctttttctttccttcctacctgccttctttgatgccaaccccaacagacccgtagggggagaaaagggaggaaaaaagtaattttaaggggccaaagctttccctgaagcaaccaaagatatatccaagtgcttcctccaagtcaacatgtatttcctctccccattttcaggccctgtggggctcctgaggttcagtagctgggatgttccctctttccttcaagtgcctgttgcatattgaaaggaaggagaaatcccaaagcagattcctttgatcgggtttctgttggagatggggcttcccttaggagccatattcaactacagccttctaaaacctgtgccctcagccacttcgaatgccagccaccttctggttctaaaacggggagtggtctgaatgaacacagctgacccctttcccgcgcactgaaagggcagagtaggccgaagggtccaagggccagactgcctcaccctctgccctaatcagcagggtgggcctgccttttgctaagcgatctctatgcctgggatgccctttattccaggaggcatcaagcctctaaagaatgtctcacctcctctgcccaaaaatgatgcctttctgtaggctggtgttgttgcctccctcccaggatccctttggtgagtatggtgttcaggatgcaccaccaccacctctagataccttcaggcaacacagcccagttttaacctctagtatccatgaccaaactatccctgacacatgaggacaggggcctcttctggctgtcaggagcaaagcctgaagacttggagctgcaggactggaagaacagtggagccccgtgggtctcaccctttaaggatgctgaggcctagagatgggaagtgacttgctcaaggtcacacaattggatagtgacatagctagagcgcagagttcctgattccaagtcacctgtgctttctgggaccaaagaatgggcacctgctggagtccgggcagagctttctcagttgtattgctactccagacctcaccataggttggggtcccagtaggaaggctcagggtctgtgccagccctgtcggtgctgctcagaccttcatagcctctcttgtcattctttgttgccccttttctgtcaccagccaaccacatagccttgggaccagcctctctgggggaccagaagtagtgagagaaggaaggggataggcagctttgacaggtgctgctttcaattcctctgcaactcctcccccttttatttccccaatttaaacaaagattctgccaactgtggaaacttcagtccctcaggctggcagccatgccagtacctgcctgggggtggggggtgcctggcagccatgaagcaggctgaaaggcagaggggctccaggtcctgtttccagctcccctcactgcacatggtgaagctcgctccctccctccctcccttcccgcttttcccagagctaatacacaggtgctattattcagaaaaaaactggtcagctctagccaacagtgaggtttcttttcttctgccctaactattgtgtagcctcttatgctgaaatcggcttctgctggcttctccggctttcagagccctgaaacaaagagaaacaggatctgtccctacccagcacagcaaatggttgtagtaattgccaaagccctcataaagccctccggcttgaggagagagtgtatagtcatgggttctgcctctgtgcccttgctggccgcttctcctctgccttctttcctggaactcagggtgtggggactgagcctgtaggggacagcatgccgtcttgctgtggccactcccaagtgtgccctcttccctctttacacatcaggtgtctctggcacaggacttggcactaagctccatgctgagacaccaggctatgtgggcccccaccttgtttcccagcctgcaccttagaagccgaaggtgctttcatcagaaccctaaaatggtcgttgaaggcgcctgggccgcagcccagcagtagttggagaggcaggcagagggcagtggttctcccaaataggagacctggggcctggccaggccagggtttgggcctaatggctttgactaaattacccccatcctccttgcccggaaaagggagagctagagccactcactgtcattctgctctgaccttgaagggggcggtgttggcctggcttctggaatggactgagtccatcgtggaaagggctgggggcaggaggaggtggggaggggcactgcctgcggaaggtaggattagatcattagctcagtgacctcctagggtttcgatgtgctatgttctcatcctacagttggtttggtaatgatctgcaagtcccggagagcaacagcacagctctgcctgacgctctcattaaaatctatgcagccaagctcggcactttgtagcagccggccttgcgaagcctcctcagctcggggggccggggacccagtgagccgagaggccctctgggctccacttatgcatatgcaccaaaaaaaaaaaaaaaaaaaaaagggtttttttagaacccagagccctttaagatgataaaggacccaatgcaggtaatcctgtttttggactcacgtaatgtagaatgcaaagtttagtgattatttaatctgggcctaagctagtgagagtatggaacaatggcccataaggactcctaagcgccgaagccaaggagcctcctcccttcctggttcaccccgcccaagggacctgcccccattcctgtggccctggggcccagcttccaatagtgtcagaagcaacttgtggctttgccttggttgtgagatgggtacattccaaaggagcagcctgggggagggggcaggctcagccagcccttggaggctcagagcagctggcccaggctccagctcgcctccagtggaagcccgagcgccctcagaaacgaccctggccaatgtcaacgcagagccgaggcggtgttgtcacggctaatgtgaaatctcttcccgtggcgcccatcctctgactctgcagtgccagcttggacagattgaggtctctgtggctttggtgaccctgcttaagcattcccaccgtgtcccagctctgctctaggactgcctcccactgcggcccctcacctgacttcagggtatggggagggagggagccagtgctccaaggccagggggctttgctcatgagagatgtcaggcttcctggaggcatcaggctttgagccctgctggggtccaactgacctgggaccaggtgtcgcgcagagatgtgcctcattctgtgcctccttctgtgcctcctaccatgttccctttaactgtgcctcagtgtgggttagggaacaattttgttattgtattaagtttattcagttaattcacttgaggaactaaccagtttttactttctgtctagaatgatgtacatgtagtagagtaagccataatgctcccaaagtgccttgttttctctgatacaaacatatttataaggacatattcctgtgggttcttgggtgtgtttgccacatcaagattttagggaaggggggtatatgtgtagtagggatgccgtttgaaaacaggcactcttcccctgaggatgggaaaggagctcttcagttggagatctaggcagtgggttaagccagacccctaaagtgaccctttcctcttctgccctattcttctcagaccctcagaaagacatccaatttttttaaatccctgtagctccaagcctggtctcatttgcttccctgccaggctcatcgtgtgtataccacatttgtgccccactgacctgaaggttccatgtaactgtatacacatgaatacttaaatgccaacatttaaaataatttgataaagtctttgtagccactcagca

SEQ ID NO: 439105 - DNA, 3823 bp, Homo sapiens
ttgtgggtgatctagaggatccctcttctcgaaagtcaacatgtatttcctctccccattttcaggccctgtggggctcctgaggttcagtagctgggatgttccctctttccttcaagtgcctgttgcatattgaaaggaaggagaaatcccaaagcagattcctttgatcgggtttctgttggagatggggcttcccttaggagccatattcaactacagccttctaaaacctgtgccctcagccacttcgaatgccagccaccttctggttctaaaacggggagtggtctgaatgaacacagctgacccctttcccgcgcactgaaagggcagagtaggccgaagggtccaagggccagactgcctcaccctctgccctaatcagcagggtgggcctgccttttgctaagcgatctctatgcctgggatgccctttattccaggaggcatcaagcctctaaagaatgtctcacctcctctgcccaaaaatgatgcctttctgtaggctggtgttgttgcctccctcccaggatccctttggtgagtatggtgttcaggatgcaccaccaccacctctagataccttcaggcaacacagcccagttttaacctctagtatccatgaccaaactatccctgacacatgaggacaggggcctcttctggctgtcaggagcaaagcctgaagacttggagctgcaggactggaagaacagtggagccccgtgggtctcaccctttaaggatgctgaggcctagagatgggaagtgacttgctcaaggtcacacaattggatagtgacatagctagagcgcagagttcctgattccaagtcacctgtgctttctgggaccaaagaatgggcacctgctggagtccgggcagagctttctcagttgtattgctactccagacctcaccataggttggggtcccagtaggaaggctcagggtctgtgccagccctgtcggtgctgctcagaccttcatagcctctcttgtcattctttgttgccccttttctgtcaccagccaaccacatagccttgggaccagcctctctgggggaccagaagtagtgagagaaggaaggggataggcagctttgacaggtgctgctttcaattcctctgcaactcctcccccttttatttccccaatttaaacaaagattctgccaactgtggaaacttcagtccctcaggctggcagccatgccagtacctgcctgggggtggggggtgcctggcagccatgaagcaggctgaaaggcagaggggctccaggtcctgtttccagctcccctcactgcacatggtgaagctcgctccctccctccctcccttcccgcttttcccagagctaatacacaggtgctattattcagaaaaaaactggtcagctctagccaacagtgaggtttcttttcttctgccctaactattgtgtagcctcttatgctgaaatcggcttctgctggcttctccggctttcagagccctgaaacaaagagaaacaggatctgtccctacccagcacagcaaatggttgtagtaattgccaaagccctcataaagccctccggcttgaggagagagtgtatagtcatgggttctgcctctgtgcccttgctggccgcttctcctctgccttctttcctggaactcagggtgtggggactgagcctgtaggggacagcatgccgtcttgctgtggccactcccaagtgtgccctcttccctctttacacatcaggtgtctctggcacaggacttggcactaagctccatgctgagacaccaggctatgtgggcccccaccttgtttcccagcctgcaccttagaagccgaaggtgctttcatcagaaccctaaaatggtcgttgaaggcgcctgggccgcagcccagcagtagttggagaggcaggcagagggcagtggttctcccaaataggagacctggggcctggccaggccagggtttgggcctaatggctttgactaaattacccccatcctccttgcccggaaaagggagagctagagccactcactgtcattctgctctgaccttgaagggggcggtgttggcctggcttctggaatggactgagtccatcgtggaaagggctgggggcaggaggaggtggggaggggcactgcctgcggaaggtaggattagatcattagctcagtgacctcctagggtttcgatgtgctatgttctcatcctacagttggtttggtaatgatctgcaagtcccggagagcaacagcacagctctgcctgacgctctcattaaaatctatgcagccaagctcggcactttgtagcagccggccttgcgaagcctcctcagctcggggggccggggacccagtgagccgagaggccctctgggctccacttatgcatatgcaccaaaaaaaaaaaaaaaaaaaaaagggtttttttagaacccagagccctttaagatgataaaggacccaatgcaggtaatcctgtttttggactcacgtaatgtagaatgcaaagtttagtgattatttaatctgggcctaagctagtgagagtatggaacaatggcccataaggactcctaagcgccgaagccaaggagcctcctcccttcctggttcaccccgcccaagggacctgcccccattcctgtggccctggggcccagcttccaatagtgtcagaagcaacttgtggctttgccttggttgtgagatgggtacattccaaaggagcagcctgggggagggggcaggctcagccagcccttggaggctcagagcagctggcccaggctccagctcgcctccagtggaagcccgagcgccctcagaaacgaccctggccaatgtcaacgcagagccgaggcggtgttgtcacggctaatgtgaaatctcttcccgtggcgcccatcctctgactctgcagtgccagcttggacagattgaggtctctgtggctttggtgaccctgcttaagcattcccaccgtgtcccagctctgctctaggactgcctcccactgcggcccctcacctgacttcagggtatggggagggagggagccagtgctccaaggccagggggctttgctcatgagagatgtcaggcttcctggaggcatcaggctttgagccctgctggggtccaactgacctgggaccaggtgtcgcgcagagatgtgcctcattctgtgcctccttctgtgcctcctaccatgttccctttaactgtgcctcagtgtgggttagggaacaattttgttattgtattaagtttattcagttaattcacttgaggaactaaccagtttttactttctgtctagaatgatgtacatgtagtagagtaagccataatgctcccaaagtgccttgttttctctgatacaaacatatttataaggacatattcctgtgggttcttgggtgtgtttgccacatcaagattttagggaaggggggtatatgtgtagtagggatgccgtttgaaaacaggcactcttcccctgaggatgggaaaggagctcttcagttggagatctaggcagtgggttaagccagacccctaaagtgaccctttcctcttctgccctattcttctcagaccctcagaaagacatccaatttttttaaatccctgtagctccaagcctggtctcatttgcttccctgccaggctcatcgtgtgtataccacatttgtgccccactgacctgaaggttccatgtaactgtatacacatgaatacttaaatgccaacatttaaaataatttgataaagtctttgtagccactcagca

SEQ ID NO: 439106 - DNA, 3635 bp, Homo sapiens
gcaggctggtactggccccggattttaggatcagccttctaaaacctgtgccctcagccacttcgaatgccagccaccttctggttctaaaacggggagtggtctgaatgaacacagctgacccctttcccgcgcactgaaagggcagagtaggccgaagggtccaagggccagactgcctcaccctctgccctaatcagcagggtgggcctgccttttgctaagcgatctctatgcctgggatgccctttattccaggaggcatcaagcctctaaagaatgtctcacctcctctgcccaaaaatgatgcctttctgtaggctggtgttgttgcctccctcccaggatccctttggtgagtatggtgttcaggatgcaccaccaccacctctagataccttcaggcaacacagcccagttttaacctctagtatccatgaccaaactatccctgacacatgaggacaggggcctcttctggctgtcaggagcaaagcctgaagacttggagctgcaggactggaagaacagtggagccccgtgggtctcaccctttaaggatgctgaggcctagagatgggaagtgacttgctcaaggtcacacaattggatagtgacatagctagagcgcagagttcctgattccaagtcacctgtgctttctgggaccaaagaatgggcacctgctggagtccgggcagagctttctcagttgtattgctactccagacctcaccataggttggggtcccagtaggaaggctcagggtctgtgccagccctgtcggtgctgctcagaccttcatagcctctcttgtcattctttgttgccccttttctgtcaccagccaaccacatagccttgggaccagcctctctgggggaccagaagtagtgagagaaggaaggggataggcagctttgacaggtgctgctttcaattcctctgcaactcctcccccttttatttccccaatttaaacaaagattctgccaactgtggaaacttcagtccctcaggctggcagccatgccagtacctgcctgggggtggggggtgcctggcagccatgaagcaggctgaaaggcagaggggctccaggtcctgtttccagctcccctcactgcacatggtgaagctcgctccctccctccctcccttcccgcttttcccagagctaatacacaggtgctattattcagaaaaaaactggtcagctctagccaacagtgaggtttcttttcttctgccctaactattgtgtagcctcttatgctgaaatcggcttctgctggcttctccggctttcagagccctgaaacaaagagaaacaggatctgtccctacccagcacagcaaatggttgtagtaattgccaaagccctcataaagccctccggcttgaggagagagtgtatagtcatgggttctgcctctgtgcccttgctggccgcttctcctctgccttctttcctggaactcagggtgtggggactgagcctgtaggggacagcatgccgtcttgctgtggccactcccaagtgtgccctcttccctctttacacatcaggtgtctctggcacaggacttggcactaagctccatgctgagacaccaggctatgtgggcccccaccttgtttcccagcctgcaccttagaagccgaaggtgctttcatcagaaccctaaaatggtcgttgaaggcgcctgggccgcagcccagcagtagttggagaggcaggcagagggcagtggttctcccaaataggagacctggggcctggccaggccagggtttgggcctaatggctttgactaaattacccccatcctccttgcccggaaaagggagagctagagccactcactgtcattctgctctgaccttgaagggggcggtgttggcctggcttctggaatggactgagtccatcgtggaaagggctgggggcaggaggaggtggggaggggcactgcctgcggaaggtaggattagatcattagctcagtgacctcctagggtttcgatgtgctatgttctcatcctacagttggtttggtaatgatctgcaagtcccggagagcaacagcacagctctgcctgacgctctcattaaaatctatgcagccaagctcggcactttgtagcagccggccttgcgaagcctcctcagctcggggggccggggacccagtgagccgagaggccctctgggctccacttatgcatatgcaccaaaaaaaaaaaaaaaaaaaaaagggtttttttagaacccagagccctttaagatgataaaggacccaatgcaggtaatcctgtttttggactcacgtaatgtagaatgcaaagtttagtgattatttaatctgggcctaagctagtgagagtatggaacaatggcccataaggactcctaagcgccgaagccaaggagcctcctcccttcctggttcaccccgcccaagggacctgcccccattcctgtggccctggggcccagcttccaatagtgtcagaagcaacttgtggctttgccttggttgtgagatgggtacattccaaaggagcagcctgggggagggggcaggctcagccagcccttggaggctcagagcagctggcccaggctccagctcgcctccagtggaagcccgagcgccctcagaaacgaccctggccaatgtcaacgcagagccgaggcggtgttgtcacggctaatgtgaaatctcttcccgtggcgcccatcctctgactctgcagtgccagcttggacagattgaggtctctgtggctttggtgaccctgcttaagcattcccaccgtgtcccagctctgctctaggactgcctcccactgcggcccctcacctgacttcagggtatggggagggagggagccagtgctccaaggccagggggctttgctcatgagagatgtcaggcttcctggaggcatcaggctttgagccctgctggggtccaactgacctgggaccaggtgtcgcgcagagatgtgcctcattctgtgcctccttctgtgcctcctaccatgttccctttaactgtgcctcagtgtgggttagggaacaattttgttattgtattaagtttattcagttaattcacttgaggaactaaccagtttttactttctgtctagaatgatgtacatgtagtagagtaagccataatgctcccaaagtgccttgttttctctgatacaaacatatttataaggacatattcctgtgggttcttgggtgtgtttgccacatcaagattttagggaaggggggtatatgtgtagtagggatgccgtttgaaaacaggcactcttcccctgaggatgggaaaggagctcttcagttggagatctaggcagtgggttaagccagacccctaaagtgaccctttcctcttctgccctattcttctcagaccctcagaaagacatccaatttttttaaatccctgtagctccaagcctggtctcatttgcttccctgccaggctcatcgtgtgtataccacatttgtgccccactgacctgaaggttccatgtaactgtatacacatgaatacttaaatgccaacatttaaaataatttgataaagtctttgtagccactcagca

SEQ ID NO: 439107 - DNA, 3622 bp, Homo sapiens
gggggaatcgcgtaatggcggacacaggcagggcgagcgcggctgggggcgtagcgcgctgagggggtccggccgtttggcagcccgcgaggcggtccgcgggagcacactctgtgcggagactgggcggccggccgacccttcctgtcgctgacggcgactgcgggaggccaggttgtttttcaccattcagaacactgccttttgctaagcgatctctatgcctgggatgccctttattccaggaggcatcaagcctctaaagaatgtctcacctcctctgcccaaaaatgatgcctttctgtaggctggtgttgttgcctccctcccaggatccctttggtgagtatggtgttcaggatgcaccaccaccacctctagataccttcaggcaacacagcccagttttaacctctagtatccatgaccaaactatccctgacacatgaggacaggggcctcttctggctgtcaggagcaaagcctgaagacttggagctgcaggactggaagaacagtggagccccgtgggtctcaccctttaaggatgctgaggcctagagatgggaagtgacttgctcaaggtcacacaattggatagtgacatagctagagcgcagagttcctgattccaagtcacctgtgctttctgggaccaaagaatgggcacctgctggagtccgggcagagctttctcagttgtattgctactccagacctcaccataggttggggtcccagtaggaaggctcagggtctgtgccagccctgtcggtgctgctcagaccttcatagcctctcttgtcattctttgttgccccttttctgtcaccagccaaccacatagccttgggaccagcctctctgggggaccagaagtagtgagagaaggaaggggataggcagctttgacaggtgctgctttcaattcctctgcaactcctcccccttttatttccccaatttaaacaaagattctgccaactgtggaaacttcagtccctcaggctggcagccatgccagtacctgcctgggggtggggggtgcctggcagccatgaagcaggctgaaaggcagaggggctccaggtcctgtttccagctcccctcactgcacatggtgaagctcgctccctccctccctcccttcccgcttttcccagagctaatacacaggtgctattattcagaaaaaaactggtcagctctagccaacagtgaggtttcttttcttctgccctaactattgtgtagcctcttatgctgaaatcggcttctgctggcttctccggctttcagagccctgaaacaaagagaaacaggatctgtccctacccagcacagcaaatggttgtagtaattgccaaagccctcataaagccctccggcttgaggagagagtgtatagtcatgggttctgcctctgtgcccttgctggccgcttctcctctgccttctttcctggaactcagggtgtggggactgagcctgtaggggacagcatgccgtcttgctgtggccactcccaagtgtgccctcttccctctttacacatcaggtgtctctggcacaggacttggcactaagctccatgctgagacaccaggctatgtgggcccccaccttgtttcccagcctgcaccttagaagccgaaggtgctttcatcagaaccctaaaatggtcgttgaaggcgcctgggccgcagcccagcagtagttggagaggcaggcagagggcagtggttctcccaaataggagacctggggcctggccaggccagggtttgggcctaatggctttgactaaattacccccatcctccttgcccggaaaagggagagctagagccactcactgtcattctgctctgaccttgaagggggcggtgttggcctggcttctggaatggactgagtccatcgtggaaagggctgggggcaggaggaggtggggaggggcactgcctgcggaaggtaggattagatcattagctcagtgacctcctagggtttcgatgtgctatgttctcatcctacagttggtttggtaatgatctgcaagtcccggagagcaacagcacagctctgcctgacgctctcattaaaatctatgcagccaagctcggcactttgtagcagccggccttgcgaagcctcctcagctcggggggccggggacccagtgagccgagaggccctctgggctccacttatgcatatgcaccaaaaaaaaaaaaaaaaaaaaaagggtttttttagaacccagagccctttaagatgataaaggacccaatgcaggtaatcctgtttttggactcacgtaatgtagaatgcaaagtttagtgattatttaatctgggcctaagctagtgagagtatggaacaatggcccataaggactcctaagcgccgaagccaaggagcctcctcccttcctggttcaccccgcccaagggacctgcccccattcctgtggccctggggcccagcttccaatagtgtcagaagcaacttgtggctttgccttggttgtgagatgggtacattccaaaggagcagcctgggggagggggcaggctcagccagcccttggaggctcagagcagctggcccaggctccagctcgcctccagtggaagcccgagcgccctcagaaacgaccctggccaatgtcaacgcagagccgaggcggtgttgtcacggctaatgtgaaatctcttcccgtggcgcccatcctctgactctgcagtgccagcttggacagattgaggtctctgtggctttggtgaccctgcttaagcattcccaccgtgtcccagctctgctctaggactgcctcccactgcggcccctcacctgacttcagggtatggggagggagggagccagtgctccaaggccagggggctttgctcatgagagatgtcaggcttcctggaggcatcaggctttgagccctgctggggtccaactgacctgggaccaggtgtcgcgcagagatgtgcctcattctgtgcctccttctgtgcctcctaccatgttccctttaactgtgcctcagtgtgggttagggaacaattttgttattgtattaagtttattcagttaattcacttgaggaactaaccagtttttactttctgtctagaatgatgtacatgtagtagagtaagccataatgctcccaaagtgccttgttttctctgatacaaacatatttataaggacatattcctgtgggttcttgggtgtgtttgccacatcaagattttagggaaggggggtatatgtgtagtagggatgccgtttgaaaacaggcactcttcccctgaggatgggaaaggagctcttcagttggagatctaggcagtgggttaagccagacccctaaagtgaccctttcctcttctgccctattcttctcagaccctcagaaagacatccaatttttttaaatccctgtagctccaagcctggtctcatttgcttccctgccaggctcatcgtgtgtataccacatttgtgccccactgacctgaaggttccatgtaactgtatacacatgaatacttaaatgccaacatttaaaataatttgataaagtctttgtagccactcagca

SEQ ID NO: 439108 - DNA, 5173 bp, Homo sapiens
  misc_feature (4985)..(4985): n is a, c, g, or t
  misc_feature (5059)..(5059): n is a, c, g, or t
  misc_feature (5120)..(5121): n is a, c, g, or t
  misc_feature (5124)..(5124): n is a, c, g, or t
gggggaatcgcgtaatggcggacacaggcagggcgagcgcggctgggggcgtagcgcgctgagggggtccggccgtttggcagcccgcgaggcggtccgcgggagcacactctgtgcggagactgggcggccggccgacccttcctgtcgctgacggcgactgcgggaggccaggttgtttttcaccattcagaacattgcctgaagcaggtccaccatgccgttagtaacgaggaacatcgagccaaggcacctgtgccgtcagacgttgcctagcgttagaagcgagctggaatgcgtgaccaacatcaccctggcaaatgtcatccgacagctgggcagcctgagtaaatatgcagaggacatttttggagagctctttactcaggcaaatacctttgcctctcgggtaagctcccttgctgagagggtcgaccgactacaggttaaagtcactcagctggatcccaaggaagaagaagtgtcactgcaaggaatcaacacccgaaaagccttcagaagttccaccattcaagaccagaagctttttgacagaaactctctcccagtgcctgtcttagaaacatacaatacctgtgatactcctccccctctcaacaatcttaccccttacagggacgatggaaaagaggcactcaaattctacacagacccttcatacttctttgatctttggaaggagaagatgctgcaggacaccaaggatatcatgaaagagaagagaaagcataggaaagaaaagaaagataatccaaatcgagggaatgtaaacccacgtaaaatcaagacacgtaaggaagagtgggagaaaatgaagatggggcaagaatttgtggagtccaaagaaaagctggggacttctgggtatccacccactttggtgtaccagaatggcagcattggctgtgttgaaaacgtggatgcaagtagctatccgccaccaccacagtcagactctgcttcttcaccttctccttccttctccgaggacaacttgcctcctccaccagcagaattcagttacccagtggacaaccaaagaggatctggtttggctggacccaaaagatccagtgtggtcagcccaagccatccaccaccagctcctcctctaggctctccaccaggccctaaacccgggtttgctccaccacctgcccctccgccacctccgcctccaatgataggcatcccacctccaccaccgcctgtaggatttgggtctccagggacgcctccaccaccctcacccccatctttcccacctcaccctgattttgctgcccctccacctcctcctccaccaccagcagctgactacccaactctgccaccacctcccttgtcccagccaacaggaggagcacctcctcctccccctcctcctcctcctccggggccccctcctccccctttcactggtgcagatggccagcctgctataccaccaccgctttctgataccaccaagcccaagtcctccttgcctgccgtgagcgatgcccgtagcgacctgctttcagccatccgtcaaggttttcagctgcgcagggttgaggagcagcgggaacaagagaagcgggatgttgtgggcaatgacgtggccaccatcttgtctcgtcgcattgctgttgagtacagtgactcagaagatgactcctctgaatttgatgaggacgactggtccgattaactctttctgcctgctgcccaccttctttttctttccttcctacctgccttctttgatgccaaccccaacagacccgtagggggagaaaagggaggaaaaaagtaattttaaggggccaaagctttccctgaagcaaccaaagatatatccaagtgcttcctccaagtcaacatgtatttcctctccccattttcaggccctgtggggctcctgaggttcagtagctgggatgttccctctttccttcaagtgcctgttgcatattgaaaggaaggagaaatcccaaagcagattcctttgatcgggtttctgttggagatggggcttcccttaggagccatattcaactacagccttctaaaacctgtgccctcagccacttcgaatgccagccaccttctggttctaaaacggggagtggtctgaatgaacacagctgacccctttcccgcgcactgaaagggcagagtaggccgaagggtccaagggccagactgcctcaccctctgccctaatcagcagggtgggcctgccttttgctaagcgatctctatgcctgggatgccctttattccaggaggcatcaagcctctaaagaatgtctcacctcctctgcccaaaaatgatgcctttctgtaggctggtgttgttgcctccctcccaggatccctttggtgagtatggtgttcaggatgcaccaccaccacctctagataccttcaggcaacacagcccagttttaacctctagtatccatgaccaaactatccctgacacatgaggacaggggcctcttctggctgtcaggagcaaagcctgaagacttggagctgcaggactggaagaacagtggagccccgtgggtctcaccctttaaggatgctgaggcctagagatgggaagtgacttgctcaaggtcacacaattggatagtgacatagctagagcgcagagttcctgattccaagtcacctgtgctttctgggaccaaagaatgggcacctgctggagtccgggcagagctttctcagttgtattgctactccagacctcaccataggttggggtcccagtaggaaggctcagggtctgtgccagccctgtcggtgctgctcagaccttcatagcctctcttgtcattctttgttgccccttttctgtcaccagccaaccacatagccttgggaccagcctctctgggggaccagaagtagtgagagaaggaaggggataggcagctttgacaggtgctgctttcaattcctctgcaactcctcccccttttatttccccaatttaaacaaagattctgccaactgtggaaacttcagtccctcaggctggcagccatgccagtacctgcctgggggtggggggtgcctggcagccatgaagcaggctgaaaggcagaggggctccaggtcctgtttccagctcccctcactgcacatggtgaagctcgctccctccctccctcccttcccgcttttcccagagctaatacacaggtgctattattcagaaaaaaactggtcagctctagccaacagtgaggtttcttttcttctgccctaactattgtgtagcctcttatgctgaaatcggcttctgctggcttctccggctttcagagccctgaaacaaagagaaacaggatctgtccctacccagcacagcaaatggttgtagtaattgccaaagccctcataaagccctccggcttgaggagagagtgtatagtcatgggttctgcctctgtgcccttgctggccgcttctcctctgccttctttcctggaactcagggtgtggggactgagcctgtaggggacagcatgccgtcttgctgtggccactcccaagtgtgccctcttccctctttacacatcaggtgtctctggcacaggacttggcactaagctccatgctgagacaccaggctatgtgggcccccaccttgtttcccagcctgcaccttagaagccgaaggtgctttcatcagaaccctaaaatggtcgttgaaggcgcctgggccgcagcccagcagtagttggagaggcaggcagagggcagtggttctcccaaataggagacctggggcctggccaggccagggtttgggcctaatggctttgactaaattacccccatcctccttgcccggaaaagggagagctagagccactcactgtcattctgctctgaccttgaagggggcggtgttggcctggcttctggaatggactgagtccatcgtggaaagggctgggggcaggaggaggtggggaggggcactgcctgcggaaggtaggattagatcattagctcagtgacctcctagggtttcgatgtgctatgttctcatcctacagttggtttggtaatgatctgcaagtcccggagagcaacagcacagctctgcctgacgctctcattaaaatctatgcagccaagctcggcactttgtagcagccggccttgcgaagcctcctcagctcggggggccggggacccagtgagccgagaggccctctgggctccacttatgcatatgcaccaaaaaaaaaaaaaaaaaaaaaagggtttttttagaacccagagccctttaagatgataaaggacccaatgcaggtaatcctgtttttggactcacgtaatgtagaatgcaaagtttagtgattatttaatctgggcctaagctagtgagagtatggaacaatggcccataaggactcctaagcgccgaagccaaggagcctcctcccttcctggttcaccccgcccaagggacctgcccccattcctgtggccctggggcccagcttccaatagtgtcagaagcaacttgtggctttgccttggttgtgagatgggtacattccaaaggagcagcctgggggagggggcaggctcagccagcccttggaggctcagagcagctggcccaggctccagctcgcctccagtggaagcccgagcgccctcagaaacgaccctggccaatgtcaacgcagagccgaggcggtgttgtcacggctaatgtgaaatctcttcccgtggcgcccatcctctgactctgcagtgccagcttggacagattgaggtctctgtggctttggtgaccctgcttaagcattcccaccgtgtcccagctctgctctaggactgcctcccactgcctgcggaaggtaggattagatcattagctcagtgacctcctagggtttcgatgtgctatgttctcatcctacagttggtttggtaatgatctncaagtcccggagagcaacagcacagctctgcctgacgctctcattaaaatctatgcagccaagctcggcacttngtagcagccggccttgcgaagcctcctcagctcggggggccggggacccagtgagccgagnngcntctgggctccacttatgcatatgcaccaaaaaaaaaaaaaaaaaaaaaa

SEQ ID NO: 439109 - DNA, 2564 bp, Homo sapiens
gcggccgcctactactactactactgctcgaattcaagcttctaacgatgtacggggacatggtgaagctcgctccctccctccctcccttcccgcttttcccagagctaatacacaggtgctattattcagaaaaaaactggtcagctctagccaacagtgaggtttcttttcttctgccctaactattgtgtagcctcttatgctgaaatcggcttctgctggcttctccggctttcagagccctgaaacaaagagaaacaggatctgtccctacccagcacagcaaatggttgtagtaattgccaaagccctcataaagccctccggcttgaggagagagtgtatagtcatgggttctgcctctgtgcccttgctggccgcttctcctctgccttctttcctggaactcagggtgtggggactgagcctgtaggggacagcatgccgtcttgctgtggccactcccaagtgtgccctcttccctctttacacatcaggtgtctctggcacaggacttggcactaagctccatgctgagacaccaggctatgtgggcccccaccttgtttcccagcctgcaccttagaagccgaaggtgctttcatcagaaccctaaaatggtcgttgaaggcgcctgggccgcagcccagcagtagttggagaggcaggcagagggcagtggttctcccaaataggagacctggggcctggccaggccagggtttgggcctaatggctttgactaaattacccccatcctccttgcccggaaaagggagagctagagccactcactgtcattctgctctgaccttgaagggggcggtgttggcctggcttctggaatggactgagtccatcgtggaaagggctgggggcaggaggaggtggggaggggcactgcctgcggaaggtaggattagatcattagctcagtgacctcctagggtttcgatgtgctatgttctcatcctacagttggtttggtaatgatctgcaagtcccggagagcaacagcacagctctgcctgacgctctcattaaaatctatgcagccaagctcggcactttgtagcagccggccttgcgaagcctcctcagctcggggggccggggacccagtgagccgagaggccctctgggctccacttatgcatatgcaccaaaaaaaaaaaaaaaaaaaaaagggtttttttagaacccagagccctttaagatgataaaggacccaatgcaggtaatcctgtttttggactcacgtaatgtagaatgcaaagtttagtgattatttaatctgggcctaagctagtgagagtatggaacaatggcccataaggactcctaagcgccgaagccaaggagcctcctcccttcctggttcaccccgcccaagggacctgcccccattcctgtggccctggggcccagcttccaatagtgtcagaagcaacttgtggctttgccttggttgtgagatgggtacattccaaaggagcagcctgggggagggggcaggctcagccagcccttggaggctcagagcagctggcccaggctccagctcgcctccagtggaagcccgagcgccctcagaaacgaccctggccaatgtcaacgcagagccgaggcggtgttgtcacggctaatgtgaaatctcttcccgtggcgcccatcctctgactctgcagtgccagcttggacagattgaggtctctgtggctttggtgaccctgcttaagcattcccaccgtgtcccagctctgctctaggactgcctcccactgcggcccctcacctgacttcagggtatggggagggagggagccagtgctccaaggccagggggctttgctcatgagagatgtcaggcttcctggaggcatcaggctttgagccctgctggggtccaactgacctgggaccaggtgtcgcgcagagatgtgcctcattctgtgcctccttctgtgcctcctaccatgttccctttaactgtgcctcagtgtgggttagggaacaattttgttattgtattaagtttattcagttaattcacttgaggaactaaccagtttttactttctgtctagaatgatgtacatgtagtagagtaagccataatgctcccaaagtgccttgttttctctgatacaaacatatttataaggacatattcctgtgggttcttgggtgtgtttgccacatcaagattttagggaaggggggtatatgtgtagtagggatgccgtttgaaaacaggcactcttcccctgaggatgggaaaggagctcttcagttggagatctaggcagtgggttaagccagacccctaaagtgaccctttcctcttctgccctattcttctcagaccctcagaaagacatccaatttttttaaatccctgtagctccaagcctggtctcatttgcttccctgccaggctcatcgtgtgtataccacatttgtgccccactgacctgaaggttccatgtaactgtatacacatgaatacttaaatgccaacatttaaaataatttgataaagtctttgtagccactcagca

SEQ ID NO: 439110 - DNA, 2344 bp, Homo sapiens
attgtattaagtttattcagttaattcacttgaggaactaaccagtttttactttctgtctagaatgatgtacatgtagtaattgccaaagccctcataaagccctccggcttgaggagagagtgtatagtcatgggttctgcctctgtgcccttgctggccgcttctcctctgccttctttcctggaactcagggtgtggggactgagcctgtaggggacagcatgccgtcttgctgtggccactcccaagtgtgccctcttccctctttacacatcaggtgtctctggcacaggacttggcactaagctccatgctgagacaccaggctatgtgggcccccaccttgtttcccagcctgcaccttagaagccgaaggtgctttcatcagaaccctaaaatggtcgttgaaggcgcctgggccgcagcccagcagtagttggagaggcaggcagagggcagtggttctcccaaataggagacctggggcctggccaggccagggtttgggcctaatggctttgactaaattacccccatcctccttgcccggaaaagggagagctagagccactcactgtcattctgctctgaccttgaagggggcggtgttggcctggcttctggaatggactgagtccatcgtggaaagggctgggggcaggaggaggtggggaggggcactgcctgcggaaggtaggattagatcattagctcagtgacctcctagggtttcgatgtgctatgttctcatcctacagttggtttggtaatgatctgcaagtcccggagagcaacagcacagctctgcctgacgctctcattaaaatctatgcagccaagctcggcactttgtagcagccggccttgcgaagcctcctcagctcggggggccggggacccagtgagccgagaggccctctgggctccacttatgcatatgcaccaaaaaaaaaaaaaaaaaaaaaagggtttttttagaacccagagccctttaagatgataaaggacccaatgcaggtaatcctgtttttggactcacgtaatgtagaatgcaaagtttagtgattatttaatctgggcctaagctagtgagagtatggaacaatggcccataaggactcctaagcgccgaagccaaggagcctcctcccttcctggttcaccccgcccaagggacctgcccccattcctgtggccctggggcccagcttccaatagtgtcagaagcaacttgtggctttgccttggttgtgagatgggtacattccaaaggagcagcctgggggagggggcaggctcagccagcccttggaggctcagagcagctggcccaggctccagctcgcctccagtggaagcccgagcgccctcagaaacgaccctggccaatgtcaacgcagagccgaggcggtgttgtcacggctaatgtgaaatctcttcccgtggcgcccatcctctgactctgcagtgccagcttggacagattgaggtctctgtggctttggtgaccctgcttaagcattcccaccgtgtcccagctctgctctaggactgcctcccactgcggcccctcacctgacttcagggtatggggagggagggagccagtgctccaaggccagggggctttgctcatgagagatgtcaggcttcctggaggcatcaggctttgagccctgctggggtccaactgacctgggaccaggtgtcgcgcagagatgtgcctcattctgtgcctccttctgtgcctcctaccatgttccctttaactgtgcctcagtgtgggttagggaacaattttgttattgtattaagtttattcagttaattcacttgaggaactaaccagtttttactttctgtctagaatgatgtacatgtagtagagtaagccataatgctcccaaagtgccttgttttctctgatacaaacatatttataaggacatattcctgtgggttcttgggtgtgtttgccacatcaagattttagggaaggggggtatatgtgtagtagggatgccgtttgaaaacaggcactcttcccctgaggatgggaaaggagctcttcagttggagatctaggcagtgggttaagccagacccctaaagtgaccctttcctcttctgccctattcttctcagaccctcagaaagacatccaatttttttaaatccctgtagctccaagcctggtctcatttgcttccctgccaggctcatcgtgtgtataccacatttgtgccccactgacctgaaggttccatgtaactgtatacacatgaatacttaaatgccaacatttaaaataatttgataaagtctttgtagccactcagca

SEQ ID NO: 439111 - DNA, 3265 bp, Homo sapiens
gggggaatcgcgtaatggcggacacaggcagggcgagcgcggctgggggcgtagcgcgctgagggggtccggccgtttggcagcccgcgaggcggtccgcgggagcacactctgtgcggagactgggcggccggccgacccttcctgtcgctgacggcgactgcgggaggccaggttgtttttcaccattcagaacattgcctgaagcaggtccaccatgccgttagtaacgaggaacatcgagccaaggcacctgtgccgtcagacgttgcctagcgttagaagcgagctggaatgcgtgaccaacatcaccctggcaaatgtcatccgacagctgggcagcctgagtaaatatgcagaggacatttttggagagctctttactcaggcaaatacctttgcctctcgggtaagctcccttgctgagagggtcgaccgactacaggttaaagtcactcagctggatcccaaggaagaagaagtgtcactgcaaggaatcaacacccgaaaagccttcagaagttccaccattcaagaccagaagctttttgacagaaactctctcccagtgcctgtcttagaaacatacaatacctgtgatactcctccccctctcaacaatcttaccccttacagggacgatggaaaagaggcactcaaattctacacagacccttcatacttctttgatctttggaaggagaagatgctgcaggacaccaaggatatcatgaaagagaagagaaagcataggaaagaaaagaaagataatccaaatcgagggaatgtaaacccacgtaaaatcaagacacgtaaggaagagtgggagaaaatgaagatggggcaagaatttgtggagtccaaagaaaagctggggacttctgggtatccacccactttggtgtaccagaatggcagcattggctgtgttgaaaacgtggatgcaagtagctatccgccaccaccacagtcagactctgcttcttcaccttctccttccttctccgaggacaacttgcctcctccaccagcagaattcagttacccagtggacaaccaaagaggatctggtttggctggacccaaaagatccagtgtggtcagcccaagccatccaccaccagctcctcctctaggctctccaccaggccctaaacccgggtttgctccaccacctgcccctccgccacctccgcctccaatgataggcatcccacctccaccaccgcctgtaggatttgggtctccagggacgcctccaccaccctcacccccatctttcccacctcaccctgattttgctgcccctccacctcctcctccaccaccagcagctgactacccaactctgccaccacctcccttgtcccagccaacaggaggagcacctcctcctccccctcctcctcctcctccggggccccctcctccccctttcactggtgcagatggccagcctgctataccaccaccgctttctgataccaccaagcccaagtcctccttgcctgccgtgagcgatgcccgtagcgacctgctttcagccatccgtcaaggttttcagctgcgcagggttgaggagcagcgggaacaagagaagcgggatgttgtgggcaatgacgtggccaccatcttgtctcgtcgcattgctgttgagtacagtgactcagaagatgactcctctgaatttgatgaggacgactggtccgattaactctttctgcctgctgcccaccttctttttctttccttcctacctgccttctttgatgccaaccccaacagacccgtagggggagaaaagggaggaaaaaagtaattttaaggggccaaagctttccctgaagcaaccaaagatatatccaagtgcttcctccaagtcaacatgtatttcctctccccattttcaggccctgtggggctcctgaggttcagtagctgggatgttccctctttccttcaagtgcctgttgcatattgaaaggaaggagaaatcccaaagcagattcctttgatcgggtttctgttggagatggggcttcccttaggagccatattcaactacagccttctaaaacctgtgccctcagccacttcgaatgccagccaccttctggttctaaaacggggagtggtctgaatgaacacagctgacccctttcccgcgcactgaaagggcagagtaggccgaagggtccaagggccagactgcctcaccctctgccctaatcagcagggtgggcctgccttttgctaagcgatctctatgcctgggatgccctttattccaggaggcatcaagcctctaaagaatgtctcacctcctctgcccaaaaatgatgcctttctgtaggctggtgttgttgcctccctcccaggatccctttggtgagtatggtgttcaggatgcaccaccaccacctctagataccttcaggcaacacagcccagttttaacctctagtatccatgaccaaactatccctgacacatgaggacaggggcctcttctggctgtcaggagcaaagcctgaagacttggagctgcaggactggaagaacagtggagccccgtgggtctcaccctttaaggatgctgaggcctagagatgggaagtgacttgctcaaggtcacacaattggatagtgacatagctagagcgcagagttcctgattccaagtcacctgtgctttctgggaccaaagaatgggcacctgctggagtccgggcagagctttctcagttgtattgctactccagacctcaccataggttggggtcccagtaggaaggctcagggtctgtgccagccctgtcggtgctgctcagaccttcatagcctctcttgtcattctttgttgccccttttctgtcaccagccaaccacatagccttgggaccagcctctctgggggaccagaagtagtgagagaaggaaggggataggcagctttgacaggtgctgctttcaattcctctgcaactcctcccccttttatttccccaatttaaacaaagattctgccaactgtggaaacttcagtccctcaggctggcagccatgccagtacctgcctgggggtggggggtgcctggcagccatgaagcaggctgaaaggcagaggggctccaggtcctgtttccagctcccctcactgcacatggtgaagctcgctccctccctccctcccttcccgcttttcccagagctaatacacaggtgctattattcagaaaaaaaaaaaaaaaaaaaaaaaaaaaaa

SEQ ID NO: 439112 - DNA, 2778 bp, Homo sapiens
gggggaatcgcgtaatggcggacacaggcagggcgagcgcggctgggggcgtagcgcgctgagggggtccggccgtttggcagcccgcgaggcggtccgcgggagcacactctgtgcggagactgggcggccggccgacccttcctgtcgctgacggcgactgcgggaggccaggttgtttttcaccattcagaacattgcctgaagcaggtccaccatgccgttagtaacgaggaacatcgagccaaggcacctgtgccgtcagacgttgcctagcgttagaagcgagctggaatgcgtgaccaacatcaccctggcaaatgtcatccgacagctgggcagcctgagtaaatatgcagaggacatttttggagagctctttactcaggcaaatacctttgcctctcgggtaagctcccttgctgagagggtcgaccgactacaggttaaagtcactcagctggatcccaaggaagaagaagtgtcactgcaaggaatcaacacccgaaaagccttcagaagttccaccattcaagaccagaagctttttgacagaaactctctcccagtgcctgtcttagaaacatacaatacctgtgatactcctccccctctcaacaatcttaccccttacagggacgatggaaaagaggcactcaaattctacacagacccttcatacttctttgatctttggaaggagaagatgctgcaggacaccaaggatatcatgaaagagaagagaaagcataggaaagaaaagaaagataatccaaatcgagggaatgtaaacccacgtaaaatcaagacacgtaaggaagagtgggagaaaatgaagatggggcaagaatttgtggagtccaaagaaaagctggggacttctgggtatccacccactttggtgtaccagaatggcagcattggctgtgttgaaaacgtggatgcaagtagctatccgccaccaccacagtcagactctgcttcttcaccttctccttccttctccgaggacaacttgcctcctccaccagcagaattcagttacccagtggacaaccaaagaggatctggtttggctggacccaaaagatccagtgtggtcagcccaagccatccaccaccagctcctcctctaggctctccaccaggccctaaacccgggtttgctccaccacctgcccctccgccacctccgcctccaatgataggcatcccacctccaccaccgcctgtaggatttgggtctccagggacgcctccaccaccctcacccccatctttcccacctcaccctgattttgctgcccctccacctcctcctccaccaccagcagctgactacccaactctgccaccacctcccttgtcccagccaacaggaggagcacctcctcctccccctcctcctcctcctccggggccccctcctccccctttcactggtgcagatggccagcctgctataccaccaccgctttctgataccaccaagcccaagtcctccttgcctgccgtgagcgatgcccgtagcgacctgctttcagccatccgtcaaggttttcagctgcgcagggttgaggagcagcgggaacaagagaagcgggatgttgtgggcaatgacgtggccaccatcttgtctcgtcgcattgctgttgagtacagtgactcagaagatgactcctctgaatttgatgaggacgactggtccgattaactctttctgcctgctgcccaccttctttttctttccttcctacctgccttctttgatgccaaccccaacagacccgtagggggagaaaagggaggaaaaaagtaattttaaggggccaaagctttccctgaagcaaccaaagatatatccaagtgcttcctccaagtcaacatgtatttcctctccccattttcaggccctgtggggctcctgaggttcagtagctgggatgttccctctttccttcaagtgcctgttgcatattgaaaggaaggagaaatcccaaagcagattcctttgatcgggtttctgttggagatggggcttcccttaggagccatattcaactacagccttctaaaacctgtgccctcagccacttcgaatgccagccaccttctggttctaaaacggggagtggtctgaatgaacacagctgacccctttcccgcgcactgaaagggcagagtaggccgaagggtccaagggccagactgcctcaccctctgccctaatcagcagggtgggcctgccttttgctaagcgatctctatgcctgggatgccctttattccaggaggcatcaagcctctaaagaatgtctcacctcctctgcccaaaaatgatgcctttctgtaggctggtgttgttgcctccctcccaggatccctttggtgagtatggtgttcaggatgcaccaccaccacctctagataccttcaggcaacacagcccagttttaacctctagtatccatgaccaaactatccctgaggatgggaaaggagctcttcagttggagatctaggcagtgggttaagccagacccctaaagtgaccctttcctcttctgccctattcttctcagaccctcagaaagacatccaatttttttaaatccctgtagctccaagcctggtctcatttgcttccctgccaggctcatcgtgtgtataccacatttgtgccccactgacctgaaggttccatgtaactgtatacacatgaatacttaaatgccaacatttaaaataatttgataaagtctttgtagccactcagca

SEQ ID NO: 439113 - DNA, 698 bp, Homo sapiens
agacctggcgcctttacacagggtaaggagtccctgctggggtccaactgacctgggaccaggtgtcgcgcagagatgtgcctcattctgtgcctccttctgtgcctcctaccatgttccctttaactgtgcctcagtgtgggttagggaacaattttgttattgtattaagtttattcagttaattcacttgaggaactaaccagtttttactttctgtctagaatgatgtacatgtagtagagtaagccataatgctcccaaagtgccttgttttctctgatacaaacatatttataaggacatattcctgtgggttcttgggtgtgtttgccacatcaagattttagggaaggggggtatatgtgtagtagggatgccgtttgaaaacaggcactcttcccctgaggatgggaaaggagctcttcagttggagatctaggcagtgggttaagccagacccctaaagtgaccctttcctcttctgccctattcttctcagaccctcagaaagacatccaatttttttaaatccctgtagctccaagcctggtctcatttgcttccctgccaggctcatcgtgtgtataccacatttgtgccccactgacctgaaggttccatgtaactgtatacacatgaatacttaaatgccaacatttaaaataatttgataaagtctttgtagccactcagca

SEQ ID NO: 439114 - DNA, 2251 bp, Homo sapiens
gggggaatcgcgtaatggcggacacaggcagggcgagcgcggctgggggcgtagcgcgctgagggggtccggccgtttggcagcccgcgaggcggtccgcgggagcacactctgtgcggagactgggcggccggccgacccttcctgtcgctgacggcgactgcgggaggccaggttgtttttcaccattcagaacattgcctgaagcaggtccaccatgccgttagtaacgaggaacatcgagccaaggcacctgtgccgtcagacgttgcctagcgttagaagcgagctggaatgcgtgaccaacatcaccctggcaaatgtcatccgacagctgggcagcctgagtaaatatgcagaggacatttttggagagctctttactcaggcaaatacctttgcctctcgggtaagctcccttgctgagagggtcgaccgactacaggttaaagtcactcagctggatcccaaggaagaagaagtgtcactgcaaggaatcaacacccgaaaagccttcagaagttccaccattcaagaccagaagctttttgacagaaactctctcccagtgcctgtcttagaaacatacaatacctgtgatactcctccccctctcaacaatcttaccccttacagggacgatggaaaagaggcactcaaattctacacagacccttcatacttctttgatctttggaaggagaagatgctgcaggacaccaaggatatcatgaaagagaagagaaagcataggaaagaaaagaaagataatccaaatcgagggaatgtaaacccacgtaaaatcaagacacgtaaggaagagtgggagaaaatgaagatggggcaagaatttgtggagtccaaagaaaagctggggacttctgggtatccacccactttggtgtaccagaatggcagcattggctgtgttgaaaacgtggatgcaagtagctatccgccaccaccacagtcagactctgcttcttcaccttctccttccttctccgaggacaacttgcctcctccaccagcagaattcagttacccagtggacaaccaaagaggatctggtttggctggacccaaaagatccagtgtggtcagcccaagccatccaccaccagctcctcctctaggctctccaccaggccctaaacccgggtttgctccaccacctgcccctccgccacctccgcctccaatgataggcatcccacctccaccaccgcctgtaggatttgggtctccagggacgcctccaccaccctcacccccatctttcccacctcaccctgattttgctgcccctccacctcctcctccaccaccagcagctgactacccaactctgccaccacctcccttgtcccagccaacaggaggagcacctcctcctccccctcctcctcctcctccggggccccctcctccccctttcactggtgcagatggccagcctgctataccaccaccgctttctgataccaccaagcccaagtcctccttgcctgccgtgagcgatgcccgtagcgacctgctttcagccatccgtcaaggttttcagctgcgcagggttgaggagcagcgggaacaagagaagcgggatgttgtgggcaatgacgtggccaccatcttgtctcgtcgcattgctgttgagtacagtgactcagaagatgactcctctgaatttgatgaggacgactggtccgattaactctttctgcctgctgcccaccttctttttctttccttcctacctgccttctttgatgccaaccccaacagacccgtagggggagaaaagggaggaaaaaagtaattttaaggggccaaagctttccctgaagcaaccaaagatatatccaagtgcttcctccaagtcaacatgtatttcctctccccattttcaggccctgtggggctcctgaggttcagtagctgggatgttccctctttccttcaagtgcctgttgcatattgaaagggcaggtgacagatcccaacagcggtttcaccatcgaggacagactgttatgacgagagattacgaattctcgtgcgtcggactactcttctccgacaggcaacatcccttgaacttgtcgcctccagattagagcctccctctgccctcataatccttattctaggttagtgcattttgtgtttagtttacgaaacccttctcttctctatcctaaggtcatgaagctattctcctatgtgctttcggagaagaggggatcctgat

SEQ ID NO: 439115 - DNA, 485 bp, Homo sapiens
ggtgggttcttataaatatgtttgtatcagagaaaacaaggcactttgggagcattatggcttactctactacaaacatatttataaggacatattcctgtgggttcttgggtgtgtttgccacatcaagattttagggaaggggggtatatgtgtagtagggatgccgtttgaaaacaggcactcttcccctgaggatgggaaaggagctcttcagttggagatctaggcagtgggttaagccagacccctaaagtgaccctttcctcttctgccctattcttctcagaccctcagaaagacatccaatttttttaaatccctgtagctccaagcctggtctcatttgcttccctgccaggctcatcgtgtgtataccacatttgtgccccactgacctgaaggttccatgtaactgtatacacatgaatacttaaatgccaacatttaaaataatttgataaagtctttgtagccactcagca

SEQ ID NO: 439116 - DNA, 852 bp, Homo sapiens
gggggaatcgcgtaatggcggacacaggcagggcgagcgcggctgggggcgtagcgcgctgagggggtccggccgtttggcagcccgcgaggcggtccgcgggagcacactctgtgcggagactgggcggccggccgacccttcctgtcgctgacggcgactgcgggaggccaggttgtttttcaccattcagaacattgcctgaagcaggtccaccatgccgttagtaacgaggaacatcgagccaaggcacctgtgccgtcagacgttgcctagcgttagaagcgagctggaatgcgtgaccaacatcaccctggcaaatgtcatccgacagctgggcagcctgagtgagtgcctcagagagcctgtgctttgccctcaggggtcgttggtgctctttatttagtttccttctcctcccgcgttcctatttctcccccatctgccttccctaggtaatgcgaaaatgtatcctccctctcctccccaaagagaggctcccttttggtgtagcttcttctcttcaaccttctttatctaccaccaccctctaggttccctcctccctccccctccacctgcttcaacagaaatctgtgggaagggtggcaggaagggctgcagcaaaaactgcagacggaatgacagagcagaattctgtgtgtgtaaagtgggaggttcacagagcagtatcttgggtcggggaatgtgcctgtaattacacgagctgttcgatgtagcctgactttgttgaagcctcaaatgtgccaatagtttttatctacccaacacccccaccccttttcttcccaaagaggagtaaagcaaacatgccttcggagagattctgac

SEQ ID NO: 439117 - DNA, 573 bp, Homo sapiens
agggaacaattttgttattgtattaagtttattcagttaattcacttgaggaactaaccagtttttactttctgtctagaatgatgtacatgtagtagagtaagccataatgctcccaaagtgccttgttttctctgatacaaacatatttataaggacatattcctgtgggttcttgggtgtgtttgccacatcaagattttagggaaggggggtatatgtgtagtagggatgccgtttgaaaacaggcactcttcccctgaggatgggaaaggagctcttcagttggagatctaggcagtgggttaagccagacccctaaagtgaccctttcctcttctgccctattcttctcagaccctcagaaagacatccaatttttttaaatccctgtagctccaagcctggtctcatttgcttccctgccaggctcatcgtgtgtataccacatttgtgccccactgacctgaaggttccatgtaactgtatacacatgaatacttaaatgccaacatttaaaataatttgataaagtctttgtagccactcagcacacctctggtgtttgtggta

SEQ ID NO: 439118 - DNA, 652 bp, Homo sapiens
tatttggagtctcgctccgtcacccaggatggggtgcagtggctcggtcttggctcactgcaacctccgcctcccgaggtcaagcaattctcctgcctcaacctccccagtagctgggattataggtgcctgccagcacgcctgtctaatttttgtatttttagtagagacggggtttccccatgttgcccaggctggaaatgtgtagaaatattatcttttcttccaggcttaattttttgcattacacctttcagttttattcagcctgttttgagtctcatgactgttcacgtctgtcaagaagactctattagttatagaacatatgcaggcttcctaaactatgaagagtatttctctgtctctaagagcagtcatctgcatatagcccaaaccgtcttagggtatgtgtgtgtatatgtatgtgtttgggggttagggaacacgatctttagtagccagtttttgtgaccatttacgttacttctatgcactagtgacttggtttctttgctctttccagggctcttctatgaaacagttacaaacctatggccagtgcaggcagtggctcacacctgtaaatccagcactttggactgctggggaggaggacacttgaggcaggagccgagacagctgggcacat

SEQ ID NO: 439119 - DNA, 5847 bp, Homo sapiens
tatttggagtctcgctccgtcacccaggatggggtgcagtggctcggtcttggctcactgcaacctccgcctcccgaggtcaagcaattctcctgcctcaacctccccagtagctgggattataggtgcctgccagcacgcctgtctaatttttgtatttttagtagagacggggtttccccatgttgcccaggctggaaatgtgtagaaatattatcttttcttccaggcttaattttttgcattacacctttcagttttattcagcctgttttgagtctcatgactgttcacgtctgtcaagaagactctattagttatagaacatatgcaggcttcctaaactatgaagagtatttctctgtctctaagagcagtcatctgcatatagcccaaaccgtcttagggtatgtgtgtgtatatgtatgtgtttgggggttagggaacacgatctttagtagccagtttttgtgaccatttacgttacttctatgcactagtgacttggtttctttgctctttccaggtaaatatgcagaggacatttttggagagctctttactcaggcaaatacctttgcctctcgggtaagctcccttgctgagagggtcgaccgactacaggttaaagtcactcagctggatcccaaggaagaagaagtgtcactgcaaggaatcaacacccgaaaagccttcagaagttccaccattcaagaccagaagctttttgacagaaactctctcccagtgcctgtcttagaaacatacaatacctgtgatactcctccccctctcaacaatcttaccccttacagggacgatggaaaagaggcactcaaattctacacagacccttcatacttctttgatctttggaaggagaagatgctgcaggacaccaaggatatcatgaaagagaagagaaagcataggaaagaaaagaaagataatccaaatcgagggaatgtaaacccacgtaaaatcaagacacgtaaggaagagtgggagaaaatgaagatggggcaagaatttgtggagtccaaagaaaagctggggacttctgggtatccacccactttggtgtaccagaatggcagcattggctgtgttgaaaacgtggatgcaagtagctatccgccaccaccacagtcagactctgcttcttcaccttctccttccttctccgaggacaacttgcctcctccaccagcagaattcagttacccagtggacaaccaaagaggatctggtttggctggacccaaaagatccagtgtggtcagcccaagccatccaccaccagctcctcctctaggctctccaccaggccctaaacccgggtttgctccaccacctgcccctccgccacctccgcctccaatgataggcatcccacctccaccaccgcctgtaggatttgggtctccagggacgcctccaccaccctcacccccatctttcccacctcaccctgattttgctgcccctccacctcctcctccaccaccagcagctgactacccaactctgccaccacctcccttgtcccagccaacaggaggagcacctcctcctccccctcctcctcctcctccggggccccctcctccccctttcactggtgcagatggccagcctgctataccaccaccgctttctgataccaccaagcccaagtcctccttgcctgccgtgagcgatgcccgtagcgacctgctttcagccatccgtcaaggttttcagctgcgcagggttgaggagcagcgggaacaagagaagcgggatgttgtgggcaatgacgtggccaccatcttgtctcgtcgcattgctgttgagtacagtgactcagaagatgactcctctgaatttgatgaggacgactggtccgattaactctttctgcctgctgcccaccttctttttctttccttcctacctgccttctttgatgccaaccccaacagacccgtagggggagaaaagggaggaaaaaagtaattttaaggggccaaagctttccctgaagcaaccaaagatatatccaagtgcttcctccaagtcaacatgtatttcctctccccattttcaggccctgtggggctcctgaggttcagtagctgggatgttccctctttccttcaagtgcctgttgcatattgaaaggaaggagaaatcccaaagcagattcctttgatcgggtttctgttggagatggggcttcccttaggagccatattcaactacagccttctaaaacctgtgccctcagccacttcgaatgccagccaccttctggttctaaaacggggagtggtctgaatgaacacagctgacccctttcccgcgcactgaaagggcagagtaggccgaagggtccaagggccagactgcctcaccctctgccctaatcagcagggtgggcctgccttttgctaagcgatctctatgcctgggatgccctttattccaggaggcatcaagcctctaaagaatgtctcacctcctctgcccaaaaatgatgcctttctgtaggctggtgttgttgcctccctcccaggatccctttggtgagtatggtgttcaggatgcaccaccaccacctctagataccttcaggcaacacagcccagttttaacctctagtatccatgaccaaactatccctgacacatgaggacaggggcctcttctggctgtcaggagcaaagcctgaagacttggagctgcaggactggaagaacagtggagccccgtgggtctcaccctttaaggatgctgaggcctagagatgggaagtgacttgctcaaggtcacacaattggatagtgacatagctagagcgcagagttcctgattccaagtcacctgtgctttctgggaccaaagaatgggcacctgctggagtccgggcagagctttctcagttgtattgctactccagacctcaccataggttggggtcccagtaggaaggctcagggtctgtgccagccctgtcggtgctgctcagaccttcatagcctctcttgtcattctttgttgccccttttctgtcaccagccaaccacatagccttgggaccagcctctctgggggaccagaagtagtgagagaaggaaggggataggcagctttgacaggtgctgctttcaattcctctgcaactcctcccccttttatttccccaatttaaacaaagattctgccaactgtggaaacttcagtccctcaggctggcagccatgccagtacctgcctgggggtggggggtgcctggcagccatgaagcaggctgaaaggcagaggggctccaggtcctgtttccagctcccctcactgcacatggtgaagctcgctccctccctccctcccttcccgcttttcccagagctaatacacaggtgctattattcagaaaaaaactggtcagctctagccaacagtgaggtttcttttcttctgccctaactattgtgtagcctcttatgctgaaatcggcttctgctggcttctccggctttcagagccctgaaacaaagagaaacaggatctgtccctacccagcacagcaaatggttgtagtaattgccaaagccctcataaagccctccggcttgaggagagagtgtatagtcatgggttctgcctctgtgcccttgctggccgcttctcctctgccttctttcctggaactcagggtgtggggactgagcctgtaggggacagcatgccgtcttgctgtggccactcccaagtgtgccctcttccctctttacacatcaggtgtctctggcacaggacttggcactaagctccatgctgagacaccaggctatgtgggcccccaccttgtttcccagcctgcaccttagaagccgaaggtgctttcatcagaaccctaaaatggtcgttgaaggcgcctgggccgcagcccagcagtagttggagaggcaggcagagggcagtggttctcccaaataggagacctggggcctggccaggccagggtttgggcctaatggctttgactaaattacccccatcctccttgcccggaaaagggagagctagagccactcactgtcattctgctctgaccttgaagggggcggtgttggcctggcttctggaatggactgagtccatcgtggaaagggctgggggcaggaggaggtggggaggggcactgcctgcggaaggtaggattagatcattagctcagtgacctcctagggtttcgatgtgctatgttctcatcctacagttggtttggtaatgatctgcaagtcccggagagcaacagcacagctctgcctgacgctctcattaaaatctatgcagccaagctcggcactttgtagcagccggccttgcgaagcctcctcagctcggggggccggggacccagtgagccgagaggccctctgggctccacttatgcatatgcaccaaaaaaaaaaaaaaaaaaaaaagggtttttttagaacccagagccctttaagatgataaaggacccaatgcaggtaatcctgtttttggactcacgtaatgtagaatgcaaagtttagtgattatttaatctgggcctaagctagtgagagtatggaacaatggcccataaggactcctaagcgccgaagccaaggagcctcctcccttcctggttcaccccgcccaagggacctgcccccattcctgtggccctggggcccagcttccaatagtgtcagaagcaacttgtggctttgccttggttgtgagatgggtacattccaaaggagcagcctgggggagggggcaggctcagccagcccttggaggctcagagcagctggcccaggctccagctcgcctccagtggaagcccgagcgccctcagaaacgaccctggccaatgtcaacgcagagccgaggcggtgttgtcacggctaatgtgaaatctcttcccgtggcgcccatcctctgactctgcagtgccagcttggacagattgaggtctctgtggctttggtgaccctgcttaagcattcccaccgtgtcccagctctgctctaggactgcctcccactgcggcccctcacctgacttcagggtatggggagggagggagccagtgctccaaggccagggggctttgctcatgagagatgtcaggcttcctggaggcatcaggctttgagccctgctggggtccaactgacctgggaccaggtgtcgcgcagagatgtgcctcattctgtgcctccttctgtgcctcctaccatgttccctttaactgtgcctcagtgtgggttagggaacaattttgttattgtattaagtttattcagttaattcacttgaggaactaaccagtttttactttctgtctagaatgatgtacatgtagtagagtaagccataatgctcccaaagtgccttgttttctctgatacaaacatatttataaggacatattcctgtgggttcttgggtgtgtttgccacatcaagattttagggaaggggggtatatgtgtagtagggatgccgtttgaaaacaggcactcttcccctgaggatgggaaaggagctcttcagttggagatctaggcagtgggttaagccagacccctaaagtgaccctttcctcttctgccctattcttctcagaccctcagaaagacatccaatttttttaaatccctgtagctccaagcctggtctcatttgcttccctgccaggctcatcgtgtgtataccacatttgtgccccactgacctgaaggttccatgtaactgtatacacatgaatacttaaatgccaacatttaaaataatttgataaagtctttgtagccactcagca

SEQ ID NO: 439120 - DNA, 4943 bp, Homo sapiens
gctgaggtcgctctagagtatcccataggaaagaaaagaaagataatccaaatcgagggaatgtaaacccacgtaaaatcaagacacgtaaggaagagtgggagaaaatgaagatggggcaagaatttgtggagtccaaagaaaagctggggacttctgggtatccacccactttggtgtaccagaatggcagcattggctgtgttgaaaacgtggatgcaagtagctatccgccaccaccacagtcagactctgcttcttcaccttctccttccttctccgaggacaacttgcctcctccaccagcagaattcagttacccagtggacaaccaaagaggatctggtttggctggacccaaaagatccagtgtggtcagcccaagccatccaccaccagctcctcctctaggctctccaccaggccctaaacccgggtttgctccaccacctgcccctccgccacctccgcctccaatgataggcatcccacctccaccaccgcctgtaggatttgggtctccagggacgcctccaccaccctcacccccatctttcccacctcaccctgattttgctgcccctccacctcctcctccaccaccagcagctgactacccaactctgccaccacctcccttgtcccagccaacaggaggagcacctcctcctccccctcctcctcctcctccggggccccctcctccccctttcactggtgcagatggccagcctgctataccaccaccgctttctgataccaccaagcccaagtcctccttgcctgccgtgagcgatgcccgtagcgacctgctttcagccatccgtcaaggttttcagctgcgcagggttgaggagcagcgggaacaagagaagcgggatgttgtgggcaatgacgtggccaccatcttgtctcgtcgcattgctgttgagtacagtgactcagaagatgactcctctgaatttgatgaggacgactggtccgattaactctttctgcctgctgcccaccttctttttctttccttcctacctgccttctttgatgccaaccccaacagacccgtagggggagaaaagggaggaaaaaagtaattttaaggggccaaagctttccctgaagcaaccaaagatatatccaagtgcttcctccaagtcaacatgtatttcctctccccattttcaggccctgtggggctcctgaggttcagtagctgggatgttccctctttccttcaagtgcctgttgcatattgaaaggaaggagaaatcccaaagcagattcctttgatcgggtttctgttggagatggggcttcccttaggagccatattcaactacagccttctaaaacctgtgccctcagccacttcgaatgccagccaccttctggttctaaaacggggagtggtctgaatgaacacagctgacccctttcccgcgcactgaaagggcagagtaggccgaagggtccaagggccagactgcctcaccctctgccctaatcagcagggtgggcctgccttttgctaagcgatctctatgcctgggatgccctttattccaggaggcatcaagcctctaaagaatgtctcacctcctctgcccaaaaatgatgcctttctgtaggctggtgttgttgcctccctcccaggatccctttggtgagtatggtgttcaggatgcaccaccaccacctctagataccttcaggcaacacagcccagttttaacctctagtatccatgaccaaactatccctgacacatgaggacaggggcctcttctggctgtcaggagcaaagcctgaagacttggagctgcaggactggaagaacagtggagccccgtgggtctcaccctttaaggatgctgaggcctagagatgggaagtgacttgctcaaggtcacacaattggatagtgacatagctagagcgcagagttcctgattccaagtcacctgtgctttctgggaccaaagaatgggcacctgctggagtccgggcagagctttctcagttgtattgctactccagacctcaccataggttggggtcccagtaggaaggctcagggtctgtgccagccctgtcggtgctgctcagaccttcatagcctctcttgtcattctttgttgccccttttctgtcaccagccaaccacatagccttgggaccagcctctctgggggaccagaagtagtgagagaaggaaggggataggcagctttgacaggtgctgctttcaattcctctgcaactcctcccccttttatttccccaatttaaacaaagattctgccaactgtggaaacttcagtccctcaggctggcagccatgccagtacctgcctgggggtggggggtgcctggcagccatgaagcaggctgaaaggcagaggggctccaggtcctgtttccagctcccctcactgcacatggtgaagctcgctccctccctccctcccttcccgcttttcccagagctaatacacaggtgctattattcagaaaaaaactggtcagctctagccaacagtgaggtttcttttcttctgccctaactattgtgtagcctcttatgctgaaatcggcttctgctggcttctccggctttcagagccctgaaacaaagagaaacaggatctgtccctacccagcacagcaaatggttgtagtaattgccaaagccctcataaagccctccggcttgaggagagagtgtatagtcatgggttctgcctctgtgcccttgctggccgcttctcctctgccttctttcctggaactcagggtgtggggactgagcctgtaggggacagcatgccgtcttgctgtggccactcccaagtgtgccctcttccctctttacacatcaggtgtctctggcacaggacttggcactaagctccatgctgagacaccaggctatgtgggcccccaccttgtttcccagcctgcaccttagaagccgaaggtgctttcatcagaaccctaaaatggtcgttgaaggcgcctgggccgcagcccagcagtagttggagaggcaggcagagggcagtggttctcccaaataggagacctggggcctggccaggccagggtttgggcctaatggctttgactaaattacccccatcctccttgcccggaaaagggagagctagagccactcactgtcattctgctctgaccttgaagggggcggtgttggcctggcttctggaatggactgagtccatcgtggaaagggctgggggcaggaggaggtggggaggggcactgcctgcggaaggtaggattagatcattagctcagtgacctcctagggtttcgatgtgctatgttctcatcctacagttggtttggtaatgatctgcaagtcccggagagcaacagcacagctctgcctgacgctctcattaaaatctatgcagccaagctcggcactttgtagcagccggccttgcgaagcctcctcagctcggggggccggggacccagtgagccgagaggccctctgggctccacttatgcatatgcaccaaaaaaaaaaaaaaaaaaaaaagggtttttttagaacccagagccctttaagatgataaaggacccaatgcaggtaatcctgtttttggactcacgtaatgtagaatgcaaagtttagtgattatttaatctgggcctaagctagtgagagtatggaacaatggcccataaggactcctaagcgccgaagccaaggagcctcctcccttcctggttcaccccgcccaagggacctgcccccattcctgtggccctggggcccagcttccaatagtgtcagaagcaacttgtggctttgccttggttgtgagatgggtacattccaaaggagcagcctgggggagggggcaggctcagccagcccttggaggctcagagcagctggcccaggctccagctcgcctccagtggaagcccgagcgccctcagaaacgaccctggccaatgtcaacgcagagccgaggcggtgttgtcacggctaatgtgaaatctcttcccgtggcgcccatcctctgactctgcagtgccagcttggacagattgaggtctctgtggctttggtgaccctgcttaagcattcccaccgtgtcccagctctgctctaggactgcctcccactgcggcccctcacctgacttcagggtatggggagggagggagccagtgctccaaggccagggggctttgctcatgagagatgtcaggcttcctggaggcatcaggctttgagccctgctggggtccaactgacctgggaccaggtgtcgcgcagagatgtgcctcattctgtgcctccttctgtgcctcctaccatgttccctttaactgtgcctcagtgtgggttagggaacaattttgttattgtattaagtttattcagttaattcacttgaggaactaaccagtttttactttctgtctagaatgatgtacatgtagtagagtaagccataatgctcccaaagtgccttgttttctctgatacaaacatatttataaggacatattcctgtgggttcttgggtgtgtttgccacatcaagattttagggaaggggggtatatgtgtagtagggatgccgtttgaaaacaggcactcttcccctgaggatgggaaaggagctcttcagttggagatctaggcagtgggttaagccagacccctaaagtgaccctttcctcttctgccctattcttctcagaccctcagaaagacatccaatttttttaaatccctgtagctccaagcctggtctcatttgcttccctgccaggctcatcgtgtgtataccacatttgtgccccactgacctgaaggttccatgtaactgtatacacatgaatacttaaatgccaacatttaaaataatttgataaagtctttgtagccactcagca

SEQ ID NO: 439121 - DNA, 5601 bp, Homo sapiens
gggggaatcgcgtaatggcggacacaggcagggcgagcgcggctgggggcgtagcgcgctgagggggtccggccgtttggcagcccgcgaggcggtccgcgggagcacactctgtgcggagactgggcggccggccgacccttcctgtcgctgacggcgactgcgggaggccaggttgtttttcaccattcagaacattgcctgaagcaggtccaccatgccgttagtaacgaggaacatcgagccaaggcacctgtgccgtcagacgttgcctagcgttagaagcgagctggaatgcgtgaccaacatcaccctggcaaatgtcatccgacagctgggcagcctgagtaaatatgcagaggacatttttggagagctctttactcaggcaaatacctttgcctctcgggtaagctcccttgctgagagggtcgaccgactacaggttaaagtcactcagctggatcccaaggaagaagaagtgtcactgcaaggaatcaacacccgaaaagccttcagaagttccaccattcaagaccagaagctttttgacagaaactctctcccagtgcctgtcttagaaacatacaatacctgtgatactcctccccctctcaacaatcttaccccttacagggacgatggaaaagaggcactcaaattctacacagacccttcatacttctttgatctttggaaggagaagatgctgcaggacaccaaggatatcatgaaagagaagagaaagcataggaaagaaaagaaagataatccaaatcgagggaatgtaaacccacgtaaaatcaagacacgtaaggaagagtgggagaaaatgaagatggggcaagaatttgtggagtccaaagaaaagctggggacttctgggtatccacccactttggtgtaccagaatggcagcattggctgtgttgaaaacgtggatgcaagtagctatccgccaccaccacagtcagactctgcttcttcaccttctccttccttctccgaggacaacttgcctcctccaccagcagaattcagttacccagtggacaaccaaagaggatctggtttggctggacccaaaagatccagtgtggtcagcccaagccatccaccaccagctcctcctctaggctctccaccaggccctaaacccgggtttgctccaccacctgcccctccgccacctccgcctccaatgataggcatcccacctccaccaccgcctgtaggatttgggtctccagggacgcctccaccaccctcacccccatctttcccacctcaccctgattttgctgcccctccacctcctcctccaccaccagcagctgactacccaactctgccaccacctcccttgtcccagccaacaggaggagcacctcctcctccccctcctcctcctcctccggggccccctcctccccctttcactggtgcagatggccagcctgctataccaccaccgctttctgataccaccaagcccaagtcctccttgcctgccgtgagcgatgcccgtagcgacctgctttcagccatccgtcaaggttttcagctgcgcagggttgaggagcagcgggaacaagagaagcgggatgttgtgggcaatgacgtggccaccatcttgtctcgtcgcattgctgttgagtacagtgactcagaagatgactcctctgaatttgatgaggacgactggtccgattaactctttctgcctgctgcccaccttctttttctttccttcctacctgccttctttgatgccaaccccaacagacccgtagggggagaaaagggaggaaaaaagtaattttaaggggccaaagctttccctgaagcaaccaaagatatatccaagtgcttcctccaagtcaacatgtatttcctctccccattttcaggccctgtggggctcctgaggttcagtagctgggatgttccctctttccttcaagtgcctgttgcatattgaaaggaaggagaaatcccaaagcagattcctttgatcgggtttctgttggagatggggcttcccttaggagccatattcaactacagccttctaaaacctgtgccctcagccacttcgaatgccagccaccttctggttctaaaacggggagtggtctgaatgaacacagctgacccctttcccgcgcactgaaagggcagagtaggccgaagggtccaagggccagactgcctcaccctctgccctaatcagcagggtgggcctgccttttgctaagcgatctctatgcctgggatgccctttattccaggaggcatcaagcctctaaagaatgtctcacctcctctgcccaaaaatgatgcctttctgtaggctggtgttgttgcctccctcccaggatccctttggtgagtatggtgttcaggatgcaccaccaccacctctagataccttcaggcaacacagcccagttttaacctctagtatccatgaccaaactatccctgacacatgaggacaggggcctcttctggctgtcaggagcaaagcctgaagacttggagctgcaggactggaagaacagtggagccccgtgggtctcaccctttaaggatgctgaggcctagagatgggaagtgacttgctcaaggtcacacaattggatagtgacatagctagagcgcagaagctttctcagttgtattgctactccagacctcaccataggttggggtcccagtaggaaggctcagggtctgtgccagccctgtcggtgctgctcagaccttcatagcctctcttgtcattctttgttgccccttttctgtcaccagccaaccacatagccttgggaccagcctctctgggggaccagaagtagtgagagaaggaaggggataggcagctttgacaggtgctgctttcaattcctctgcaactcctcccccttttatttccccaatttaaacaaagattctgccaactgtggaaacttcagtccctcaggctggcagccatgccagtacctgcctgggggtggggggtgcctggcagccatgaagcaggctgaaaggcagaggggctccaggtcctgtttccagctcccctcactgcacatggtgaagctcgctccctccctccctcccttcccgcttttcccagagctaatacacaggtgctattattcagaaaaaaactggtcagctctagccaacagtgaggtttcttttcttctgccctaactattgtgtagcctcttatgctgaaatcggcttctgctggcttctccggctttcagagccctgaaacaaagagaaacaggatctgtccctacccagcacagcaaatggttgtagtaattgccaaagccctcataaagccctccggcttgaggagagagtgtatagtcatgggttctgcctctgtgcccttgctggccgcttctcctctgccttctttcctggaactcagggtgtggggactgagcctgtaggggacagcatgccgtcttgctgtggccactcccaagtgtgccctcttccctctttacacatcaggtgtctctggcacaggacttggcactaagctccatgctgagacaccaggctatgtgggcccccaccttgtttcccagcctgcaccttagaagccgaaggtgctttcatcagaaccctaaaatggtcgttgaaggcgcctgggccgcagcccagcagtagttggagaggcaggcagagggcagtggttctcccaaataggagacctggggcctggccaggccagggtttgggcctaatggctttgactaaattacccccatcctccttgcccggaaaagggagagctagagccactcactgtcattctgctctgaccttgaagggggcggtgttggcctggcttctggaatggactgagtccatcgtggaaagggctgggggcaggaggaggtggggaggggcactgcctgcggaaggtaggattagatcattagctcagtgacctcctagggtttcgatgtgctatgttctcatcctacagttggtttggtaatgatctgcaagtcccggagagcaacagcacagctctgcctgacgctctcattaaaatctatgcagccaagctcggcactttgtagcagccggccttgcgaagcctcctcagctcggggggccggggacccagtgagccgagaggccctctgggctccacttatgcatatgcaccaaaaaaaaaaaaaaaaaaaaaagggtttttttagaacccagagccctttaagatgataaaggacccaatgcaggtaatcctgtttttggactcacgtaatgtagaatgcaaagtttagtgattatttaatctgggcctaagctagtgagagtatggaacaatggcccataaggactcctaagcgccgaagccaaggagcctcctcccttcctggttcaccccgcccaagggacctgcccccattcctgtggccctggggcccagcttccaatagtgtcagaagcaacttgtggctttgccttggttgtgagatgggtacattccaaaggagcagcctgggggagggggcaggctcagccagcccttggaggctcagagcagctggcccaggctccagctcgcctccagtggaagcccgagcgccctcagaaacgaccctggccaatgtcaacgcagagccgaggcggtgttgtcacggctaatgtgaaatctcttcccgtggcgcccatcctctgactctgcagtgccagcttggacagattgaggtctctgtggctttggtgaccctgcttaagcattcccaccgtgtcccagctctgctctaggactgcctcccactgcggcccctcacctgacttcagggtatggggagggagggagccagtgctccaaggccagggggctttgctcatgagagatgtcaggcttcctggaggcatcaggctttgagccctgctggggtccaactgacctgggaccaggtgtcgcgcagagatgtgcctcattctgtgcctccttctgtgcctcctaccatgttccctttaactgtgcctcagtgtgggttagggaacaattttgttattgtattaagtttattcagttaattcacttgaggaactaaccagtttttactttctgtctagaatgatgtacatgtagtagagtaagccataatgctcccaaagtgccttgttttctctgatacaaacatatttataaggacatattcctgtgggttcttgggtgtgtttgccacatcaagattttagggaaggggggtatatgtgtagtagggatgccgtttgaaaacaggcactcttcccctgaggatgggaaaggagctcttcagttggagatctaggcagtgggttaagccagacccctaaagtgaccctttcctcttctgccctattcttctcagaccctcagaaagacatccaatttttttaaatccctgtagctccaagcctggtctcatttgcttccctgccaggctcatcgtgtgtataccacatttgtgccccactgacctgaaggttccatgtaactgtatacacatgaatacttaaatgccaacatttaaaataatttgataaagtctttgtagccactcagca

SEQ ID NO: 439122 - DNA, 5535 bp, Homo sapiens
gggggaatcgcgtaatggcggacacaggcagggcgagcgcggctgggggcgtagcgcgctgagggggtccggccgtttggcagcccgcgaggcggtccgcgggagcacactctgtgcggagactgggcggccggccgacccttcctgtcgctgacggcgactgcgggaggccaggttgtttttcaccattcagaacattgcctgaagcaggtccaccatgccgttagtaacgaggaacatcgagccaaggcacctgtgccgtcagacgttgcctagcgttagaagcgagctggaatgcgtgaccaacatcaccctggcaaatgtcatccgacagctgggcagcctgagtaaatatgcagaggacatttttggagagctctttactcaggcaaatacctttgcctctcgggtaagctcccttgctgagagggtcgaccgactacaggttaaagtcactcagctggatcccaaggaagaagaagtgtcactgcaaggaatcaacacccgaaaagccttcagaagttccaccattcaagaccagaagctttttgacagaaactctctcccagtgcctgtcttagaaacatacaatacctgtgatactcctccccctctcaacaatcttaccccttacagggacgatggaaaagaggcactcaaattctacacagacccttcatacttctttgatctttggaaggagaagatgctgcaggacaccaaggatatcatgaaagagaagagaaagcataggaaagaaaagaaagataatccaaatcgagggaatgtaaacccacgtaaaatcaagacacgtaaggaagagtgggagaaaatgaagatggggcaagaatttgtggagtccaaagaaaagctggggacttctgggtatccacccactttggtgtaccagaatggcagcattggctgtgttgaaaacgtggatgcaagtagctatccgccaccaccacagtcagactctgcttcttcaccttctccttccttctccgaggacaacttgcctcctccaccagcagaattcagttacccagtggacaaccaaagaggatctggtttggctggacccaaaagatccagtgtggtcagcccaagccatccaccaccagctcctcctctaggctctccaccaggccctaaacccgggtttgctccaccacctgcccctccgccacctccgcctccaatgataggcatcccacctccaccaccgcctgtaggatttgggtctccagggacgcctccaccaccctcacccccatctttcccacctcaccctgattttgctgcccctccacctcctcctccaccaccagcagctgactacccaactctgccaccacctcccttgtcccagccaacaggaggagcacctcctcctccccctcctcctcctcctccggggccccctcctccccctttcactggtgcagatggccagcctgctataccaccaccgctttctgataccaccaagcccaagtcctccttgcctgccgtgagcgatgcccgtagcgacctgctttcagccatccgtcaaggttttcagctgcgcagggttgaggagcagcgggaacaagagaagcgggatgttgtgggcaatgacgtggccaccatcttgtctcgtcgcattgctgttgagtacagtgactcagaagatgactcctctgaatttgatgaggacgactggtccgattaactctttctgcctgctgcccaccttctttttctttccttcctacctgccttctttgatgccaaccccaacagacccgtagggggagaaaagggaggaaaaaagtaattttaaggggccaaagctttccctgaagcaaccaaagatatatccaagtgcttcctccaagtcaacatgtatttcctctccccattttcaggccctgtggggctcctgaggttcagtagctgggatgttccctctttccttcaagtgcctgttgcatattgaaaggaaggagaaatcccaaagcagattcctttgatcgggtttctgttggagatggggcttcccttaggagccatattcaactacagccttctaaaacctgtgccctcagccacttcgaatgccagccaccttctggttctaaaacggggagtggtctgaatgaacacagctgacccctttcccgcgcactgaaagggcagagtaggccgaagggtccaagggccagactgcctcaccctctgccctaatcagcagggtgggcctgccttttgctaagcgatctctatgcctgggatgccctttattccaggaggcatcaagcctctaaagaatgtctcacctcctctgcccaaaaatgatgcctttctgtaggctggtgttgttgcctccctcccaggatccctttggtgagtatggtgttcaggatgcaccaccaccacctctagataccttcaggcaacacagcccagttttaacctctagtatccatgaccaaactatccctgacacatgaggacaggggcctcttctggctgtcaggagcaaagcctgaagacttggagctgcaggactggaagaacagtggagccccgtgggtctcaccctttaaggatgctgaggcctagagatgggaagtgacttgctcaaggtcacacaattggatagtgacatagctagagcgcagagttcctgattccaagtcacctgtgctttctgggaccaaagaatgggcacctgctggagtccgggcagagctttctcagttgtattgctactccagacctcaccataggttggggtcccagtaggaaggctcagggtctgtgccagccctgtcggtgctgctcagaccttcatagcctctcttgtcattctttgttgccccttttctgtcaccagccaaccacatagccttgggaccagcctctctgggggaccagaagtagtgagagaaggaaggggataggcagctttgacaggtgctgctttcaattcctctgcaactcctcccccttttatttccccaatttaaacaaagattctgccaactgtggaaacttcagtccctcaggctggcagccatgccagtacctgcctgggggtggggggtgcctggcagccatgaagcaggctgaaaggcagaggggctccaggtcctgtttccagctcccctcactgcacatggtgaagctcgctccctccctccctcccttcccgcttttcccagagctaatacacaggtgctattattcagaaaaaaactggtcagctctagccaacagtgaggtttcttttcttctgccctaactattgtgtagcctcttatgctgaaatcggcttctgctggcttctccggctttcagagccctgaaacaaagagaaacaggatctgtccctacccagcacagcaaatggttgtagtaattgccaaagccctcataaagccctccggcttgaggagagagtgtatagtcatgggttctgcctctgtgcccttgctggccgcttctcctctgccttctttcctggaactcagggtgtggggactgagcctgtaggggacagcatgccgtcttgctgtggccactcccaagtgtgccctcttccctctttacacatcaggtgtctctggcacaggacttggcactaagctccatgctgagacaccaggctatgtgggcccccaccttgtttcccagcctgcaccttagaagccgaaggtgctttcatcagaaccctaaaatggtcgttgaaggcgcctgggccgcagcccagcagtagttggagaggcaggcagagggcagtggttctcccaaataggagacctggggcctggccaggccagggtttgggcctaatggctttgactaaattacccccatcctccttgcccggaaaagggagagctagagccactcactgtcattctgctctgaccttgaagggggcggtgttggcctggcttctggaatggactgagtccatcgtggaaagggctgggggcaggaggaggtggggaggggcactgcctgcggaaggtaggattagatcattagctcagtgacctcctagggtttcgatgtgctatgttctcatcctacagttggtttggtaatgatctgcaagtcccggagagcaacagcacagctctgcctgacgctctcattaaaatctatgcagccaagctcggcactttgtagcagccggccttgcgaagcctcctcagctcggggggccggggacccagtgagccgagaggccctctgggctccacttatgcatatgcaccaaaaaaaaaaaaaaaaaaaaaagggtttttttagaacccagagccctttaagatgataaaggacccaatgcaggtaatcctgtttttggactcacgtaatgtagaatgcaaagtttagtgattatttaatctgggcctaagctagtgagagtatggaacaatggcccataaggactcctaagcgccgaagccaaggagcctcctcccttcctggttcaccccgcccaagggacctgcccccattcctgtggccctggggcccagcttccaatagtgtcagaagcaacttgtggctttgccttggttgtgagatgggtacattccaaaggagcagcctgggggagggggcaggctcagccagcccttggaggctcagagcagctggcccaggctccagctcgcctccagtggaagcccgagcgccctcagaaacgaccctggccaatgtcaacgcagagccgaggcggtgttgtcacggctaatgtgaaatctcttcccgtggcgcccatcctctgactctgcagtgccagcttggacagattgaggtctctgtggctttggtgaccctgcttaagcattcccaccgtgtcccagctctgctctaggactgcctcccactgcggcccctcacctgacttcagggtatggggagggagggagccagtgctccaaggccagggggctttgctcatgagagatgtcaggcttcctggaggcatcaggctttgagccctgctggggtccaactgacctgggaccaggtgtcgcgcagagatgtgcctcattctgtgcctccttctgtgcctcctaccatgttccctttaactgtgcctcagtgtgggttagggaacaattttgttattgtattaagtttattcagttaattcacttgaggaactaaccagtttttactttctgtctagaatgatgtacatgtagtagagtaagccataatgctcccaggatccctttggtgagtatggtgttcaggatgcaccaccaccacctctagataccttcaggcaacacagcccagttttaacctctagtatccatgaccaaactatccctgacacatgaggacaggggcctcttctggctgtcaggagcaaagcctggtctcatttgcttccctgccaggctcatcgtgtgtataccacatttgtgccccactgacctgaaggttccatgtaactgtatacacatgaatacttaaatgccaacatttaaaataatttgataaagtctttgtagccactcagca

SEQ ID NO: 439123 - DNA, 4938 bp, Homo sapiens
  misc_feature (4572)..(4573): n is a, c, g, or t
gggggaatcgcgtaatggcggacacaggcagggcgagcgcggctgggggcgtagcgcgctgagggggtccggccgtttggcagcccgcgaggcggtccgcgggagcacactctgtgcggagactgggcggccggccgacccttcctgtcgctgacggcgactgcgggaggccaggttgtttttcaccattcagaacattgcctgaagcaggtccaccatgccgttagtaacgaggaacatcgagccaaggcacctgtgccgtcagacgttgcctagcgttagaagcgagctggaatgcgtgaccaacatcaccctggcaaatgtcatccgacagctgggcagcctgagtaaatatgcagaggacatttttggagagctctttactcaggcaaatacctttgcctctcgggtaagctcccttgctgagagggtcgaccgactacaggttaaagtcactcagctggatcccaaggaagaagaagtgtcactgcaaggaatcaacacccgaaaagccttcagaagttccaccattcaagaccagaagctttttgacagaaactctctcccagtgcctgtcttagaaacatacaatacctgtgatactcctccccctctcaacaatcttaccccttacagggacgatggaaaagaggcactcaaattctacacagacccttcatacttctttgatctttggaaggagaagatgctgcaggacaccaaggatatcatgaaagagaagagaaagcataggaaagaaaagaaagataatccaaatcgagggaatgtaaacccacgtaaaatcaagacacgtaaggaagagtgggagaaaatgaagatggggcaagaatttgtggagtccaaagaaaagctggggacttctgggtatccacccactttggtgtaccagaatggcagcattggctgtgttgaaaacgtggatgcaagtagctatccgccaccaccacagtcagactctgcttcttcaccttctccttccttctccgaggacaacttgcctcctccaccagcagaattcagttacccagtggacaaccaaagaggatctggtttggctggacccaaaagatccagtgtggtcagcccaagccatccaccaccagctcctcctctaggctctccaccaggccctaaacccgggtttgctccaccacctgcccctccgccacctccgcctccaatgataggcatcccacctccaccaccgcctgtaggatttgggtctccagggacgcctccaccaccctcacccccatctttcccacctcaccctgattttgctgcccctccacctcctcctccaccaccagcagctgactacccaactctgccaccacctcccttgtcccagccaacaggaggagcacctcctcctccccctcctcctcctcctccggggccccctcctccccctttcactggtgcagatggccagcctgctataccaccaccgctttctgataccaccaagcccaagtcctccttgcctgccgtgagcgatgcccgtagcgacctgctttcagccatccgtcaaggttttcagctgcgcagggttgaggagcagcgggaacaagagaagcgggatgttgtgggcaatgacgtggccaccatcttgtctcgtcgcattgctgttgagtacagtgactcagaagatgactcctctgaatttgatgaggacgactggtccgattaactctttctgcctgctgcccaccttctttttctttccttcctacctgccttctttgatgccaaccccaacagacccgtagggggagaaaagggaggaaaaaagtaattttaaggggccaaagctttccctgaagcaaccaaagatatatccaagtgcttcctccaagtcaacatgtatttcctctccccattttcaggccctgtggggctcctgaggttcagtagctgggatgttccctctttccttcaagtgcctgttgcatattgaaaggaaggagaaatcccaaagcagattcctttgatcgggtttctgttggagatggggcttcccttaggagccatattcaactacagccttctaaaacctgtgccctcagccacttcgaatgccagccaccttctggttctaaaacggggagtggtctgaatgaacacagctgacccctttcccgcgcactgaaagggcagagtaggccgaagggtccaagggccagactgcctcaccctctgccctaatcagcagggtgggcctgccttttgctaagcgatctctatgcctgggatgccctttattccaggaggcatcaagcctctaaagaatgtctcacctcctctgcccaaaaatgatgcctttctgtaggctggtgttgttgcctccctcccaggatccctttggtgagtatggtgttcaggatgcaccaccaccacctctagataccttcaggcaacacagcccagttttaacctctagtatccatgaccaaactatccctgacacatgaggacaggggcctcttctggctgtcaggagcaaagcctgaagacttggagctgcaggactggaagaacagtggagccccgtgggtctcaccctttaaggatgctgaggcctagagatgggaagtgacttgctcaaggtcacacaattggatagtgacatagctagagcgcagagttcctgattccaagtcacctgtgctttctgggaccaaagaatgggcacctgctggagtccgggcagagctttctcagttgtattgctactccagacctcaccataggttggggtcccagtaggaaggctcagggtctgtgccagccctgtcggtgctgctcagaccttcatagcctctcttgtcattctttgttgccccttttctgtcaccagccaaccacatagccttgggaccagcctctctgggggaccagaagtagtgagagaaggaaggggataggcagctttgacaggtgctgctttcaattcctctgcaactcctcccccttttatttccccaatttaaacaaagattctgccaactgtggaaacttcagtccctcaggctggcagccatgccagtacctgcctgggggtggggggtgcctggcagccatgaagcaggctgaaaggcagaggggctccaggtcctgtttccagctcccctcactgcacatggtgaagctcgctccctccctccctcccttcccgcttttcccagagctaatacacaggtgctattattcagaaaaaaactggtcagctctagccaacagtgaggtttcttttcttctgccctaactattgtgtagcctcttatgctgaaatcggcttctgctggcttctccggctttcagagccctgaaacaaagagaaacaggatctgtccctacccagcacagcaaatggttgtagtaattgccaaagccctcataaagccctccggcttgaggagagagtgtatagtcatgggttctgcctctgtgcccttgctggccgcttctcctctgccttctttcctggaactcagggtgtggggactgagcctgtaggggacagcatgccgtcttgctgtggccactcccaagtgtgccctcttccctctttacacatcaggtgtctctggcacaggacttggcactaagctccatgctgagacaccaggctatgtgggcccccaccttgtttcccagcctgcaccttagaagccgaaggtgctttcatcagaaccctaaaatggtcgttgaaggcgcctgggccgcagcccagcagtagttggagaggcaggcagagggcagtggttctcccaaataggagacctggggcctggccaggccagggtttgggcctaatggctttgactaaattacccccatcctccttgcccggaaaagggagagctagagccactcactgtcattctgctctgaccttgaagggggcggtgttggcctggcttctggaatggactgagtccatcgtggaaagggctgggggcaggaggaggtggggaggggcactgcctgcggaaggtaggattagatcattagctcagtgacctcctagggtttcgatgtgctatgttctcatcctacagttggtttggtaatgatctgcaagtcccggagagcaacagcacagctctgcctgacgctctcattaaaatctatgcagccaagctcggcactttgtagcagccggccttgcgaagcctcctcagctcggggggccggggacccagtgagccgagaggccctctgggctccacttatgcatatgcaccaaaaaaaaaaaaaaaaaaaatgcaggtaatcctgtttttggactcacgtaatgtagaatgcaaagtttagtgattatttaatctgggcctaagctagtgagagtatggaacaatggcccataaggactcctaagcgccgaagccaaggagcctcctcccttcctggttcaccccgcccaagggacctgcccccattcctgtggccctggggcccagcttccaatagtgtcagaagcaacttgtggctttgccttggttgtgagatgggtacattccaaaggagcagcctggacaaggacannagatagcccactcctgtgcaggccacgcgaggttcccacttctcaaggtgcgagacaggcaatgctggtcacgtatagaagctatctagcacaggtaaccgaaaatgctcccggtaactacttacagtaaaggcatttaactcaggcccaagccttcgattctaactatacacctagaacagaacatgcaactagaacgttaatgacccataccagcctttcttaaactttccctctttttatctacaaccaactgcaacctttactgcaacactggcgttgacaaccaggccgatgggcccctcggtcttttatccgagtccgtggacccttctccaagtccgctgatccgccgcacatcccct

SEQ ID NO: 439124 - DNA, 2402 bp, Homo sapiens
ggtttctctttgtttcaggctctgaaagccggagaagccagcagaagccgatttcagcataagaggctacacaatagttagggcagaagaaaagagaaacaggatctgtccctacccagcacagcaaatggttgtagtaattgccaaagccctcataaagccctccggcttgaggagagagtgtatagtcatgggttctgcctctgtgcccttgctggccgcttctcctctgccttctttcctggaactcagggtgtggggactgagcctgtaggggacagcatgccgtcttgctgtggccactcccaagtgtgccctcttccctctttacacatcaggtgtctctggcacaggacttggcactaagctccatgctgagacaccaggctatgtgggcccccaccttgtttcccagcctgcaccttagaagccgaaggtgctttcatcagaaccctaaaatggtcgttgaaggcgcctgggccgcagcccagcagtagttggagaggcaggcagagggcagtggttctcccaaataggagacctggggcctggccaggccagggtttgggcctaatggctttgactaaattacccccatcctccttgcccggaaaagggagagctagagccactcactgtcattctgctctgaccttgaagggggcggtgttggcctggcttctggaatggactgagtccatcgtggaaagggctgggggcaggaggaggtggggaggggcactgcctgcggaaggtaggattagatcattagctcagtgacctcctagggtttcgatgtgctatgttctcatcctacagttggtttggtaatgatctgcaagtcccggagagcaacagcacagctctgcctgacgctctcattaaaatctatgcagccaagctcggcactttgtagcagccggccttgcgaagcctcctcagctcggggggccggggacccagtgagccgagaggccctctgggctccacttatgcatatgcaccaaaaaaaaaaaaaaaaaaaaaagggtttttttagaacccagagccctttaagatgataaaggacccaatgcaggtaatcctgtttttggactcacgtaatgtagaatgcaaagtttagtgattatttaatctgggcctaagctagtgagagtatggaacaatggcccataaggactcctaagcgccgaagccaaggagcctcctcccttcctggttcaccccgcccaagggacctgcccccattcctgtggccctggggcccagcttccaatagtgtcagaagcaacttgtggctttgccttggttgtgagatgggtacattccaaaggagcagcctgggggagggggcaggctcagccagcccttggaggctcagagcagctggcccaggctccagctcgcctccagtggaagcccgagcgccctcagaaacgaccctggccaatgtcaacgcagagccgaggcggtgttgtcacggctaatgtgaaatctcttcccgtggcgcccatcctctgactctgcagtgccagcttggacagattgaggtctctgtggctttggtgaccctgcttaagcattcccaccgtgtcccagctctgctctaggactgcctcccactgcggcccctcacctgacttcagggtatggggagggagggagccagtgctccaaggccagggggctttgctcatgagagatgtcaggcttcctggaggcatcaggctttgagccctgctggggtccaactgacctgggaccaggtgtcgcgcagagatgtgcctcattctgtgcctccttctgtgcctcctaccatgttccctttaactgtgcctcagtgtgggttagggaacaattttgttattgtattaagtttattcagttaattcacttgaggaactaaccagtttttactttctgtctagaatgatgtacatgtagtagagtaagccataatgctcccaaagtgccttgttttctctgatacaaacatatttataaggacatattcctgtgggttcttgggtgtgtttgccacatcaagattttagggaaggggggtatatgtgtagtagggatgccgtttgaaaacaggcactcttcccctgaggatgggaaaggagctcttcagttggagatctaggcagtgggttaagccagacccctaaagtgaccctttcctcttctgccctattcttctcagaccctcagaaagacatccaatttttttaaatccctgtagctccaagcctggtctcatttgcttccctgccaggctcatcgtgtgtataccacatttgtgccccactgacctgaaggttccatgtaactgtatacacatgaatacttaaatgccaacatttaaaataatttgataaagtctttgtagccactcagca

SEQ ID NO: 439125 - DNA, 1369 bp, Homo sapiens
  misc_feature (35)..(36): n is a, c, g, or t
gtaaactgcataaatgcctcggcaaagataaaggnnccaatgcaggtaatcctgtttttggactcacgtaatgtagaatgcaaagtttagtgattatttaatctgggcctaagctagtgagagtatggaacaatggcccataaggactcctaagcgccgaagccaaggagcctcctcccttcctggttcaccccgcccaagggacctgcccccattcctgtggccctggggcccagcttccaatagtgtcagaagcaacttgtggctttgccttggttgtgagatgggtacattccaaaggagcagcctgggggagggggcaggctcagccagcccttggaggctcagagcagctggcccaggctccagctcgcctccagtggaagcccgagcgccctcagaaacgaccctggccaatgtcaacgcagagccgaggcggtgttgtcacggctaatgtgaaatctcttcccgtggcgcccatcctctgactctgcagtgccagcttggacagattgaggtctctgtggctttggtgaccctgcttaagcattcccaccgtgtcccagctctgctctaggactgcctcccactgcggcccctcacctgacttcagggtatggggagggagggagccagtgctccaaggccagggggctttgctcatgagagatgtcaggcttcctggaggcatcaggctttgagccctgctggggtccaactgacctgggaccaggtgtcgcgcagagatgtgcctcattctgtgcctccttctgtgcctcctaccatgttccctttaactgtgcctcagtgtgggttagggaacaattttgttattgtattaagtttattcagttaattcacttgaggaactaaccagtttttactttctgtctagaatgatgtacatgtagtagagtaagccataatgctcccaaagtgccttgttttctctgatacaaacatatttataaggacatattcctgtgggttcttgggtgtgtttgccacatcaagattttagggaaggggggtatatgtgtagtagggatgccgtttgaaaacaggcactcttcccctgaggatgggaaaggagctcttcagttggagatctaggcagtgggttaagccagacccctaaagtgaccctttcctcttctgccctattcttctcagaccctcagaaagacatccaatttttttaaatccctgtagctccaagcctggtctcatttgcttccctgccaggctcatcgtgtgtataccacatttgtgccccactgacctgaaggttccatgtaactgtatacacatgaatacttaaatgccaacatttaaaataatttgataaagtctttgtagccactcagca

SEQ ID NO: 439126 - DNA, 2680 bp, Homo sapiens
gggggaatcgcgtaatggcggacacaggcagggcgagcgcggctgggggcgtagcgcgctgagggggtccggccgtttggcagcccgcgaggcggtccgcgggagcacactctgtgcggagactgggcggccggccgacccttcctgtcgctgacggcgactgcgggaggccaggttgtttttcaccattcagaacattgcctgaagcaggtccaccatgccgttagtaacgaggaacatcgagccaaggcacctgtgccgtcagacgttgcctagcgttagaagcgagctggaatgcgtgaccaacatcaccctggcaaatgtcatccgacagctgggcagcctgagtaaatatgcagaggacatttttggagagctctttactcaggcaaatacctttgcctctcgggtaagctcccttgctgagagggtcgaccgactacaggttaaagtcactcagctggatcccaaggaagaagaagtgtcactgcaaggaatcaacacccgaaaagccttcagaagttccaccattcaagaccagaagctttttgacagaaactctctcccagtgcctgtcttagaaacatacaatacctgtgatactcctccccctctcaacaatcttaccccttacagggacgatggaaaagaggcactcaaattctacacagacccttcatacttctttgatctttggaaggagaagatgctgcaggacaccaaggatatcatgaaagagaagagaaagcataggaaagaaaagaaagataatccaaatcgagggaatgtaaacccacgtaaaatcaagacacgtaaggaagagtgggagaaaatgaagatggggcaagaatttgtggagtccaaagaaaagctggggacttctgggtatccacccactttggtgtaccagaatggcagcattggctgtgttgaaaacgtggatgcaagtagctatccgccaccaccacagtcagactctgcttcttcaccttctccttccttctccgaggacaacttgcctcctccaccagcagaattcagttacccagtggacaaccaaagaggatctggtttggctggacccaaaagatccagtgtggtcagcccaagccatccaccaccagctcctcctctaggctctccaccaggccctaaacccgggtttgctccaccacctgcccctccgccacctccgcctccaatgataggcatcccacctccaccaccgcctgtaggatttgggtctccagggacgcctccaccaccctcacccccatctttcccacctcaccctgattttgctgcccctccacctcctcctccaccaccagcagctgactacccaactctgccaccacctcccttgtcccagccaacaggaggagcacctcctcctccccctcctcctcctcctccggggccccctcctccccctttcactggtgcagatggccagcctgctataccaccaccgctttctgataccaccaagcccaagtcctccttgcctgccgtgagcgatgcccgtagcgacctgctttcagccatccgtcaaggttttcagctgcgcagggttgaggagcagcgggaacaagagaagcgggatgttgtgggcaatgacgtggccaccatcttgtctcgtcgcattgctgttgagtacagtgactcagaagatgactcctctgaatttgatgaggacgactggtccgattaactctttctgcctgctgcccaccttctttttctttccttcctacctgccttctttgatgccaaccccaacagacccgtagggggagaaaagggaggaaaaaagtaattttaaggggccaaagctttccctgaagcaaccaaagatatatccaagtgcttcctccaagtcaacatgtatttcctctccccattttcaggccctgtggggctcctgaggttcagtagctgggatgttccctctttccttcaagtgcctgttgcatattgaaaggaaggagaaatcccaaagcagattcctttgatcgggtttctgttggagatggggcttcccttaggagccatattcaactacagccttctaaaacctgtgccctcagccacttcgaatgccagccaccttctggttctaaaacggggagtggtctgaatgaacacagctgacccctttcccgcgcactgaaagggcagagtaggccgaagggtccaagggccagactgcctcaccctctgccctaatcagcagggtgggcctgccttttgctaagcgatctctatgcctgggatgccctttattccaggaggcatcaagcctctaaagaatgtctcacctcctctgcccaaaaatgatgcctttctgtaggctggtgttgttgcctccctcccaggatccctttggtgagtatggtgttcaggatgcaccaccaccacctctagataccttcaggcaacacagcccagttttaacctctagtatccatgaccaaactatccctgacacatgaggacaggggcctcttctggctgtcaggagcaaagccctggtctcatttgcttccctgccaggctcatcgtgtgtataccacatttgtgccccactgacctgaaggttccatgtaactgtatacacatgaatacttaaatgccaacatttaaaataatttgataaagtctttgtagccactcagca

SEQ ID NO: 439127 - DNA, 363 bp, Homo sapiens
acatccattgtccttaaagacttttccagagtgattgaaaccattgatttgtggaactgcaacaatatttctcaagagtttacaattgtcttacaccaccaatcagaaatatgtttggggaggcatgggtggcagggggcaacatgagccatttccatactgctccccatactacctgtgttggttccttaagcaaaaaggcctccagccttcattaaatcctataaacaaacattacatcccatgaatcattatcaactttcttcctttactccacctctgcccccctctggattttgcatacagcctcatacagtgcaaacaaggatgtgacttgctcagcttagtcatgtgatttattta

SEQ ID NO: 439128 - DNA, 1498 bp, Homo sapiens
acatccattgtccttaaagacttttccagagtgattgaaaccattgatttgtggaactgcaacaatatttctcaagagtttacaattgtcttacaccaccaatcagaaatatgtttggggaggcatgggtggcagggggcaacatgagccatttccatactgctccccatactacctgtgttggttccttaagcaaaaaggcctccagccttcattaaatcctataaacaaacattacatcccatgaatcattatcaactttcttcctttactccacctcccccattttatcttcaattctcaggctatagaatagacaagttttagaatatacttcagccaaagcagaaagattttcatagatccaatatgcaaatagttctgctgtgacatagatcagaaattgtctgttccttaatatttgggggtggaggcaacaaaactgaagcatatttctgattggttagccattttggcctgtttcctcttgcatgttttttagggagagagggaaacagtcctgtatttcttctgatgccctttggggaagccgacgaccactgggcatttctcactgttactcctgttcaagagagggcttctcagtctgcactgaaaaatgcaaattaaactggatctttatgtcaatgtgtacatagtacaagcttttttactggaattgaggtttaaaaccacacactgcccttttggtggtgtgcctgttgggccaaaaattgggtgataatgtagtgtcactttctcagctcaatgcagtttctactttttcttatgggaaaatttttcataaaacctttttgcaccaaaacccaggggtgttttttgcaatatccttgttatcctcgtagtgtgccaagtcagaggctttctcttgcccttttcctgctgtgttctcaggcctcccaagggctgtttgactcaacagtctacatccttcgttgtgttttggagaatgtgggggtgggggtcagagttcaaggtgtctgttcccttttcctgtgaactctttctagtccctatttggggagggtggctggaaacagatttttgctgaatttctggctcagatcttctagccaggaaaggcaagagcccccaagagcccttttttttgacatacactaatcattggccggggtcttggtgacaacttttaaaatcccaaatagttttatttggattatgtaaaagtaagtgtgaaacatgggaacaacggacttccactgagcgatgtgaaaacgttacaggttcagtacttccaaaggaagaaacctccaaacccaaaaaagaataaatatgaatttgtatttttgaagaatgtgaaataatggtgtttgcttaattgctcattttgtataaacttaatattgtactttaaaatatctgctaaaaagtgaaaatttaactttttggaattgaaaaagcaatattaaatactaatgaaatcctaattaaatgcttatttaaatctggtagtatc

SEQ ID NO: 439129 - DNA, 1388 bp, Homo sapiens
acatccattgtccttaaagacttttccagagtgattgaaaccattgatttgtggaactgcaacaatatttctcaagagtttacaattgtcttacaccaccaatcagaaatatgtttggggaggcatgggtggcagggggcaacatgagccatttccatactgctccccatactacctgtgttggttccttaagcaaaaaggcctccagccttcattaaatcctataaacaaacattacatcccatgaatcattatcaactttcttcctttactccacctcccccattttatcttcaattctcaggctatagaatagacaagttttagaatatacttcagccaaagcagaaagattttcatagatccaatatgcaaatagttctgctgtgacatagatcagaaattgtctgttccttaatatttgggggtggaggcaacaaaactgaagcatatttctgattggttagccattttggcctgtttcctcttgcatgttttttagggagagagggaaacagtcctgtatttcttctgatgccctttggggaagccgacgaccactgggcatttctcactgttactcctgttcaagagagggcttctcagtctgcactgaaaaatgcaaattaaactggatctttatgtcaatgtgtacatagtacaagcttttttactggaattgaggtttaaaaccacacactgcccttttggtggtgtgcctgttgggccaaaaattgggtgataatgtagtgtcactttctcagctcaatgcagtttctactttttcttatgggaaaatttttcataaaacctttttgcaccaaaacccaggggtgttttttgcaatatccttgttatcctcgtagtgtgccaagtcagagttcaaggtgtctgttcccttttcctgtgaactctttctagtccctatttggggagggtggctggaaacagatttttgctgaatttctggctcagatcttctagccaggaaaggcaagagcccccaagagcccttttttttgacatacactaatcattggccggggtcttggtgacaacttttaaaatcccaaatagttttatttggattatgtaaaagtaagtgtgaaacatgggaacaacggacttccactgagcgatgtgaaaacgttacaggttcagtacttccaaaggaagaaacctccaaacccaaaaaagaataaatatgaatttgtatttttgaagaatgtgaaataatggtgtttgcttaattgctcattttgtataaacttaatattgtactttaaaatatctgctaaaaagtgaaaatttaactttttggaattgaaaaagcaatattaaatactaatgaaatcctaattaaatgcttatttaaatctggtagtatc

SEQ ID NO: 439130 - DNA, 400 bp, Homo sapiens
gaggaatgaaagtggcggtctcgccggcagttggtcccgggccctggggctcgggagtcgggggcggtgggacagtgcggctactcttgatcctctccggctgcttggtctacggcacagctgaaactgatgtaaatgtggtcatgcttcaggaatcccaagtttgtgaaaagcgtgccagccaacaattctgttacacaaatgtgcttatcccaaaatggcatgatatatggacacggatacagatccgagtaaatagttccagattggttcgagtcacccaggtggagaatgaggagaaactgaaggagctagagcactgcaaatgccggactcctaaactgcgatgactgagagacttgaggcctctctgcttatactcagtcatgtactatcccgg

SEQ ID NO: 439131 - DNA, 5493 bp, Homo sapiens
tcgtagaggataggctgctgtcgttgcccgttcggagttagttgctgggctgaaactgatgtaaatgtggtcatgcttcaggaatcccaagtttgtgaaaagcgtgccagccaacaattctgttacacaaatgtgcttatcccaaaatggcatgatatatggacacggatacagatccgagtaaatagttccagattggttcgagtcacccaggtggagaatgaggagaaactgaaggagctagagcagtttagtatctggaactttttttcctcctttttaaaagagaaattgaatgacacctatgttaacgtgggtctatacagcacaaaaacctgcctcaaagttgagattatagagaaggacaccaagtacagtgtcattgtgatccggagatttgatcccaaactctttcttgttttccttcttggacttatgctatttttttgtggagacttgctgagcagaagtcaaattttctactactctactgggatgactgtgggaattgtggcctctctgctaatcatcatttttatactatctaagtttatgcctaagaaaagtcccatttacgtcatcctggtgggaggctggtctttttctctgtacctcattcaactagtttttaaaaatttacaagagatctggaggtgttactggcagtatcttttaagttatgtcctcacagttggattcatgagttttgcagtatgttacaagtatgggcccttggagaatgaacgaagtatcaacctgctgacctggaccttgcagctgatgggcctgtgtttcatgtattctggcatccagataccacatattgcccttgccattatcatcattgctctttgtactaagaacctggaacaccctattcagtggctgtacatcacctgcagaaaggtgtgtaagggagcagaaaagcctgttccccctcgtctcctgacagaagaagaatatcggatacaaggagaggtagaaacccgaaaggctttagaggagctccgagaattttgtaacagtccagactgctctgcttggaagactgtttctcgaatccagtctccaaaaagatttgctgactttgtggaaggctcttcccacctcacgccaaatgaagtttctgtccatgagcaggagtatggattagggagcattattgcccaggatgaaatctatgaggaagcatcctctgaggaggaggactcatattctcggtgtcctgctatcacacagaacaactttctaacctaggtagtggtcagttatctttacgtggactggcttggtgccttggtccatgttgcatgtgttgtgcaattgctttcaaccctttgaaacagagtgagatagatagggtagaaattctcctactgaaataagaggcctaaaaaggcctccctttggaaatgggaggtctctatgggatccctgaggaaggagagtggataaagtagtgaatgctgggtagttcacttcccattggttaagctaacagcccacttttatgtttccagagaaattggatggccacagctagcatggcattctagctccttcttgaaagttgattcaatcatggcatttctgtcactggctggctctccaaagtaagaactgttgttaagtgcaggaatgcttttagactataggctgcaacttccagagagaaatccacaaatctgagcctccttcactccagcttttatttcagtgactttagaataattattgatttaactgttttgggaggaaaatagatttttattgttttgttttttaaatgaatgtcttttaaaaaacataacaaactcatgttccagaaccagcaagtgctccagagtgacacaccccctaggcccctacatatttattaatatggattatccattaaagccccaggagctgttgttttaagctttgatttagttctcatacatatgatagaaagtcctatttgcctttaggaacatgcctgtaggctcttctgcaggtgagatgtactgggctttttattatattcaactttcaattccatcttaaaaaacatttgtattcttctcttcccattcttccttaccctgcctttgccctttcaggaagggtcagttcccttacctgtgaactatgtatgttcagagtagcattattcctgctagctaggagaagtcatcttgtttaggggatttggatgctttttatacgttctccattttcctgtcattgggtcatgttatctttgagttgctatgaaatcaggaaactgtctccttttcctttcccttcctttgtctacatgctctgtccattcctttcagccttttctcaccacccatactcccccaaatctgggtaatttttaagccttgaaactatgtagtttcttgatacacaatttgtagttatgcagcagccacaatttgcattgccaggaaataggctccaggttatcttcatgcctctgggtgctcattcagctgtcaagtttccatgaacttacacttatttatgattgcgtttctgacctgagatgtatgctgcctgttattgcagtagcattagtttcagattcttttgccattgcaaagtaccccttataaaccagcaatgtcatctgtgaggaagcaaattctcaagtgtctgtcatttacttggttctttttctttgtggtcttcacccttataccctggaaaagtctgtaattaccttagccaggaagatagatggtcatggcaagcgcacagcaccagacttactggctcaccaagatgatggaaaaaggcagatgattttttaaaaagccgtaatgactcctttagaccagccatttagcgtggtaattttgaaaggcctagctccattgcagacttccaaagggtcagctctgagactgccctccaggtgggcagttgattatttccaccagtgttttccagagccttaaactgtcctaagtgacaactacctcagttggcaggaaagagacatatagtagaaagtgaaaaatgagcagtatttgggcagatgctatgggttacagttgaagggtaaaaggaactttacattgggaaacctttatacccttgtgaattatgtacatggtaaaatgttctctctctacaaagaactattaaaacttctgaaatatactattttttaccttatttatagaaattgagacctagcatatttaagcataagtttattttaaaaaataattcaactcgtgcaagtggtctcaggattctctggagattttggtgcctcccctacttagggaggtgatagcttgcctataagggtgacttttcctgatcatgtctttatttcaatgagaaagcactgtgaaattgtgaaagattctcctctttctctgtttaataaacccccatgaaatatagtttccatctctagaccagttttttttccaccgtgtttagacttgaggtgaataaaatcaaactgttttttactccctatctggtagttggagacctgagctgtaggcagtggagatggcaattggttctgcagcctgagagttgctctcacacagtgaaggacggtgctgctctggtgtgctgtgtgtccttgccctgcctgcctgtggctctgcccagatgcttcagatcctctgtgttccggagattgcttgacttcaaccttctttaggagctgctcttgtctccctcttggccacttagtttgctggctcagtcactacttgaagaccccatttaatttttctctggcagttatagctcttgtgatttcagtacagtctcatctctcagaccaatctcatcaagaaggattgaagggataactatgaggtaagctggacattggagccgtgtttgctgccacgtcagcgtcttgctgggtgaatgtcaagccataaatgggctccagggctctggatctcatcagcattggaaatctattgcctctcatcagtctgaccaaattatgtagagcattaatgtagagactcccattaatgggaatacaagaggcagctggcataaaacatttctttcactttcctttcccactcagattgcttcaagagaccaacagaacacagggatcaaaaacaaggaaaatttagcaacttcattaccttctaataagtaattcctgttagccactgcatcccaccaaaactagtttatttttcccctcaaattcatgatttttacgtctgttacaaagggaattttgctgatagctctttgggtcccactgttccattttatgctaatagattccattctagggcccagccgtctcttgactgatggtgttccctttaacccttggcatgtataatagaattttggtgaatgaaagaacccaaataggccagatagtccccccaggccctgatatccataaaaggcttgggaatgcattatgtaattgtccttagtctttttgttgttttagaaaaaaaaaacaagatgggctcagatggatgcctacgtaaaaatggttcctagctgtgtactcataacttttctttgaattgagtagtgaaaggaaggaggaggaaaggaaattaaatgtccttctagtattctctggactcaagtctgacatatgagataataacctatattgaaatgccaagaattgtatctgaaacaagagaacagtttgacacatttatcatgccttcatattacatattaactgaaaccaattaataaacatatgaaatatccattgcacaaggcaaaggcacctaaaccttttgtttctttttctacatagcagaaattgattttttttttatttttttaggggaacctatataattatgacccagtgatgtcttttggtgacttaagcttatgaattcaggttacaattgagttgattctagatggttactaccttgaaaaggatgttggtgccttatgtgacacgagccagagcctgctgggaataaacaaagcagattcatgccaacaccaactcgtagctttagtggcagatgggagtggtcacagactcccaaaatgtggggctttggatttccacaccatcccacgtgtgtgtcatcttcctctttcacactcttgatgataatttgaaaatggtgaaatcacctctgaatttgcctatagcatgagcacattcttatgacaacataacaaatagttcataatgtgaatattagaaactgttacagcctgcagttaccataattttccatgtttgtggaattgatattgaaatagcagggctaaggaattactggcaagttttagcctgtgggtaataccttagggttatttaaatatttgtaattttatttaaatgttcatgaatgtttgaaaggaacaaaattatcagggatggctctttgccatgggtcttattttcaccctcttttctgtaagaaaaaagaacaatgtcttaatgtatttttaaagtttttggtatagtttctaattccaattttaataaaagttttatagata

SEQ ID NO: 439132 - DNA, 5247 bp, Homo sapiens
tatgcagtgggaaaccaaaaaatttgtgtgacttacttactgcaattgcaatatttggtttattgcagtggtctggaaccaaatttgaaatgtctctgatgcttgtactgctctaatcttgtaccttttaaaatctttcggctgggttagttgtcctagtttcaacagtgctatgtatgaaatatatacatatggtcatgaaatacatttttttcctgcagaagtcaaattttctactactctactgggatgactgtgggaattgtggcctctctgctaatcatcatttttatactatctaagtttatgcctaagaaaagtcccatttacgtcatcctggtgggaggctggtctttttctctgtacctcattcaactagtttttaaaaatttacaagagatctggaggtgttactggcagtatcttttaagttatgtcctcacagttggattcatgagttttgcagtatgttacaagtatgggcccttggagaatgaacgaagtatcaacctgctgacctggaccttgcagctgatgggcctgtgtttcatgtattctggcatccagataccacatattgcccttgccattatcatcattgctctttgtactaagaacctggaacaccctattcagtggctgtacatcacctgcagaaaggtgtgtaagggagcagaaaagcctgttccccctcgtctcctgacagaagaagaatatcggatacaaggagaggtagaaacccgaaaggctttagaggagctccgagaattttgtaacagtccagactgctctgcttggaagactgtttctcgaatccagtctccaaaaagatttgctgactttgtggaaggctcttcccacctcacgccaaatgaagtttctgtccatgagcaggagtatggattagggagcattattgcccaggatgaaatctatgaggaagcatcctctgaggaggaggactcatattctcggtgtcctgctatcacacagaacaactttctaacctaggtagtggtcagttatctttacgtggactggcttggtgccttggtccatgttgcatgtgttgtgcaattgctttcaaccctttgaaacagagtgagatagatagggtagaaattctcctactgaaataagaggcctaaaaaggcctccctttggaaatgggaggtctctatgggatccctgaggaaggagagtggataaagtagtgaatgctgggtagttcacttcccattggttaagctaacagcccacttttatgtttccagagaaattggatggccacagctagcatggcattctagctccttcttgaaagttgattcaatcatggcatttctgtcactggctggctctccaaagtaagaactgttgttaagtgcaggaatgcttttagactataggctgcaacttccagagagaaatccacaaatctgagcctccttcactccagcttttatttcagtgactttagaataattattgatttaactgttttgggaggaaaatagatttttattgttttgttttttaaatgaatgtcttttaaaaaacataacaaactcatgttccagaaccagcaagtgctccagagtgacacaccccctaggcccctacatatttattaatatggattatccattaaagccccaggagctgttgttttaagctttgatttagttctcatacatatgatagaaagtcctatttgcctttaggaacatgcctgtaggctcttctgcaggtgagatgtactgggctttttattatattcaactttcaattccatcttaaaaaacatttgtattcttctcttcccattcttccttaccctgcctttgccctttcaggaagggtcagttcccttacctgtgaactatgtatgttcagagtagcattattcctgctagctaggagaagtcatcttgtttaggggatttggatgctttttatacgttctccattttcctgtcattgggtcatgttatctttgagttgctatgaaatcaggaaactgtctccttttcctttcccttcctttgtctacatgctctgtccattcctttcagccttttctcaccacccatactcccccaaatctgggtaatttttaagccttgaaactatgtagtttcttgatacacaatttgtagttatgcagcagccacaatttgcattgccaggaaataggctccaggttatcttcatgcctctgggtgctcattcagctgtcaagtttccatgaacttacacttatttatgattgcgtttctgacctgagatgtatgctgcctgttattgcagtagcattagtttcagattcttttgccattgcaaagtaccccttataaaccagcaatgtcatctgtgaggaagcaaattctcaagtgtctgtcatttacttggttctttttctttgtggtcttcacccttataccctggaaaagtctgtaattaccttagccaggaagatagatggtcatggcaagcgcacagcaccagacttactggctcaccaagatgatggaaaaaggcagatgattttttaaaaagccgtaatgactcctttagaccagccatttagcgtggtaattttgaaaggcctagctccattgcagacttccaaagggtcagctctgagactgccctccaggtgggcagttgattatttccaccagtgttttccagagccttaaactgtcctaagtgacaactacctcagttggcaggaaagagacatatagtagaaagtgaaaaatgagcagtatttgggcagatgctatgggttacagttgaagggtaaaaggaactttacattgggaaacctttatacccttgtgaattatgtacatggtaaaatgttctctctctacaaagaactattaaaacttctgaaatatactattttttaccttatttatagaaattgagacctagcatatttaagcataagtttattttaaaaaataattcaactcgtgcaagtggtctcaggattctctggagattttggtgcctcccctacttagggaggtgatagcttgcctataagggtgacttttcctgatcatgtctttatttcaatgagaaagcactgtgaaattgtgaaagattctcctctttctctgtttaataaacccccatgaaatatagtttccatctctagaccagttttttttccaccgtgtttagacttgaggtgaataaaatcaaactgttttttactccctatctggtagttggagacctgagctgtaggcagtggagatggcaattggttctgcagcctgagagttgctctcacacagtgaaggacggtgctgctctggtgtgctgtgtgtccttgccctgcctgcctgtggctctgcccagatgcttcagatcctctgtgttccggagattgcttgacttcaaccttctttaggagctgctcttgtctccctcttggccacttagtttgctggctcagtcactacttgaagaccccatttaatttttctctggcagttatagctcttgtgatttcagtacagtctcatctctcagaccaatctcatcaagaaggattgaagggataactatgaggtaagctggacattggagccgtgtttgctgccacgtcagcgtcttgctgggtgaatgtcaagccataaatgggctccagggctctggatctcatcagcattggaaatctattgcctctcatcagtctgaccaaattatgtagagcattaatgtagagactcccattaatgggaatacaagaggcagctggcataaaacatttctttcactttcctttcccactcagattgcttcaagagaccaacagaacacagggatcaaaaacaaggaaaatttagcaacttcattaccttctaataagtaattcctgttagccactgcatcccaccaaaactagtttatttttcccctcaaattcatgatttttacgtctgttacaaagggaattttgctgatagctctttgggtcccactgttccattttatgctaatagattccattctagggcccagccgtctcttgactgatggtgttccctttaacccttggcatgtataatagaattttggtgaatgaaagaacccaaataggccagatagtccccccaggccctgatatccataaaaggcttgggaatgcattatgtaattgtccttagtctttttgttgttttagaaaaaaaaaacaagatgggctcagatggatgcctacgtaaaaatggttcctagctgtgtactcataacttttctttgaattgagtagtgaaaggaaggaggaggaaaggaaattaaatgtccttctagtattctctggactcaagtctgacatatgagataataacctatattgaaatgccaagaattgtatctgaaacaagagaacagtttgacacatttatcatgccttcatattacatattaactgaaaccaattaataaacatatgaaatatccattgcacaaggcaaaggcacctaaaccttttgtttctttttctacatagcagaaattgattttttttttatttttttaggggaacctatataattatgacccagtgatgtcttttggtgacttaagcttatgaattcaggttacaattgagttgattctagatggttactaccttgaaaaggatgttggtgccttatgtgacacgagccagagcctgctgggaataaacaaagcagattcatgccaacaccaactcgtagctttagtggcagatgggagtggtcacagactcccaaaatgtggggctttggatttccacaccatcccacgtgtgtgtcatcttcctctttcacactcttgatgataatttgaaaatggtgaaatcacctctgaatttgcctatagcatgagcacattcttatgacaacataacaaatagttcataatgtgaatattagaaactgttacagcctgcagttaccataattttccatgtttgtggaattgatattgaaatagcagggctaaggaattactggcaagttttagcctgtgggtaataccttagggttatttaaatatttgtaattttatttaaatgttcatgaatgtttgaaaggaacaaaattatcagggatggctctttgccatgggtcttattttcaccctcttttctgtaagaaaaaagaacaatgtcttaatgtatttttaaagtttttggtatagtttctaattccaattttaataaaagttttatagata

SEQ ID NO: 439133 - DNA, 1454 bp, Homo sapiens
  misc_feature (22)..(22): n is a, c, g, or t
ggctggtacggtcgggagttanggattgcttcaagagaccaacagaacacagggatcaaaaacaaggaaaatttagcaacttcattaccttctaataagtaattcctgttagccactgcatcccaccaaaactagtttatttttcccctcaaattcatgatttttacgtctgttacaaagggaattttgctgatagctctttgggtcccactgttccattttatgctaatagattccattctagggcccagccgtctcttgactgatggtgttccctttaacccttggcatgtataatagaattttggtgaatgaaagaacccaaataggccagatagtccccccaggccctgatatccataaaaggcttgggaatgcattatgtaattgtccttagtctttttgttgttttagaaaaaaaaaacaagatgggctcagatggatgcctacgtaaaaatggttcctagctgtgtactcataacttttctttgaattgagtagtgaaaggaaggaggaggaaaggaaattaaatgtccttctagtattctctggactcaagtctgacatatgagataataacctatattgaaatgccaagaattgtatctgaaacaagagaacagtttgacacatttatcatgccttcatattacatattaactgaaaccaattaataaacatatgaaatatccattgcacaaggcaaaggcacctaaaccttttgtttctttttctacatagcagaaattgattttttttttatttttttaggggaacctatataattatgacccagtgatgtcttttggtgacttaagcttatgaattcaggttacaattgagttgattctagatggttactaccttgaaaaggatgttggtgccttatgtgacacgagccagagcctgctgggaataaacaaagcagattcatgccaacaccaactcgtagctttagtggcagatgggagtggtcacagactcccaaaatgtggggctttggatttccacaccatcccacgtgtgtgtcatcttcctctttcacactcttgatgataatttgaaaatggtgaaatcacctctgaatttgcctatagcatgagcacattcttatgacaacataacaaatagttcataatgtgaatattagaaactgttacagcctgcagttaccataattttccatgtttgtggaattgatattgaaatagcagggctaaggaattactggcaagttttagcctgtgggtaataccttagggttatttaaatatttgtaattttatttaaatgttcatgaatgtttgaaaggaacaaaattatcagggatggctctttgccatgggtcttattttcaccctcttttctgtaagaaaaaagaacaatgtcttaatgtatttttaaagtttttggtatagtttctaattccaattttaataaaagttttatagata

SEQ ID NO: 439134 - DNA, 843 bp, Homo sapiens
attaataacatatgaaatatccatttgcaaaaggtttaggtgcctttgccttgtgcaatggatatttcatatgaaatatccattgcacaaggcaaaggcacctaaaccttttgtttctttttctacatagcagaaattgattttttttttatttttttaggggaacctatataattatgacccagtgatgtcttttggtgacttaagcttatgaattcaggttacaattgagttgattctagatggttactaccttgaaaaggatgttggtgccttatgtgacacgagccagagcctgctgggaataaacaaagcagattcatgccaacaccaactcgtagctttagtggcagatgggagtggtcacagactcccaaaatgtggggctttggatttccacaccatcccacgtgtgtgtcatcttcctctttcacactcttgatgataatttgaaaatggtgaaatcacctctgaatttgcctatagcatgagcacattcttatgacaacataacaaatagttcataatgtgaatattagaaactgttacagcctgcagttaccataattttccatgtttgtggaattgatattgaaatagcagggctaaggaattactggcaagttttagcctgtgggtaataccttagggttatttaaatatttgtaattttatttaaatgttcatgaatgtttgaaaggaacaaaattatcagggatggctctttgccatgggtcttattttcaccctcttttctgtaagaaaaaagaacaatgtcttaatgtatttttaaagtttttggtatagtttctaattccaattttaataaaagttttatagata

SEQ ID NO: 439135 - DNA, 3153 bp, Homo sapiens
tcgtagaggataggctgctgtcgttgcccgttcggagttagttgctgggctgaaactgatgtaaatgtggtcatgcttcaggaatcccaagtttgtgaaaagcgtgccagccaacaattctgttacacaaatgtgcttatcccaaaatggcatgatatatggacacggatacagatccgagtaaatagttccagattggttcgagtcacccaggtggagaatgaggagaaactgaaggagctagagcagtttagtatctggaactttttttcctcctttttaaaagagaaattgaatgacacctatgttaacgtgggtctatacagcacaaaaacctgcctcaaagttgagattatagagaaggacaccaagtacagtgtcattgtgatccggagatttgatcccaaactctttcttgttttccttcttggacttatgctatttttttgtggagacttgctgagcagaagtcaaattttctactactctactgggatgactgtgggaattgtggcctctctgctaatcatcatttttatactatctaagtttatgcctaagaaaagtcccatttacgtcatcctggtgggaggctggtctttttctctgtacctcattcaactagtttttaaaaatttacaagagatctggaggtgttactggcagtatcttttaagttatgtcctcacagttggattcatgagttttgcagtatgttacaagtatgggcccttggagaatgaacgaagtatcaacctgctgacctggaccttgcagctgatgggcctgtgtttcatgtattctggcatccagataccacatattgcccttgccattatcatcattgctctttgtactaagaacctggaacaccctattcagtggctgtacatcacctgcagaaaggtgtgtaagggagcagaaaagcctgttccccctcgtctcctgacagaagaagaatatcggatacaaggagaggtagaaacccgaaaggctttagaggagctccgagaattttgtaacagtccagactgctctgcttggaagactgtttctcgaatccagtctccaaaaagatttgctgactttgtggaaggctcttcccacctcacgccaaatgaagtttctgtccatgagcaggagtatggattagggagcattattgcccaggatgaaatctatgaggaagcatcctctgaggaggaggactcatattctcggtgtcctgctatcacacagaacaactttctaacctaggtagtggtcagttatctttacgtggactggcttggtgccttggtccatgttgcatgtgttgtgcaattgctttcaaccctttgaaacagagtgagatagatagggtagaaattctcctactgaaataagaggcctaaaaaggcctccctttggaaatgggaggtctctatgggatccctgaggaaggagagtggataaagtagtgaatgctgggtagttcacttcccattggttaagctaacagcccacttttatgtttccagagaaattggatggccacagctagcatggcattctagctccttcttgaaagttgattcaatcatggcatttctgtcactggctggctctccaaagtaagaactgttgttaagtgcaggaatgcttttagactataggctgcaacttccagagagaaatccacaaatctgagcctccttcactccagcttttatttcagtgactttagaataattattgatttaactgttttgggaggaaaatagatttttattgttttgttttttaaatgaatgtcttttaaaaaacataacaaactcatgttccagaaccagcaagtgctccagagtgacacaccccctaggcccctacatatttattaatatggattatccattaaagccccaggagctgttgttttaagctttgatttagttctcatacatatgatagaaagtcctatttgcctttaggaacatgcctgtaggctcttctgcaggtgagatgtactgggctttttattatattcaactttcaattccatcttaaaaaacatttgtattcttctcttcccattcttccttaccctgcctttgccctttcaggaagggtcagttcccttacctgtgaactatgtatgttcagagtagcattattcctgctagctaggagaagtcatcttgtttaggggatttggatgctttttatacgttctccattttcctgtcattgggtcatgttatctttgagttgctatgaaatcaggaaactgtctccttttcctttcccttcctttgtctacatgctctgtccattcctttcagccttttctcaccacccatactcccccaaatctgggtaatttttaagccttgaaactatgtagtttcttgatacacaatttgtagttatgcagcagccacaatttgcattgccaggaaataggctccaggttatcttcatgcctctgggtgctcattcagctgtcaagtttccatgaacttacacttatttatgattgcgtttctgacctgagatgtatgctgcctgttattgcagtagcattagtttcagattcttttgccattgcaaagtaccccttataaaccagcaatgtcatctgtgaggaagcaaattctcaagtgtctgtcatttacttggttctttttctttgtggtcttcacccttataccctggaaaagtctgtaattaccttagccaggaagatagatggtcatggcaagcgcacagcaccagacttactggctcaccaagatgatggaaaaaggcagatgattttttaaaaagccgtaatgactcctttagaccagccatttagcgtggtaattttgaaaggcctagctccattgcagacttccaaagggtcagctctgagactgccctccaggtgggcagttgattatttccaccagtgttttccagagccttaaactgtcctaagtgacaactacctcagttggcaggaaagagacatatagtagaaagtgaaaaatgagcagtatttgggcagatgctatgggttacagttgaagggtaaaaggaactttacattgggaaacctttatacccttgtgaattatgtacatggtaaaatgttctctctctacaaagaactattaaaacttctgaaatata

SEQ ID NO: 439136 - DNA, 337 bp, Homo sapiens
tatgcagtgggaaaccaaaaaatttgtgtgacttacttactgcaattgcaatatttggtttattgcagtggtctggaaccaaatttgaaatgtctctgatgcttgtactgctctaatcttgtaccttttaaaatctttcggctgggttagttgtcctagtttcaacagtgctatgtatgaaatatatacatatggtcatgaaatacatttttttcctgcagaagtcaaattttctactactctactgggatgactgtgggaattgtggcctctctgctaatcatcatttttatactatctaagtttatgcctaaggtaagtatcagaatcttcatgt

SEQ ID NO: 439137 - DNA, 5564 bp, Homo sapiens
gaggaatgaaagtggcggtctcgccggcagttggtcccgggccctggggctcgggagtcgggggcggtgggacagtgcggctactcttgatcctctccggctgcttggtctacggcacagctgaaactgatgtaaatgtggtcatgcttcaggaatcccaagtttgtgaaaagcgtgccagccaacaattctgttacacaaatgtgcttatcccaaaatggcatgatatatggacacggatacagatccgagtaaatagttccagattggttcgagtcacccaggtggagaatgaggagaaactgaaggagctagagcagtttagtatctggaactttttttcctcctttttaaaagagaaattgaatgacacctatgttaacgtgggtctatacagcacaaaaacctgcctcaaagttgagattatagagaaggacaccaagtacagtgtcattgtgatccggagatttgatcccaaactctttcttgttttccttcttggacttatgctatttttttgtggagacttgctgagcagaagtcaaattttctactactctactgggatgactgtgggaattgtggcctctctgctaatcatcatttttatactatctaagtttatgcctaagaaaagtcccatttacgtcatcctggtgggaggctggtctttttctctgtacctcattcaactagtttttaaaaatttacaagagatctggaggtgttactggcagtatcttttaagttatgtcctcacagttggattcatgagttttgcagtatgttacaagtatgggcccttggagaatgaacgaagtatcaacctgctgacctggaccttgcagctgatgggcctgtgtttcatgtattctggcatccagataccacatattgcccttgccattatcatcattgctctttgtactaagaacctggaacaccctattcagtggctgtacatcacctgcagaaaggtgtgtaagggagcagaaaagcctgttccccctcgtctcctgacagaagaagaatatcggatacaaggagaggtagaaacccgaaaggctttagaggagctccgagaattttgtaacagtccagactgctctgcttggaagactgtttctcgaatccagtctccaaaaagatttgctgactttgtggaaggctcttcccacctcacgccaaatgaagtttctgtccatgagcaggagtatggattagggagcattattgcccaggatgaaatctatgaggaagcatcctctgaggaggaggactcatattctcggtgtcctgctatcacacagaacaactttctaacctaggtagtggtcagttatctttacgtggactggcttggtgccttggtccatgttgcatgtgttgtgcaattgctttcaaccctttgaaacagagtgagatagatagggtagaaattctcctactgaaataagaggcctaaaaaggcctccctttggaaatgggaggtctctatgggatccctgaggaaggagagtggataaagtagtgaatgctgggtagttcacttcccattggttaagctaacagcccacttttatgtttccagagaaattggatggccacagctagcatggcattctagctccttcttgaaagttgattcaatcatggcatttctgtcactggctggctctccaaagtaagaactgttgttaagtgcaggaatgcttttagactataggctgcaacttccagagagaaatccacaaatctgagcctccttcactccagcttttatttcagtgactttagaataattattgatttaactgttttgggaggaaaatagatttttattgttttgttttttaaatgaatgtcttttaaaaaacataacaaactcatgttccagaaccagcaagtgctccagagtgacacaccccctaggcccctacatatttattaatatggattatccattaaagccccaggagctgttgttttaagctttgatttagttctcatacatatgatagaaagtcctatttgcctttaggaacatgcctgtaggctcttctgcaggtgagatgtactgggctttttattatattcaactttcaattccatcttaaaaaacatttgtattcttctcttcccattcttccttaccctgcctttgccctttcaggaagggtcagttcccttacctgtgaactatgtatgttcagagtagcattattcctgctagctaggagaagtcatcttgtttaggggatttggatgctttttatacgttctccattttcctgtcattgggtcatgttatctttgagttgctatgaaatcaggaaactgtctccttttcctttcccttcctttgtctacatgctctgtccattcctttcagccttttctcaccacccatactcccccaaatctgggtaatttttaagccttgaaactatgtagtttcttgatacacaatttgtagttatgcagcagccacaatttgcattgccaggaaataggctccaggttatcttcatgcctctgggtgctcattcagctgtcaagtttccatgaacttacacttatttatgattgcgtttctgacctgagatgtatgctgcctgttattgcagtagcattagtttcagattcttttgccattgcaaagtaccccttataaaccagcaatgtcatctgtgaggaagcaaattctcaagtgtctgtcatttacttggttctttttctttgtggtcttcacccttataccctggaaaagtctgtaattaccttagccaggaagatagatggtcatggcaagcgcacagcaccagacttactggctcaccaagatgatggaaaaaggcagatgattttttaaaaagccgtaatgactcctttagaccagccatttagcgtggtaattttgaaaggcctagctccattgcagacttccaaagggtcagctctgagactgccctccaggtgggcagttgattatttccaccagtgttttccagagccttaaactgtcctaagtgacaactacctcagttggcaggaaagagacatatagtagaaagtgaaaaatgagcagtatttgggcagatgctatgggttacagttgaagggtaaaaggaactttacattgggaaacctttatacccttgtgaattatgtacatggtaaaatgttctctctctacaaagaactattaaaacttctgaaatatactattttttaccttatttatagaaattgagacctagcatatttaagcataagtttattttaaaaaataattcaactcgtgcaagtggtctcaggattctctggagattttggtgcctcccctacttagggaggtgatagcttgcctataagggtgacttttcctgatcatgtctttatttcaatgagaaagcactgtgaaattgtgaaagattctcctctttctctgtttaataaacccccatgaaatatagtttccatctctagaccagttttttttccaccgtgtttagacttgaggtgaataaaatcaaactgttttttactccctatctggtagttggagacctgagctgtaggcagtggagatggcaattggttctgcagcctgagagttgctctcacacagtgaaggacggtgctgctctggtgtgctgtgtgtccttgccctgcctgcctgtggctctgcccagatgcttcagatcctctgtgttccggagattgcttgacttcaaccttctttaggagctgctcttgtctccctcttggccacttagtttgctggctcagtcactacttgaagaccccatttaatttttctctggcagttatagctcttgtgatttcagtacagtctcatctctcagaccaatctcatcaagaaggattgaagggataactatgaggtaagctggacattggagccgtgtttgctgccacgtcagcgtcttgctgggtgaatgtcaagccataaatgggctccagggctctggatctcatcagcattggaaatctattgcctctcatcagtctgaccaaattatgtagagcattaatgtagagactcccattaatgggaatacaagaggcagctggcataaaacatttctttcactttcctttcccactcagattgcttcaagagaccaacagaacacagggatcaaaaacaaggaaaatttagcaacttcattaccttctaataagtaattcctgttagccactgcatcccaccaaaactagtttatttttcccctcaaattcatgatttttacgtctgttacaaagggaattttgctgatagctctttgggtcccactgttccattttatgctaatagattccattctagggcccagccgtctcttgactgatggtgttccctttaacccttggcatgtataatagaattttggtgaatgaaagaacccaaataggccagatagtccccccaggccctgatatccataaaaggcttgggaatgcattatgtaattgtccttagtctttttgttgttttagaaaaaaaaaacaagatgggctcagatggatgcctacgtaaaaatggttcctagctgtgtactcataacttttctttgaattgagtagtgaaaggaaggaggaggaaaggaaattaaatgtccttctagtattctctggactcaagtctgacatatgagataataacctatattgaaatgccaagaattgtatctgaaacaagagaacagtttgacacatttatcatgccttcatattacatattaactgaaaccaattaataaacatatgaaatatccattgcacaaggcaaaggcacctaaaccttttgtttctttttctacatagcagaaattgattttttttttatttttttaggggaacctatataattatgacccagtgatgtcttttggtgacttaagcttatgaattcaggttacaattgagttgattctagatggttactaccttgaaaaggatgttggtgccttatgtgacacgagccagagcctgctgggaataaacaaagcagattcatgccaacaccaactcgtagctttagtggcagatgggagtggtcacagactcccaaaatgtggggctttggatttccacaccatcccacgtgtgtgtcatcttcctctttcacactcttgatgataatttgaaaatggtgaaatcacctctgaatttgcctatagcatgagcacattcttatgacaacataacaaatagttcataatgtgaatattagaaactgttacagcctgcagttaccataattttccatgtttgtggaattgatattgaaatagcagggctaaggaattactggcaagttttagcctgtgggtaataccttagggttatttaaatatttgtaattttatttaaatgttcatgaatgtttgaaaggaacaaaattatcagggatggctctttgccatgggtcttattttcaccctcttttctgtaagaaaaaagaacaatgtcttaatgtatttttaaagtttttggtatagtttctaattccaattttaataaaagttttatagata

SEQ ID NO: 439138 - DNA, 5345 bp, Homo sapiens
gaggaatgaaagtggcggtctcgccggcagttggtcccgggccctggggctcgggagtcgggggcggtgggacagtgcggctactcttgatcctctccggctgcttggtctacggcacagctgaaactgatgtaaatgtggtcatgcttcaggaatcccaagtttgtgaaaagcgtgccagccaacaattctgttacacaaatgtgcttatcccaaaatggcatgatatatggacacggatacagatccgagtaaatagttccagattggttcgagtcacccaggtggagaatgaggagaaactgaaggagctagagcaaagtcaaattttctactactctactgggatgactgtgggaattgtggcctctctgctaatcatcatttttatactatctaagtttatgcctaagaaaagtcccatttacgtcatcctggtgggaggctggtctttttctctgtacctcattcaactagtttttaaaaatttacaagagatctggaggtgttactggcagtatcttttaagttatgtcctcacagttggattcatgagttttgcagtatgttacaagtatgggcccttggagaatgaacgaagtatcaacctgctgacctggaccttgcagctgatgggcctgtgtttcatgtattctggcatccagataccacatattgcccttgccattatcatcattgctctttgtactaagaacctggaacaccctattcagtggctgtacatcacctgcagaaaggtgtgtaagggagcagaaaagcctgttccccctcgtctcctgacagaagaagaatatcggatacaaggagaggtagaaacccgaaaggctttagaggagctccgagaattttgtaacagtccagactgctctgcttggaagactgtttctcgaatccagtctccaaaaagatttgctgactttgtggaaggctcttcccacctcacgccaaatgaagtttctgtccatgagcaggagtatggattagggagcattattgcccaggatgaaatctatgaggaagcatcctctgaggaggaggactcatattctcggtgtcctgctatcacacagaacaactttctaacctaggtagtggtcagttatctttacgtggactggcttggtgccttggtccatgttgcatgtgttgtgcaattgctttcaaccctttgaaacagagtgagatagatagggtagaaattctcctactgaaataagaggcctaaaaaggcctccctttggaaatgggaggtctctatgggatccctgaggaaggagagtggataaagtagtgaatgctgggtagttcacttcccattggttaagctaacagcccacttttatgtttccagagaaattggatggccacagctagcatggcattctagctccttcttgaaagttgattcaatcatggcatttctgtcactggctggctctccaaagtaagaactgttgttaagtgcaggaatgcttttagactataggctgcaacttccagagagaaatccacaaatctgagcctccttcactccagcttttatttcagtgactttagaataattattgatttaactgttttgggaggaaaatagatttttattgttttgttttttaaatgaatgtcttttaaaaaacataacaaactcatgttccagaaccagcaagtgctccagagtgacacaccccctaggcccctacatatttattaatatggattatccattaaagccccaggagctgttgttttaagctttgatttagttctcatacatatgatagaaagtcctatttgcctttaggaacatgcctgtaggctcttctgcaggtgagatgtactgggctttttattatattcaactttcaattccatcttaaaaaacatttgtattcttctcttcccattcttccttaccctgcctttgccctttcaggaagggtcagttcccttacctgtgaactatgtatgttcagagtagcattattcctgctagctaggagaagtcatcttgtttaggggatttggatgctttttatacgttctccattttcctgtcattgggtcatgttatctttgagttgctatgaaatcaggaaactgtctccttttcctttcccttcctttgtctacatgctctgtccattcctttcagccttttctcaccacccatactcccccaaatctgggtaatttttaagccttgaaactatgtagtttcttgatacacaatttgtagttatgcagcagccacaatttgcattgccaggaaataggctccaggttatcttcatgcctctgggtgctcattcagctgtcaagtttccatgaacttacacttatttatgattgcgtttctgacctgagatgtatgctgcctgttattgcagtagcattagtttcagattcttttgccattgcaaagtaccccttataaaccagcaatgtcatctgtgaggaagcaaattctcaagtgtctgtcatttacttggttctttttctttgtggtcttcacccttataccctggaaaagtctgtaattaccttagccaggaagatagatggtcatggcaagcgcacagcaccagacttactggctcaccaagatgatggaaaaaggcagatgattttttaaaaagccgtaatgactcctttagaccagccatttagcgtggtaattttgaaaggcctagctccattgcagacttccaaagggtcagctctgagactgccctccaggtgggcagttgattatttccaccagtgttttccagagccttaaactgtcctaagtgacaactacctcagttggcaggaaagagacatatagtagaaagtgaaaaatgagcagtatttgggcagatgctatgggttacagttgaagggtaaaaggaactttacattgggaaacctttatacccttgtgaattatgtacatggtaaaatgttctctctctacaaagaactattaaaacttctgaaatatactattttttaccttatttatagaaattgagacctagcatatttaagcataagtttattttaaaaaataattcaactcgtgcaagtggtctcaggattctctggagattttggtgcctcccctacttagggaggtgatagcttgcctataagggtgacttttcctgatcatgtctttatttcaatgagaaagcactgtgaaattgtgaaagattctcctctttctctgtttaataaacccccatgaaatatagtttccatctctagaccagttttttttccaccgtgtttagacttgaggtgaataaaatcaaactgttttttactccctatctggtagttggagacctgagctgtaggcagtggagatggcaattggttctgcagcctgagagttgctctcacacagtgaaggacggtgctgctctggtgtgctgtgtgtccttgccctgcctgcctgtggctctgcccagatgcttcagatcctctgtgttccggagattgcttgacttcaaccttctttaggagctgctcttgtctccctcttggccacttagtttgctggctcagtcactacttgaagaccccatttaatttttctctggcagttatagctcttgtgatttcagtacagtctcatctctcagaccaatctcatcaagaaggattgaagggataactatgaggtaagctggacattggagccgtgtttgctgccacgtcagcgtcttgctgggtgaatgtcaagccataaatgggctccagggctctggatctcatcagcattggaaatctattgcctctcatcagtctgaccaaattatgtagagcattaatgtagagactcccattaatgggaatacaagaggcagctggcataaaacatttctttcactttcctttcccactcagattgcttcaagagaccaacagaacacagggatcaaaaacaaggaaaatttagcaacttcattaccttctaataagtaattcctgttagccactgcatcccaccaaaactagtttatttttcccctcaaattcatgatttttacgtctgttacaaagggaattttgctgatagctctttgggtcccactgttccattttatgctaatagattccattctagggcccagccgtctcttgactgatggtgttccctttaacccttggcatgtataatagaattttggtgaatgaaagaacccaaataggccagatagtccccccaggccctgatatccataaaaggcttgggaatgcattatgtaattgtccttagtctttttgttgttttagaaaaaaaaaacaagatgggctcagatggatgcctacgtaaaaatggttcctagctgtgtactcataacttttctttgaattgagtagtgaaaggaaggaggaggaaaggaaattaaatgtccttctagtattctctggactcaagtctgacatatgagataataacctatattgaaatgccaagaattgtatctgaaacaagagaacagtttgacacatttatcatgccttcatattacatattaactgaaaccaattaataaacatatgaaatatccattgcacaaggcaaaggcacctaaaccttttgtttctttttctacatagcagaaattgattttttttttatttttttaggggaacctatataattatgacccagtgatgtcttttggtgacttaagcttatgaattcaggttacaattgagttgattctagatggttactaccttgaaaaggatgttggtgccttatgtgacacgagccagagcctgctgggaataaacaaagcagattcatgccaacaccaactcgtagctttagtggcagatgggagtggtcacagactcccaaaatgtggggctttggatttccacaccatcccacgtgtgtgtcatcttcctctttcacactcttgatgataatttgaaaatggtgaaatcacctctgaatttgcctatagcatgagcacattcttatgacaacataacaaatagttcataatgtgaatattagaaactgttacagcctgcagttaccataattttccatgtttgtggaattgatattgaaatagcagggctaaggaattactggcaagttttagcctgtgggtaataccttagggttatttaaatatttgtaattttatttaaatgttcatgaatgtttgaaaggaacaaaattatcagggatggctctttgccatgggtcttattttcaccctcttttctgtaagaaaaaagaacaatgtcttaatgtatttttaaagtttttggtatagtttctaattccaattttaataaaagttttatagata

SEQ ID NO: 439139 - DNA, 5439 bp, Homo sapiens
tcgtagaggataggctgctgtcgttgcccgttcggagttagttgctgggctgaaactgatgtaaatgtggtcatgcttcaggaatcccaagtttgtgaaaagcgtgccagccaacaattctgttacacaaatgtgcttatcccaaaatggcatgatatatggacacggatacagatccgagtaaatagttccagattggttcgagtcacccaggtggagaatgaggagaaactgaaggagctagagcagtttagtatctggaactttttttcctcctttttaaaagagaaattgaatgacacctatgttaacgtgggtctatacagcacaaaaacctgcctcaaagttgagattatagagaaggacaccaagtacagtgtcattgtgatccggagatttgatcccaaactctttcttgttttccttcttggacttatgctatttttttgtggagacttgctgagcagaagtcaaattttctactactctactgggatgactgtgggaattgtggcctctctgctaatcatcatttttatactatctaagtttatgcctaagaaaagtcccatttacgtcatcctggtgggaggctggtctttttctctgtacctcattcaactagtttttaaaaatttacaagagatctggaggtgttactggcagtatcttttaagttatgtcctcacagttggattcatgagttttgcagtatgttacaagtatgggcccttggagaatgaacgaagtatcaacctgctgacctggaccttgcagctgatgggcctgtgtttcatgtattctggcatccagataccacatattgcccttgccattatcatcattgctctttgtactaagaacctggaacaccctattcagtggctgtacatcacctgcagaaaggtgtgtaagggagcagaaaagcctgttccccctcgtctcctgacagaagaagaatatcggatacaaggagaggtagaaacccgaaaggctttagaggagctccgagaattttgtaacagtccagactgctctgcttggaagactgtttctcgaatccagtctccaaaaagatttgctgactttgtggaaggctcttcccacctcacgccaaatgaagtttctgtccatgagcaggagtatggattagggagcattattgcccaggatgaaatctatgaggaagcatcctctgaggaggaggactcatattctcggtgtcctgctatcacacagaacaactttctaacctaggtagtggtcagttatctttacgtggactggcttggtgccttggtccatgttgcatgtgttgtgcaattgctttcaaccctttgaaacagagtgagatagatagggtagaaattctcctactgaaataagaggcctaaaaaggcctccctttggaaatgggaggtctctatgggatccctgaggaaggagagtggataaagtagtgaatgctgggtagttcacttcccattggttaagctaacagcccacttttatgtttccagagaaattggatggccacagctagcatggcattctagctccttcttgaaagttgattcaatcatggcatttctgtcactggctggctctccaaagtaagaactgttgttaagtgcaggaatgcttttagactataggctgcaacttccagagagaaatccacaaatctgagcctccttcactccagcttttatttcagtgactttagaataattattgatttaactgttttgggaggaaaatagatttttattgttttgttttttaaatgaatgtcttttaaaaaacataacaaactcatgttccagaaccagcaagtgctccagagtgacacaccccctaggcccctacatatttattaatatggattatccattaaagccccaggagctgttgttttaagctttgatttagttctcatacatatgatagaaagtcctatttgcctttaggaacatgcctgtaggctcttctgcaggtgagatgtactgggctttttattatattcaactttcaattccatcttaaaaaacatttgtattcttctcttcccattcttccttaccctgcctttgccctttcaggaagggtcagttcccttacctgtgaactatgtatgttcagagtagcattattcctgctagctaggagaagtcatcttgtttaggggatttggatgctttttatacgttctccattttcctgtcattgggtcatgttatctttgagttgctatgaaatcaggaaactgtctccttttcctttcccttcctttgtctacatgctctgtccattcctttcagccttttctcaccacccatactcccccaaatctgggtaatttttaagccttgaaactatgtagtttcttgatacacaatttgtagttatgcagcagccacaatttgcattgccaggaaataggctccaggttatcttcatgcctctgggtgctcattcagctgtcaagtttccatgaacttacacttatttatgattgcgtttctgacctgagatgtatgctgcctgttattgcagtagcattagtttcagattcttttgccattgcaaagtaccccttataaaccagcaatgtcatctgtgaggaagcaaattctcaagtgtctgtcatttacttggttctttttctttgtggtcttcacccttataccctggaaaagtctgtaattaccttagccaggaagatagatggtcatggcaagcgcacagcaccagacttactggctcaccaagatgatggaaaaaggcagatgattttttaaaaagccgtaatgactcctttagaccagccatttagcgtggtaattttgaaaggcctagctccattgcagacttccaaagggtcagctctgagactgccctccaggtgggcagttgattatttccaccagtgttttccagagccttaaactgtcctaagtgacaactacctcagttggcaggaaagagacatatagtagaaagtgaaaaatgagcagtatttgggcagatgctatgggttacagttgaagggtaaaaggaactttacattgggaaacctttatacccttgtgaattatgtacatggtaaaatgttctctctctacaaagaactattaaaacttctgaaatatactattttttaccttatttatagaaattgagacctagcatatttaagcataagtttattttaaaaaataattcaactcgtgcaagtggtctcaggattctctggagattttggtgcctcccctacttagggaggtgatagcttgcctataagggtgacttttcctgatcatgtctttatttcaatgagaaagcactgtgaaattgtgaaagattctcctctttctctgtttaataaacccccatgaaatatagtttccatctctagaccagttttttttccaccgtgtttagacttgaggtgaataaaatcaaactgttttttactccctatctggtagttggagacctgagctgtaggcagtggagatggcaattggttctgcagcctgagagttgctctcacacagtgaaggacggtgctgctctggtgtgctgtgtgtccttgccctgcctgcctgtggctctgcccagatgcttcagatcctctgtgttccggagattgcttgacttcaaccttctttaggagctgctcttgtctccctcttggccacttagtttgctggctcagtcactacttgaagaccccatttaatttttctctggcagttatagctcttgtgatttcagtacagtctcatctctcagaccaatctcatcaagaaggattgaagggataactatgaggtaagctggacattggagccgtgtttgctgccacgtcagcgtcttgctgggtgaatgtcaagccataaatgggctccagggctctggatctcatcagcattggaaatctattgcctctcatcagtctgaccaaattatgtagagcattaatgtagagactcccattaatgggaatacaagaggcagctggcataaaacatttctttcactttcctttcccactcagattgcttcaagagaccaacagaacacagggatcaaaaacaaggaaaatttagcaacttcattaccttctaataagtaattcctgttagccactgcatcccaccaaaactagtttatttttcccctcaaattcatgatttttacgtctgttacaaagggaattttgctgatagctctttgggtcccactgttccattttatgctaatagattccattctagggcccagccgtctcttgactgatggtgttccctttaacccttggcatgtataatagaattttggtgaatgaaagaacccaaataggccagatagtccccccaggccctgatatccataaaaggcttgggaatgcattatgtaattgtccttagtctttttgttgttttagaaaaaaaaaacaagatgggctcagatggatgcctacgtagaaggaggaggaaaggaaattaaatgtccttctagtattctctggactcaagtctgacatatgagataataacctatattgaaatgccaagaattgtatctgaaacaagagaacagtttgacacatttatcatgccttcatattacatattaactgaaaccaattaataaacatatgaaatatccattgcacaaggcaaaggcacctaaaccttttgtttctttttctacatagcagaaattgattttttttttatttttttaggggaacctatataattatgacccagtgatgtcttttggtgacttaagcttatgaattcaggttacaattgagttgattctagatggttactaccttgaaaaggatgttggtgccttatgtgacacgagccagagcctgctgggaataaacaaagcagattcatgccaacaccaactcgtagctttagtggcagatgggagtggtcacagactcccaaaatgtggggctttggatttccacaccatcccacgtgtgtgtcatcttcctctttcacactcttgatgataatttgaaaatggtgaaatcacctctgaatttgcctatagcatgagcacattcttatgacaacataacaaatagttcataatgtgaatattagaaactgttacagcctgcagttaccataattttccatgtttgtggaattgatattgaaatagcagggctaaggaattactggcaagttttagcctgtgggtaataccttagggttatttaaatatttgtaattttatttaaatgttcatgaatgtttgaaaggaacaaaattatcagggatggctctttgccatgggtcttattttcaccctcttttctgtaagaaaaaagaacaatgtcttaatgtatttttaaagtttttggtatagtttctaattccaattttaataaaagttttatagata

SEQ ID NO: 439140 - DNA, 772 bp, Homo sapiens
aggcttctgggatatgacagcattgccttgtgttagctagcaataagaaaagaagctttgtttggattaacatatataccctcttcattctgcatacctattttttccccaataatttgcagcttaggtccgaggacaccacaaactctgcttaaagggcctggaggctctcaaggcatggccagacgctctgtcttgtacttcatcctgctgaatgctctgatcaacaagggccaagcctgcttctgtgatcactatgcatggactcagtggaccagctgctcaaaaacttgcaattctggaacccagagcagacacagacaaatagtagtagataagtactaccaggaaaacttttgtgaacagatttgcagcaagcaggagactagagaatgtaactggcaaagatgccccatcaactgcctcctgggagattttggaccatggtcagactgtgacccttgtattgaaaaacagtctaaagttagatctgtcttgcgtcccagtcagtttgggggacagccatgcactgagcctctggtagcctttcaaccatgcattccatctaagctctgcaaaattgaagaggctgactgcaagaataaatttcgctgtgacagtggccgctgcattgccagaaagttagaatgcactggagtatgcacacagaagtataatcccatccctagtgtacagctgatgggctggggttcatctttctgcacgagagcccagagagaggcccttgtactctctactgaggatatgtctg

SEQ ID NO: 439141 - DNA, 383 bp, Homo sapiens
aggcttctgggatatgacagcattgccttgtgttagctagcaataagaaaagaagctttgtttggattaacatatataccctcttcattctgcatacctattttttccccaataatttgcagcttaggtccgaggacaccacaaactctgcttaaagggcctggaggctctcaaggcatggccagacgctctgtcttgtacttcatcctgctgaatgctctgatcaacaagggccaagcctgcttctgtgatcactatgcatggactcagtggaccagctgctcaaaaacttgcaattctggaacccagagcagacacagacaaatagtagtagataagtactaccagggatgccccatcctgcctcctgggagattttggcc

SEQ ID NO: 439142 - DNA, 3637 bp, Homo sapiens
aggcttctgggatatgacagcattgccttgtgttagctagcaataagaaaagaagctttgtttggattaacatatataccctcttcattctgcatacctattttttccccaataatttgcagcttaggtccgaggacaccacaaactctgcttaaagggcctggaggctctcaaggcatggccagacgctctgtcttgtacttcatcctgctgaatgctctgatcaacaagggccaagcctgcttctgtgatcactatgcatggactcagtggaccagctgctcaaaaacttgcaattctggaacccagagcagacacagacaaatagtagtagataagtactaccaggaaaacttttgtgaacagatttgcagcaagcaggagactagagaatgtaactggcaaagatgccccatcaactgcctcctgggagattttggaccatggtcagactgtgacccttgtattgaaaaacagtctaaagttagatctgtcttgcgtcccagtcagtttgggggacagccatgcactgagcctctggtagcctttcaaccatgcattccatctaagctctgcaaaattgaagaggctgactgcaagaataaatttcgctgtgacagtggccgctgcattgccagaaagttagaatgcaatggagaaaatgactgtggagacaattcagatgaaagggactgtgggaggacaaaggcagtatgcacacggaagtataatcccatccctagtgtacagttgatgggcaatgggtttcattttctggcaggagagcccagaggagaagtccttgataactctttcactggaggaatatgtaaaactgtcaaaagcagtaggacaagtaatccataccgtgttccggccaatctggaaaatgtcggctttgaggtacaaactgcagaagatgacttgaaaacagatttctacaaggatttaacttctcttggacacaatgaaaatcaacaaggctcattctcaagtcagggggggagctctttcagtgtaccaattttttattcctcaaagagaagtgaaaatatcaaccataattctgccttcaaacaagccattcaagcctctcacaaaaaggattctagttttattaggatccataaagtgatgaaagtcttaaacttcacaacgaaagctaaagatctgcacctttctgatgtctttttgaaagcacttaaccatctgcctctagaatacaactctgctttgtacagccgaatattcgatgactttgggactcattacttcacctctggctccctgggaggcgtgtatgaccttctctatcagtttagcagtgaggaactaaagaactcaggtttaaccgaggaagaagccaaacactgtgtcaggattgaaacaaagaaacgcgttttatttgctaagaaaacaaaagtggaacataggtgcaccaccaacaagctgtcagagaaacatgaaggttcatttatacagggagcagagaaatccatatccctgattcgaggtggaaggagtgaatatggagcagctttggcatgggagaaagggagctctggtctggaggagaagacattttctgagtggttagaatcagtgaaggaaaatcctgctgtgattgactttgagcttgcccccatcgtggacttggtaagaaacatcccctgtgcagtgacaaaacggaacaacctcaggaaagctttgcaagagtatgcagccaagttcgatccttgccagtgtgctccatgccctaataatggccgacccaccctctcagggactgaatgtctgtgtgtgtgtcagagtggcacctatggtgagaactgtgagaaacagtctccagattataaatccaatgcagtagacggacagtggggttgttggtcttcctggagtacctgtgatgctacttataagagatcgagaacccgagaatgcaataatcctgccccccaacgaggagggaaacgctgtgagggggagaagcgacaagaggaagactgcacattttcaatcatggaaaacaatggacaaccatgtatcaatgatgatgaagaaatgaaagaggtcgatcttcctgagatagaagcagattccgggtgtcctcagccagttcctccagaaaatggatttatccggaatgaaaagcaactatacttggttggagaagatgttgaaatttcatgccttactggctttgaaactgttggataccagtacttcagatgcttaccagacgggacctggagacaaggggatgtggaatgccaacggacggagtgcatcaagccagttgtgcaggaagtcctgacaattacaccatttcagagattgtatagaattggtgaatccattgagctaacttgccccaaaggctttgttgttgctgggccatcaaggtacacatgccaggggaattcctggacaccacccatttcaaactctctcacctgtgaaaaagatactctaacacaattgtcttcagaagaagactgtagccatcattcagaagatctctgtgtgtttgacacagactccaacgattactttacttcacccgcttgtaagtttttggctgagaaatgtttaaataatcagcaactccattttctacatattggttcctgccaagacggccgccagttagaatggggtcttgaaaggacaagactttcatccaacagcacaaagaaagaatcctgtggctatgacacctgctatgactgggaaaaatgttcagcctccacttccaaatgtgtctgcctattgcccccacagtgcttcaagggtggaaaccaactctactgtgtcaaaatgggatcatcaacaagtgagaaaacattgaacatctgtgaagtgggaactataagatgtgcaaacaggaagatggaaatactgcatcctggaaagtgtttggcctagcacaattactgctaggcccagcacaatgaacagatttaccatcccgaagaaccaactcctacaaatgagaattcttgcacaaacagcagactggcatgctcaaagttactgacaaaaattattttctgttagtttgagatcattattctcccctgactctcctgtttgggcatgtcttattcagttccagctcatgacgccctgtagcatacccctaggtaccaacttccacagcagtctcgtaaattctcctgttcacattgtacaaaaataatgtgacttctgaggcccttatgtagcctgtgacattaagcattctcacaattagaaataagaataaaacccataattttcttcaatgagttaataaacagaaatctccagaacctctgaaacacattcttgaagcccagctttcatatcttcattcaacaaataatttctgagtgtgtatacaggatgtcaagtactgaccaaagtcctgagaactcggcagataataaaacagacaaaagcctttgccttcatgaagcatacattcattcaggggtagacacacaaaaaatgaaataaacaggtaaaatatgtagcatgtttgatggtgataattgttttggagaaaatacaacacggaagggtgagtcccatccttaattatcatcttatgcaaggaaatattccataacaataaacatcgctgtaaggatga

SEQ ID NO: 439143 - DNA, 3298 bp, Homo sapiens
aggcttctgggatatgacagcattgccttgtgttagctagcaataagaaaagaagctttgtttggattaacatatataccctcttcattctgcatacctattttttccccaataatttgcagcttaggtccgaggacaccacaaactctgcttaaagggcctggaggctctcaaggcatggccagacgctctgtcttgtacttcatcctgctgaatgctctgatcaacaagggccaagcctgcttctgtgatcactatgcatggactcagtggaccagctgctcaaaaacttgcaattctggaacccagagcagacacagacaaatagtagtagataagtactaccaggaaaacttttgtgaacagatttgcagcaagcaggagactagagaatgtaactggcaaagatgccccatcaactgcctcctgggagattttggaccatggtcagactgtgacccttgtattgaaaaacagtctaaagttagatctgtcttgcgtcccagtcagtttgggggacagccatgcactgagcctctggtagcctttcaaccatgcattccatctaagctctgcaaaattgaagaggctgactgcaagaataaatttcgctgtgacagtggccgctgcattgccagaaagttagaatgcaatggagaaaatgactgtggagacaattcagatgaaagggactgtgggaggacaaaggcagtatgcacacggaagtataatcccatccctagtgtacagttgatgggcaatgggtttcattttctggcaggagagcccagaggagaagtccttgataactctttcactggaggaatatgtaaaactgtcaaaagcagtaggacaagtaatccataccgtgttccggccaatctggaaaatgtcggctttgaggtacaaactgcagaagatgacttgaaaacagatttctacaaggatttaacttctcttggacacaatgaaaatcaacaaggctcattctcaagtcagggggggagctctttcagtgtaccaattttttattcctcaaagagaagtgaaaatatcaaccataattctgccttcaaacaagccattcaagcctctcacaaaaaggattctagttttattaggatccataaagtgatgaaagtcttaaacttcacaacgaaagctaaagatctgcacctttctgatgtctttttgaaagcacttaaccatctgcctctagaatacaactctgctttgtacagccgaatattcgatgactttgggactcattacttcacctctggctccctgggaggcgtgtatgaccttctctatcagtttagcagtgaggaactaaagaactcaggtttaaccgaggaagaagccaaacactgtgtcaggattgaaacaaagaaacgcgttttatttgctaagaaaacaaaagtggaacataggtgcaccaccaacaagctgtcagagaaacatgaaggttcatttatacagggagcagagaaatccatatccctgattcgaggtggaaggagtgaatatggagcagctttggcatgggagaaagggagctctggtctggaggagaagacattttctgagtggttagaatcagtgaaggaaaatcctgctgtgattgactttgagcttgcccccatcgtggacttggtaagaaacatcccctgtgcagtgacaaaacggaacaacctcaggaaagctttgcaagagtatgcagccaagttcgatccttgccagtgtgctccatgccctaataatggccgacccaccctctcagggactgaatgtctgtgtgtgtgtcagagtggcacctatggtgagaactgtgagaaacagtctccagattataaatccaatgcagtagacggacagtggggttgttggtcttcctggagtacctgtgatgctacttataagagatcgagaacccgagaatgcaataatcctgccccccaacgaggagggaaacgctgtgagggggagaagcgacaagaggaagactgcacattttcaatcatggaaaacaatggacaaccatgtatcaatgatgatgaagaaatgaaagaggtcgatcttcctgagatagaagcagattccgggtgtcctcagccagttcctccagaaaatggatttatccggaatgaaaagcaactatacttggttggagaagatgttgaaatttcatgccttactggctttgaaactgttggataccagtacttcagatgcttaccagacgggacctggagacaaggggatgtggaatgccaacggacggagtgcatcaagccagttgtgcaggaagtcctgacaattacaccatttcagagattgtatagaattggtgaatccattgagctaacttgccccaaaggctttgttgttgctgggccatcaaggtacacatgccaggggaattcctggacaccacccatttcaaactctctcacctgtgaaaaagtctactgtgtcaaaatgggatcatcaacaagtgagaaaacattgaacatctgtgaagtgggaactataagatgtgcaaacaggaagatggaaatactgcatcctggaaagtgtttggcctagcacaattactgctaggcccagcacaatgaacagatttaccatcccgaagaaccaactcctacaaatgagaattcttgcacaaacagcagactggcatgctcaaagttactgacaaaaattattttctgttagtttgagatcattattctcccctgactctcctgtttgggcatgtcttattcagttccagctcatgacgccctgtagcatacccctaggtaccaacttccacagcagtctcgtaaattctcctgttcacattgtacaaaaataatgtgacttctgaggcccttatgtagcctgtgacattaagcattctcacaattagaaataagaataaaacccataattttcttcaatgagttaataaacagaaatctccagaacctctgaaacacattcttgaagcccagctttcatatcttcattcaacaaataatttctgagtgtgtatacaggatgtcaagtactgaccaaagtcctgagaactcggcagataataaaacagacaaaagcctttgccttcatgaagcatacattcattcaggggtagacacacaaaaaatgaaataaacaggtaaaatatgtagcatgtttgatggtgataattgttttggagaaaatacaacacggaagggtgagtcccatccttaattatcatcttatgcaaggaaatattccataacaataaacatcgctgtaaggatga

SEQ ID NO: 439144 - DNA, 2844 bp, Homo sapiens
aggcttctgggatatgacagcattgccttgtgttagctagcaataagaaaagaagctttgtttggattaacatatataccctcttcattctgcatacctattttttccccaataatttgcagcttaggtccgaggacaccacaaactctgcttaaagggcctggaggctctcaaggcatggccagacgctctgtcttgtacttcatcctgctgaatgctctgatcaacaagggccaagcctgcttctgtgatcactatgcatggactcagtggaccagctgctcaaaaacttgcaattctggaacccagagcagacacagacaaatagtagtagataagtactaccaggaaaacttttgtgaacagatttgcagcaagcaggagactagagaatgtaactggcaaagatgccccatcaactgcctcctgggagattttggaccatggtcagactgtgacccttgtattgaaaaacagtctaaagttagatctgtcttgcgtcccagtcagtttgggggacagccatgcactgagcctctggtagcctttcaaccatgcattccatctaagctctgcaaaattgaagaggctgactgcaagaataaatttcgctgtgacagtggccgctgcattgccagaaagttagaatgcaatggagaaaatgactgtggagacaattcagatgaaagggactgtgggaggacaaaggcagtatgcacacggaagtataatcccatccctagtgtacagttgatgggcaatgggtttcattttctggcaggagagcccagaggagaagtccttgataactctttcactggaggaatatgtaaaactgtcaaaagcagtaggacaagtaatccataccgtgttccggccaatctggaaaatgtcggctttgaggtacaaactgcagaagatgacttgaaaacagatttctacaaggatttaacttctcttggacacaatgaaaatcaacaaggctcattctcaagtcagggggggagctctttcagtgtaccaattttttattcctcaaagagaagtgaaaatatcaaccataattctgccttcaaacaagccattcaagcctctcacaaaaaggattctagttttattaggatccataaagtgatgaaagtcttaaacttcacaacgaaagctaaagatctgcacctttctgatgtctttttgaaagcacttaaccatctgcctctagaatacaactctgctttgtacagccgaatattcgatgactttgggactcattacttcacctctggctccctgggaggcgtgtatgaccttctctatcagtttagcagtgaggaactaaagaactcaggtttaaccgaggaagaagccaaacactgtgtcaggattgaaacaaagaaacgcgttttatttgctaagaaaacaaaagtggaacataggtgcaccaccaacaagctgtcagagaaacatgaaggttcatttatacagggagcagagaaatccatatccctgattcgaggtggaaggagtgaatatggagcagctttggcatgggagaaagggagctctggtctggaggagaagacattttctgagtggttagaatcagtgaaggaaaatcctgctgtgattgactttgagcttgcccccatcgtggacttggtaagaaacatcccctgtgcagtgacaaaacggaacaacctcaggaaagctttgcaagagtatgcagccaagttcgatccttgccagtgtgctccatgccctaataatggccgacccaccctctcagggactgaatgtctgtgtgtgtgtcagagtggcacctatggtgagaactgtgagaaacagtctccagattataaatccaatgcagtagacggacagtggggttgttggtcttcctggagtacctgtgatgctacttataagagatcgagaacccgagaatgcaataatcctgccccccaacgaggagggaaacgctgtgagggggagaagcgacaagaggaagactgcacattttcaatcatggaaaacaatggacaaccatgtatcaatgatgatgaagaaatgaaagaggtcgatcttcctgagatagaagcagattccgggtgtcctcagccagttcctccagaaaatggatttatccggaatgaaaagcaactatacttggttggagaagatgttgaaatttcatgccttactggctttgaaactgttggataccagtacttcagatgcttaccagacgggacctggagacaaggggatgtggaatgccaacggacggagtgcatcaagccagttgtgcaggaagtcctgacaattacaccatttcagagattgtatagaattggtgaatccattgagctaacttgccccaaaggctttgttgttgctgggccatcaaggtacacatgccaggggaattcctggacaccacccatttcaaactctctcacctgtgaaaaagacctggacacctcccttagcccttcagaggatcctcttgccctgagcactttacagactgtggagtatttgttgctcctgtgctgggaggtgtgggcagctgagtcccagcactgcttcaacctgaggctgattggaagagcagattccttgcataagatcattgacaatttcaaacctgtagtgatagagcaaggctgtgtgccacttgaaagctgaattgattctttttggaaacaatgtataccttgctgctcctcccaggcctaattacaaagggcaaagaggcacaaattctcttacaaaataaaaaggcatttcagctgggaccgaaccatcagaactgaaggctatggttgtttccaaaaagatgtgccc

SEQ ID NO: 439145 - DNA, 735 bp, Homo sapiens
ggagactagagaatgtaactggcaaagatgccccatcaactgcctcctgggagattttggaccatggtcagactgtgacccttgtattgaaaaacagaggtaggcaaccatgggcatttccaggaaatatgaatcacaatagagggctctgattccctgacaggcttaacagcatagtaatgctgaattacttcaatttctgaaaatcaactgtctcagcttccattgagggaaaattccatttagcacttttgtggggggaagagggggtttattttatgtattttactgtcttaagaacacaaaaaggaaattttgctcccagtattgatattgtacttacccagttctgaattccactgcctgtgccttctgagaattctgaaagcaaaagtgtatacagattgagtaatccttatccaaaatgttggtatcagaagtgttttggattttggatgttttgtggattctgaaatatttgcatatacataacgtagtagcttggggatgggacacagtctaaacatgaaattcatttatgtttcagatataccttatacatatagcctgaagataatttatacaatattttaaataattttgttcatgagacaaatttatgataagtatttacatatacaatactccactgtggcatcatgttggtactcaaaaatttttagatattggagcattttggattttaggttttcaaactaggtatgctcaactcgt

SEQ ID NO: 439146 - DNA, 3691 bp, Homo sapiens
aggcttctgggatatgacagcattgccttgtgttagctagcaataagaaaagaagctttgtttggattaacatatataccctcttcattctgcatacctattttttccccaataatttgcagcttaggtccgaggacaccacaaactctgcttaaagggcctggaggctctcaaggcatggccagacgctctgtcttgtacttcatcctgctgaatgctctgatcaacaagggccaagcctgcttctgtgatcactatgcatggactcagtggaccagctgctcaaaaacttgcaattctggaacccagagcagacacagacaaatagtagtagataagtactaccaggaaaacttttgtgaacagatttgcagcaagcaggagactagagaatgtaactggcaaagatgccccatcaactgcctcctgggagattttggaccatggtcagactgtgacccttgtattgaaaaacagtctaaagttagatctgtcttgcgtcccagtcagtttgggggacagccatgcactgagcctctggtagcctttcaaccatgcattccatctaagctctgcaaaattgaagaggctgactgcaagaataaatttcgctgtgacagtggccgctgcattgccagaaagttagaatgcaatggagaaaatgactgtggagacaattcagatgaaagggactgtgggaggacaaaggcagtatgcacacggaagtataatcccatccctagtgtacagttgatgggcaatgggtttcattttctggcaggagagcccagaggagaagtccttgataactctttcactggaggaatatgtaaaactgtcaaaagcagtaggacaagtaatccataccgtgttccggccaatctggaaaatgtcggctttgaggtacaaactgcagaagatgacttgaaaacagatttctacaaggatttaacttctcttggacacaatgaaaatcaacaaggctcattctcaagtcagggggggagctctttcagtgtaccaattttttattcctcaaagagaagtgaaaatatcaaccataattctgccttcaaacaagccattcaagcctctcacaaaaaggattctagttttattaggatccataaagtgatgaaagtcttaaacttcacaacgaaagctaaagatctgcacctttctgatgtctttttgaaagcacttaaccatctgcctctagaatacaactctgctttgtacagccgaatattcgatgactttgggactcattacttcacctctggctccctgggaggcgtgtatgaccttctctatcagtttagcagtgaggaactaaagaactcaggtttaaccgaggaagaagccaaacactgtgtcaggattgaaacaaagaaacgcgttttatttgctaagaaaacaaaagtggaacataggtgcaccaccaacaagctgtcagagaaacatgaaggttcatttatacagggagcagagaaatccatatccctgattcgaggtggaaggagtgaatatggagcagctttggcatgggagaaagggagctctggtctggaggagaagacattttctgagtggttagaatcagtgaaggaaaatcctgctgtgattgactttgagcttgcccccatcgtggacttggtaagaaacatcccctgtgcagtgacaaaacggaacaacctcaggaaagctttgcaagagtatgcagccaagttcgatccttgccagtgtgctccatgccctaataatggccgacccaccctctcagggactgaatgtctgtgtgtgtgtcagagtggcacctatggtgagaactgtgagaaacagtctccagattataaatccaatgcagtagacggacagtggggttgttggtcttcctggagtacctgtgatgctacttataagagatcgagaacccgagaatgcaataatcctgccccccaacgaggagggaaacgctgtgagggggagaagcgacaagaggaagactgcacattttcaatcatggaaaacaatggacaaccatgtatcaatgatgatgaagaaatgaaagaggtcgatcttcctgagatagaagcagattccgggtgtcctcagccagttcctccagaaaatggatttatccggaatgaaaagcaactatacttggttggagaagatgttgaaatttcatgccttactggctttgaaactgttggataccagtacttcagatgcttaccagacgggacctggagacaaggggatgtggaatgccaacggacggagtgcatcaagccagttgtgcaggaagtcctgacaattacaccatttcagagattgtatagaattggtgaatccattgagctaacttgccccaaaggctttgttgttgctgggccatcaaggtacacatgccaggggaattcctggacaccacccatttcaaactctctcacctgtgaaaaagatactctaacaaaattaaaaggccattgtcagctgggacagaaacaatcaggatctgaatgcatttgtatgtctccagaagaagactgtagccatcattcagaagatctctgtgtgtttgacacagactccaacgattactttacttcacccgcttgtaagtttttggctgagaaatgtttaaataatcagcaactccattttctacatattggttcctgccaagacggccgccagttagaatggggtcttgaaaggacaagactttcatccaacagcacaaagaaagaatcctgtggctatgacacctgctatgactgggaaaaatgttcagcctccacttccaaatgtgtctgcctattgcccccacagtgcttcaagggtggaaaccaactctactgtgtcaaaatgggatcatcaacaagtgagaaaacattgaacatctgtgaagtgggaactataagatgtgcaaacaggaagatggaaatactgcatcctggaaagtgtttggcctagcacaattactgctaggcccagcacaatgaacagatttaccatcccgaagaaccaactcctacaaatgagaattcttgcacaaacagcagactggcatgctcaaagttactgacaaaaattattttctgttagtttgagatcattattctcccctgactctcctgtttgggcatgtcttattcagttccagctcatgacgccctgtagcatacccctaggtaccaacttccacagcagtctcgtaaattctcctgttcacattgtacaaaaataatgtgacttctgaggcccttatgtagcctgtgacattaagcattctcacaattagaaataagaataaaacccataattttcttcaatgagttaataaacagaaatctccagaacctctgaaacacattcttgaagcccagctttcatatcttcattcaacaaataatttctgagtgtgtatacaggatgtcaagtactgaccaaagtcctgagaactcggcagataataaaacagacaaaagcctttgccttcatgaagcatacattcattcaggggtagacacacaaaaaatgaaataaacaggtaaaatatgtagcatgtttgatggtgataattgttttggagaaaatacaacacggaagggtgagtcccatccttaattatcatcttatgcaaggaaatattccataacaataaacatcgctgtaaggatga

SEQ ID NO: 439147 - DNA, 642 bp, Homo sapiens
  misc_feature (601)..(601): n is a, c, g, or t
  misc_feature (604)..(604): n is a, c, g, or t
  misc_feature (635)..(635): n is a, c, g, or t
aggcttctgggatatgacagcattgccttgtgttagctagcaataagaaaagaagctttgtttggattaacatatataccctcttcattctgcatacctattttttccccaataatttgcagcttaggtccgaggacaccacaaactctgcttaaagggcctggaggctctcaaggcatggccagacgctctgtcttgtacttcatcctgctgaatgctctgatcaacaagggccaagcctgcttctgtgatcactatgcatggactcagtggaccagctgctcaaaaacttgcaattctggaacccagagcagacacagacaaatagtagtagataagtactaccaggaaaacttttgtgaacagatttgcagcaagcaggagactagagaatgtaactggcaaagatgccccatcaactgcctcctgggagattttggaccatggtcagactgtgacccttgtattgaaaaacagatgcactgagcctctggtagcctttcaaccatgcattccatctaagctctgcaaaattgaagaggctgactgcaagaataaatttcgctgtgacagtgaagttttatgacctggaacccatctnacncatgtcacatcaggcctattcctaaacatcnctcaagg

SEQ ID NO: 439148 - DNA, 3589 bp, Homo sapiens
aggcttctgggatatgacagcattgccttgtgttagctagcaataagaaaagaagctttgtttggattaacatatataccctcttcattctgcatacctattttttccccaataatttgcagcttaggtccgaggacaccacaaactctgcttaaagggcctggaggctctcaaggcatggccagacgctctgtcttgtacttcatcctgctgaatgctctgatcaacaagggccaagcctgcttctgtgatcactatgcatggactcagtggaccagctgctcaaaaacttgcaattctggaacccagagcagacacagacaaatagtagtagataagtactaccaggaaaacttttgtgaacagatttgcagcaagcaggagactagagaatgtaactggcaaagatgccccatcaactgcctcctgggagattttggaccatggtcagactgtgacccttgtattgaaaaacagtctaaagttagatctgtcttgcgtcccagtcagtttgggggacagccatgcactgagcctctggtagcctttcaaccatgcattccatctaagctctgcaaaattgaagaggctgactgcaagaataaatttcgctgtgacagtggccgctgcattgccagaaagttagaatgcaatggagaaaatgactgtggagacaattcagatgaaagggactgtgggaggacaaaggcagtatgcacacggaagtataatcccatccctagtgtacagttgatgggcaatgggtttcattttctggcaggagagcccagaggagaagtccttgataactctttcactggaggaatatgtaaaactgtcaaaagcagtaggacaagtaatccataccgtgttccggccaatctggaaaatgtcggctttgaggtacaaactgcagaagatgacttgaaaacagatttctacaaggatttaacttctcttggacacaatgaaaatcaacaaggctcattctcaagtcagggggggagctctttcagtgtaccaattttttattcctcaaagagaagtgaaaatatcaaccataattctgccttcaaacaagccattcaagcctctcacaaaaagaacgaaagctaaagatctgcacctttctgatgtctttttgaaagcacttaaccatctgcctctagaatacaactctgctttgtacagccgaatattcgatgactttgggactcattacttcacctctggctccctgggaggcgtgtatgaccttctctatcagtttagcagtgaggaactaaagaactcaggtttaaccgaggaagaagccaaacactgtgtcaggattgaaacaaagaaacgcgttttatttgctaagaaagttcatttatacagggagcagagaaatccatatccctgattcgaggtggaaggagtgaatatggagcagctttggcatgggagaaagggagctctggtctggaggagaagacattttctgagtggttagaatcagtgaaggaaaatcctgctgtgattgactttgagcttgcccccatcgtggacttggtaagaaacatcccctgtgcagtgacaaaacggaacaacctcaggaaagctttgcaagagtatgcagccaagttcgatccttgccagtgtgctccatgccctaataatggccgacccaccctctcagggactgaatgtctgtgtgtgtgtcagagtggcacctatggtgagaactgtgagaaacagtctccagattataaatccaatgcagtagacggacagtggggttgttggtcttcctggagtacctgtgatgctacttataagagatcgagaacccgagaatgcaataatcctgccccccaacgaggagggaaacgctgtgagggggagaagcgacaagaggaagactgcacattttcaatcatggaaaacaatggacaaccatgtatcaatgatgatgaagaaatgaaagaggtcgatcttcctgagatagaagcagattccgggtgtcctcagccagttcctccagaaaatggatttatccggaatgaaaagcaactatacttggttggagaagatgttgaaatttcatgccttactggctttgaaactgttggataccagtacttcagatgcttaccagacgggacctggagacaaggggatgtggaatgccaacggacggagtgcatcaagccagttgtgcaggaagtcctgacaattacaccatttcagagattgtatagaattggtgaatccattgagctaacttgccccaaaggctttgttgttgctgggccatcaaggtacacatgccaggggaattcctggacaccacccatttcaaactctctcacctgtgaaaaagatactctaacaaaattaaaaggccattgtcagctgggacagaaacaatcaggatctgaatgcatttgtatgtctccagaagaagactgtagccatcattcagaagatctctgtgtgtttgacacagactccaacgattactttacttcacccgcttgtaagtttttggctgagaaatgtttaaataatcagcaactccattttctacatattggttcctgccaagacggccgccagttagaatggggtcttgaaaggacaagactttcatccaacagcacaaagaaagaatcctgtggctatgacacctgctatgactgggaaaaatgttcagcctccacttccaaatgtgtctgcctattgcccccacagtgcttcaagggtggaaaccaactctactgtgtcaaaatgggatcatcaacaagtgagaaaacattgaacatctgtgaagtgggaactataagatgtgcaaacaggaagatggaaatactgcatcctggaaagtgtttggcctagcacaattactgctaggcccagcacaatgaacagatttaccatcccgaagaaccaactcctacaaatgagaattcttgcacaaacagcagactggcatgctcaaagttactgacaaaaattattttctgttagtttgagatcattattctcccctgactctcctgtttgggcatgtcttattcagttccagctcatgacgccctgtagcatacccctaggtaccaacttccacagcagtctcgtaaattctcctgttcacattgtacaaaaataatgtgacttctgaggcccttatgtagcctgtgacattaagcattctcacaattagaaataagaataaaacccataattttcttcaatgagttaataaacagaaatctccagaacctctgaaacacattcttgaagcccagctttcatatcttcattcaacaaataatttctgagtgtgtatacaggatgtcaagtactgaccaaagtcctgagaactcggcagataataaaacagacaaaagcctttgccttcatgaagcatacattcattcaggggtagacacacaaaaaatgaaataaacaggtaaaatatgtagcatgtttgatggtgataattgttttggagaaaatacaacacggaagggtgagtcccatccttaattatcatcttatgcaaggaaatattccataacaataaacatcgctgtaaggatga

SEQ ID NO: 439149 - DNA, 3637 bp, Homo sapiens
aggcttctgggatatgacagcattgccttgtgttagctagcaataagaaaagaagctttgtttggattaacatatataccctcttcattctgcatacctattttttccccaataatttgcagcttaggtccgaggacaccacaaactctgcttaaagggcctggaggctctcaaggcatggccagacgctctgtcttgtacttcatcctgctgaatgctctgatcaacaagggccaagcctgcttctgtgatcactatgcatggactcagtggaccagctgctcaaaaacttgcaattctggaacccagagcagacacagacaaatagtagtagataagtactaccaggaaaacttttgtgaacagatttgcagcaagcaggagactagagaatgtaactggcaaagatgccccatcaactgcctcctgggagattttggaccatggtcagactgtgacccttgtattgaaaaacagtctaaagttagatctgtcttgcgtcccagtcagtttgggggacagccatgcactgagcctctggtagcctttcaaccatgcattccatctaagctctgcaaaattgaagaggctgactgcaagaataaatttcgctgtgacagtggccgctgcattgccagaaagttagaatgcaatggagaaaatgactgtggagacaattcagatgaaagggactgtgggaggacaaaggcagtatgcacacggaagtataatcccatccctagtgtacagttgatgggcaatgggtttcattttctggcaggagagcccagaggagaagtccttgataactctttcactggaggaatatgtaaaactgtcaaaagcagtaggacaagtaatccataccgtgttccggccaatctggaaaatgtcggctttgaggtacaaactgcagaagatgacttgaaaacagatttctacaaggatttaacttctcttggacacaatgaaaatcaacaaggctcattctcaagtcagggggggagctctttcagtgtaccaattttttattcctcaaagagaagtgaaaatatcaaccataattctgccttcaaacaagccattcaagcctctcacaaaaaggattctagttttattaggatccataaagtgatgaaagtcttaaacttcacaacgaaagctaaagatctgcacctttctgatgtctttttgaaagcacttaaccatctgcctctagaatacaactctgctttgtacagccgaatattcgatgactttgggactcattacttcacctctggctccctgggaggcgtgtatgaccttctctatcagtttagcagtgaggaactaaagaactcaggtttaaccgaggaagaagccaaacactgtgtcaggattgaaacaaagaaacgcgttttatttgctaagaaaacaaaagtggaacataggtgcaccaccaacaagctgtcagagaaacatgaaggttcatttatacagggagcagagaaatccatatccctgattcgaggtggaaggagtgaatatggagcagctttggcatgggagaaagggagctctggtctggaggagaagacattttctgagtggttagaatcagtgaaggaaaatcctgctgtgattgactttgagcttgcccccatcgtggacttggtaagaaacatcccctgtgcagtgacaaaacggaacaacctcaggaaagctttgcaagagtatgcagccaagttcgatccttgccagtgtgctccatgccctaataatggccgacccaccctctcagggactgaatgtctgtgtgtgtgtcagagtggcacctatggtgagaactgtgagaaacagtctccagattataaatccaatgcagtagacggacagtggggttgttggtcttcctggagtacctgtgatgctacttataagagatcgagaacccgagaatgcaataatcctgccccccaacgaggagggaaacgctgtgagggggagaagcgacaagaggaagactgcacattttcaatcatggaaaacaatggacaaccatgtatcaatgatgatgaagaaatgaaagaggtcgatcttcctgagatagaagcagattccgggtgtcctcagccagttcctccagaaaatggatttatccggaatgaaaagcaactatacttggttggagaagatgttgaaatttcatgccttactggctttgaaactgttggataccagtacttcagatgcttaccagacgggacctggagacaaggggatgtggaatgccaacggacggagtgcatcaagccagttgtgcaggaagtcctgacaattacaccatttcagagattgtatagaattggtgaatccattgagctaacttgccccaaaggctttgttgttgctgggccatcaaggtacacatgccaggggaattcctggacaccacccatttcaaactctctcacctgtgaaaaagatactctaacaaaattaaaaggccattgtcagctgggacagaaacaatcaggatctgaatgcatttgtatgtctccagaagaagactgtagccatcattcagaagatctctgtgtgtttgacacagactccaacgattactttacttcacccgcttgtaagtttttggctgagaaatgtttaaataatcagcaactccattttctacatattggttcctgccaagacggccgccagttagaatggggtcttgaaaggacaagactttcatccaacagcacaaagaaagaatcctgtggctatgacacctgctatgactgggaaaaatgttcagcctccacttccaaatgtgtctgcctattgcccccacagtgcttcaagggtggaaaccaactctactgtgtcaaaatgggatcatcaacaagtgagaaaacattgaacatctgtgaagtgggaactataagatgtgcaaacaggaagatggaaatactgcatcctggaaagtgtttggcctagcacaattactgctaggcccagcacaatgaacagatttaccatcccgaagaaccaactcctacaaatgagaattcttgcacaaacagcagactggcatgctcaaagttactgacaggcatgtcttattcagttccagctcatgacgccctgtagcatacccctaggtaccaacttccacagcagtctcgtaaattctcctgttcacattgtacaaaaataatgtgacttctgaggcccttatgtagcctgtgacattaagcattctcacaattagaaataagaataaaacccataattttcttcaatgagttaataaacagaaatctccagaacctctgaaacacattcttgaagcccagctttcatatcttcattcaacaaataatttctgagtgtgtatacaggatgtcaagtactgaccaaagtcctgagaactcggcagataataaaacagacaaaagcctttgccttcatgaagcatacattcattcaggggtagacacacaaaaaatgaaataaacaggtaaaatatgtagcatgtttgatggtgataattgttttggagaaaatacaacacggaagggtgagtcccatccttaattatcatcttatgcaaggaaatattccataacaataaacatcgctgtaaggatga

SEQ ID NO: 439150 - DNA, 1019 bp, Homo sapiens
aggcttctgggatatgacagcattgccttgtgttagctagcaataagaaaagaagctttgtttggattaacatatataccctcttcattctgcatacctattttttccccaataatttgcagcttaggtccgaggacaccacaaactctgcttaaagggcctggaggctctcaaggcatggccagacgctctgtcttgtacttcatcctgctgaatgctctgatcaacaagggccaagcctgcttctgtgatcactatgcatggactcagtggaccagctgctcaaaaacttgcaattctggaacccagagcagacacagacaaatagtagtagataagtactaccaggaaaacttttgtgaacagatttgcagcaagcaggagactagagaatgtaactggcaaagatgccccatcaactgcctcctgggagattttggaccatggtcagactgtgacccttgtattgaaaaacagtctaaagttagatctgtcttgcgtcccagtcagtttgggggacagccatgcactgagcctctggtagcctttcaaccatgcattccatctaagctctgcaaaattgaagaggctgactgcaagaataaatttcgctgtgacagtggccgctgcattgccagaaagttagaatgcaatggagaaaatgactgtggagacaattcagatgaaagggactgtgggaggacaaaggcagtatgcacacggaagtataatcccatccctagtgtacagttgatgggcaatgggtttcattttctggcaggagagcccagaggagaagtccttgataactctttcactggaggaatatgtaaaactgtcaaaagcagtaggacaagtaatccataccgtgttccggccaatctggaaaatgtcggctttgaggtatgacagcctagcatggtggcaactccaacaccgtcagtgattataagctaaatttctcatgcaaaattagtgatgaatgaagggacagaataaaaaggtggtgaaccatttta

SEQ ID NO: 439151 - DNA, 483 bp, Homo sapiens
aagttatgcgaaggaaaccaagccatctgcatgtttatttcctctgctcataataggaaaatggatgttatggagcttcaagaatcgagttacccaccagaaccctaatggtaaagctatgattttaggcatgctgtcaaatccctgctttcagaccctccttaacttcatattgtgagactgctcggtcaagtgccaggagattgtgattgggagagggtaaggcaaacagcgactgccagaaagaccttttgcaggatgtggaggcgtcctcaggagagttatttcgatttattctgaagcctgagttggagcagatccctttcttagcttatatcttcttcttgtaaaagtgcttttcaacctttctctcccgaacatcttccttctccaaagctgggagtcatgttgcctgcagggactctttccttactgggcccaggagttcgaggtgcagtttggcaacctgtgtcctggctgagg

SEQ ID NO: 439152 - DNA, 1288 bp, Homo sapiens
actcggcacgtcatcgccgcgcgccggcttgccaggagctggagggggaggtaggcggggcggcgcgtgacctaaggcctctctgccgcgcgcgcagagccaaggcactgatgtttgaactggaaacttcaaaacgtttaataagagtcttcaggatgggtttgaactagacaagctagaaatttctttagaacaccagctctagcatgcatctcccacttttggctttcctggagaggagcttgaagaggtggtatctagccagcaccagccctaccagaatgcatcacattcagggcaacacaccagcaggcacattggcccttgttgcactctttcgtgctcaagggcattcatcatgatttcatcagttttcttccccttgcaggtgggtcaagcagagcaatggcacacatcatcaccatggcacacacttgcacagccaaacctatgcacaaggccaagaggcacaggtcggcaactttatcccatagcatagcagtgcagacaaacgtcaaaccccacagtaggacaagattaggtagcagtagcaacaacaacattggcaagacgctcactaccgataccccagcatttccactggacatgagcgggcgcatcagacaggcaacaggggtcccaccaagacatcagccagccagcacacagcaccgataggcaatcacccaggtggcacacaacagaccaataaaccccataggacaattgacaacgccggaccatatgcaggggcaatggcaaacatggccacaaagaatacgcacatcgtggacccaacaccgttcataccccatcccaagacaagacaggagccaacaacgaatcacacagaaccgtactccgaagagatagagacagattaacaatgaaaaaagaaacatatgcaatggactcaggaataacccaaacagcattcacaatagagccacagacaaagacgcagaaaccacaacacagacagagcacgacatgcggacactattaagtacaaacacataaaccatgaacatgatccaacacacacccacaggacatagacaacacaaacacaagaggacagaacagacaaataggagacatacaacgagacttcgacaatgcgaaccgaaagaatgcagcacgcgagtataaactagctgaaacacaatcaaaagagaacacaacaccccagacacacatacaagcaacatgtgagaaccacaatgccaaaaaaaaacagcacaaaaatagcacgacacaacaaagagatagagacaaatcatagcat

SEQ ID NO: 439153 - DNA, 4065 bp, Homo sapiens
gcagatggtctaacggctggatagaggcatatttttagtttgaatttcctgcgcttacagaatggttttatctaatttgtagctactggggttctttattctctggggccacctgaaggctttcaaacacagtaataagccctcctcgggctgggaaacaggaagctgtgttttaaatgccgtgatcactggattaaaggaaacatggctccactctgttctcttgccaggtggaattatttttttctttatgatggttccaaggtaaaggaagaaggcgatccaacaagagctggcatttgttacttttatccttcccagaccctgctagaccaacaggagttgctttgtggacagattgctggagttgtccgctgtgtttctgacatttctgactctcctcctactcttgttcgtctgagaaaactgaagtttgccataaaagttgatggagattacctttgggtgctgggctgtgctgtggagctccctgatgtcagctgcaagcggtttctggatcagctagttggattctttaatttttacaatggacctgtttccctagcttatgagaactgttctcaggaagaactgagcacggagtgggacaccttcatcgagcaaattctgaaaaacaccagtgatctgcataagattttcaattccctctggaacttggaccaaactaaagtggagcccctgttgttgctgaaggcagcccgcattctgcagacctgccagcgctcgcctcacattctcgctggctgcatcctctataaaggactgattgtcagcacccaactcccgccctccctcaccgccaaggtcctgcttcaccgaacagcacctcaggagcagagactccctacgggagaggatgccccgcaggaacatggagcggcattgcccccgaatgtccagattatccctgtttttgtgaccaaagaggaagccattagtctccacgagttcccggtggaacagatgacaaggtctctagcatctccagcaggactccaggatggttcagcccagcaccatccaaagggtgggagcacatctgccctgaaagaaaacgccactggccatgtggaatccatggcctggaccaccccagatcccacatcccctgacgaagcttgtccagatggcaggaaggagaacggatgcttgtctggccatgatctggagagcatcaggcccgcaggactgcacaactctgccaggggtgaggttcttggcctcagctcctccctggggaaggaactagtctttctccaagaagaactcgacttgtctgaaatccacattccagaggctcaggaagtggaaatggcctcaggtcattttgccttcctacatgtgcctgttccagatggcagggctccttactgcaaggcatctctcagcgcctccagcagcctggaacccacgcctcctgaggacacagccatcagcagcttgcgccctccctctgctcctgagatgctgacccagcatggagcccaagagcagctcgaagaccatcctggccatagcagccaagcccccattcccagagcagaccctctccccagaaggacccgcaggcccttgttattgcctcgcttagatccaggacagagaggaaacaagcttcccacgggggaacaaggcctggatgaggatgttgatggggtctgtgaaagccacgcagcccctggtctggaatgcagttcaggctcagcaaactgtcagggtgctggcccctctgcagatggaatcagctccaggctgacaccagcagagtcctgcatggggctcgtgaggatgaatctctacactcactgcgtcaaagggctgatgctgtccctgctggctgaggagccgctgctgggagacagcgcagccatagaggaagtgtaccacagcagcctggcttcactgaatgggctggaagtccacctgaaagagacgctgcccagggatgaggcagcctccacgagcagcacctacaacttcacatattacgaccgcattcagagcttgctgatggcaaacctgccgcaggtggccaccccgcatgatcgccgcttcctccaggccgtcagcctgatgcatagcgaatttgcccagctgcccgcgctttatgaaatgactgtcagaaatgcctccacggctgtgtacgcctgttgcaaccccatccaggagacatatttccagcagctggcacctgcagcacggagctccggcttcccaaaccctcaggatggcgccttcagcctctccggcaaagcaaagcagaagctgctgaagcacggggtgaacttgctctgaactgcacccaggaggtgactgggaaggagaaaaccagcaaaggaagctctgccttttataattgaaaaggcccctctattttatttttcttgaaaacattcccttttttaggaaccaaatgatatttgagtttttgttattccttttgcagattgggatgtgttttgggggcaggggttagttcttcaggtcggcagacccagagcacttgataaagaactgtatttaatcggtagtgttggggccgggacgggcttggctccctctctgccatactgagcctgaggtatttcatatctcctgctgttccatcccagcttgaattggtgccacaagcttccaagttggcattttttctagaacctgatcgtccactagcccagagtgtgtgtgttcaacccccacaccaggtggtggtaggcggtgtgactgcacagcgaggtgccggatctgtgagcaggccgactccactcccacgccgcaggtaggtttctccagtgcgctcttgctgggaggtccggatcgttcctgcagggaagcggcagcacacggagaccacttggttgaattctgttggaactctactcaaatctaggggcgtcttctttggacccacaatgggggcaagccttaataatatggaagggagtttgggctttagagatccctttataaaagctctgggggctgagccctgagaattcagtgacaacaggaccaacctgcgctgcctttgactacaagtgggccgtgcagctggttcctctcgagcgagtgtccctaaataggagtttacaagatgtctgggggtaaaagcactgtgcttttcagtggtggctgcgtgaaagggagcgacactcagctgtgtgttcctgggcttgtgtggtacttagaacctcagttctattacgttatagtcagacatttttttgacagtatgagacagactgcaggatgaaaatatttgtcaaaatcttaactgaatgtttactggaagtacttgagattccatttgagagttgtattgttaataatttcatgtcagtgaactgatatctgatgtttatgatatggtgtctttttcttgaaacaagcttccaagggctagaaataaaatagccaaaaaatgctggagttctgagtaattaaatggcagcatttttttgtgacaaaggtaagggttaagacagtgtgtgtgtgtgtgtgtgtgtgtgtgtgtgtgtgtgtggggcgcgcgcgtaacgtgggcgcatccctcttttccttccctgggttcagtgtggcgtgggtaaggaccgtctgtgtgtagggctgccaggctgcagcctgctgctccagggagcaccagctgcagctgatccaatacaccaagcctgtgtctccctcttctatcacctctctccaggatctctgctgtctcttggatcccatctgcctagatggaagaggatcctatccgaagctaggataaatgttgtcttactcctctgctatgttctcccagaaaaaattgattacaagttctctgctgtggttgctgcagctccaggaagtccccgcaatgtctcacgttgtctttgaccagtggtccccagtaccaggccagagaagacaactttataatgtcatttgtgttgtgaaaattcttccactgacccaaaatggaaccgtacaaagcctatccgtgtatatggaaaagtctcatgcacctggattaactcagaaaaagtaaagtcctgaaacttcact

SEQ ID NO: 439154 - DNA, 3836 bp, Homo sapiens
actcggcacgtcatcgccgcgcgccggcttgccaggagctggagggggaggtaggcggggcggcgcgtgacctaaggcctctctgccgcgcgcgcagagccaaggcactgatgtttgaactggaaacttcaaaacgtttaataagagtcttcaggatgggtttgaactagacaagctagaaatttctttagaacaccagctctagcatgcatctcccacttttggctttcctggagaggagcttgaagaggtggttctgcagacagccacagtgatactcaggaaaccagaggaatggatttgacttttctgctaggattctttgttatagtttctccctgagttgtaagaggcatggaaatatacatgaaactgaagaacctgcaaggaagggaagtggaactttccatgctgagtgaaaactaaccaagtggcagttgtgactgaaaacactgaaacctaccacgtccagattcactggattgggggatagaggaacggtcacagctagggagaaagaagtgataccggaaaagaaaacctaaatgaagagaatgaggatgactgcacagtagatggccacctctacctccacagaggcaaagtcagcctcgtggtggaattatttttttctttatgatggttccaaggtaaaggaagaaggcgatccaacaagagctggcatttgttacttttatccttcccagaccctgctagaccaacaggagttgctttgtggacagattgctggagttgtccgctgtgtttctgacatttctgactctcctcctactcttgttcgtctgagaaaactgaagtttgccataaaagttgatggagattacctttgggtgctgggctgtgctgtggagctccctgatgtcagctgcaagcggtttctggatcagctagttggattctttaatttttacaatggacctgtttccctagcttatgagaactgttctcaggaagaactgagcacggagtgggacaccttcatcgagcaaattctgaaaaacaccagtgatctgcataagattttcaattccctctggaacttggaccaaactaaagtggagcccctgttgttgctgaaggcagcccgcattctgcagacctgccagcgctcgcctcacattctcgctggctgcatcctctataaaggactgattgtcagcacccaactcccgccctccctcaccgccaaggtcctgcttcaccgaacagcacctcaggagcagagactccctacgggagaggatgccccgcaggaacatggagcggcattgcccccgaatgtccagattatccctgtttttgtgaccaaagaggaagccattagtctccacgagttcccggtggaacagatgacaaggtctctagcatctccagcaggactccaggatggttcagcccagcaccatccaaagggtgggagcacatctgccctgaaagaaaacgccactggccatgtggaatccatggcctggaccaccccagatcccacatcccctgacgaagcttgtccagatggcaggaaggagaacggatgcttgtctggccatgatctggagagcatcaggcccgcaggactgcacaactctgccaggggtgaggttcttggcctcagctcctccctggggaaggaactagtctttctccaagaagaactcgacttgtctgaaatccacattccagaggctcaggaagtggaaatggcctcaggtcattttgccttcctacatgtgcctgttccagatggcagggctccttactgcaaggcatctctcagcgcctccagcagcctggaacccacgcctcctgaggacacagccatcagcagcttgcgccctccctctgctcctgagatgctgacccagcatggagcccaagagcagctcgaagaccatcctggccatagcagccaagcccccattcccagagcagaccctctccccagaaggacccgcaggcccttgttattgcctcgcttagatccaggacagagaggaaacaagcttcccacgggggaacaaggcctggatgaggatgttgatggggtctgtgaaagccacgcagcccctggtctggaatgcagttcaggctcagcaaactgtcagggtgctggcccctctgcagatggaatcagctccaggctgacaccagcagagtcctgcatggggctcgtgaggatgaatctctacactcactgcgtcaaagggctgatgctgtccctgctggctgaggagccgctgctgggagacagcgcagccatagaggaagtgtaccacagcagcctggcttcactgaatgggctggaagtccacctgaaagagacgctgcccagggatgaggcagcctccacgagcagcacctacaacttcacatattacgaccgcattcagagcttgctgatggcaaacctgccgcaggtggccaccccgcatgatcgccgcttcctccaggccgtcagcctgatgcatagcgaatttgcccagctgcccgcgctttatgaaatgactgtcagaaatgcctccacggctgtgtacgcctgttgcaaccccatccaggagacatatttccagcagctggcacctgcagcacggagctccggcttcccaaaccctcaggatggcgccttcagcctctccggcaaagcaaagcagaagctgctgaagcacggggtgaacttgctctgaactgcacccaggaggtgactgggaaggagaaaaccagcaaaggaagctctgccttttataattgaaaaggcccctctattttatttttcttgaaaacattcccttttttaggaaccaaatgatatttgagtttttgttattccttttgcagattgggatgtgttttgggggcaggggttagttcttcaggtcggcagacccagagcacttgataaagaactgtatttaatcggtagtgttggggccgggacgggcttggctccctctctgccatactgagcctgaggtatttcatatctcctgctgttccatcccagcttgaattggtgccacaagcttccaagttggcattttttctagaacctgatcgtccactagcccagagtgtgtgtgttcaacccccacaccaggtggtggtaggcggtgtgactgcacagcgaggtgccggatctgtgagcaggccgactccactcccacgccgcaggtaggtttctccagtgcgctcttgctgggaggtccggatcgttcctgcagggaagcggcagcacacggagaccacttggttgaattctgttggaactctactcaaatctaggggcgtcttctttggacccacaatgggggcaagccttaataatatggaagggagtttgggctttagagatccctttataaaagctctgggggctgagccctgagaattcagtgacaacaggaccaacctgcgctgcctttgactacaagtgggccgtgcagctggttcctctcgagcgagtgtccctaaataggagtttacaagatgtctgggggtaaaagcactgtgcttttcagtggtggctgcgtgaaagggagcgacactcagctgtgtgttcctgggcttgtgtggtacttagaacctcagttctattacgttatagtcagacatttttttgacagtatgagacagactgcaggatgaaaatatttgtcaaaatcttaactgaatgtttactggaagtacttgagattccatttgagagttgtattgttaataatttcatgtcagtgaactgatatctgatgtttatgatatggtgtctttttcttgaaacaagcttccaagggctagaaataaaatagccaaaaaatgctgga

SEQ ID NO: 439155 - DNA, 3745 bp, Homo sapiens
actcggcacgtcatcgccgcgcgccggcttgccaggagctggagggggaggtaggcggggcggcgcgtgacctaaggcctctctgccgcgcgcgcagagccaaggcactgatgtttgaactggaaacttcaaaacgtttaataagagtcttcaggatgggtttgaactagacaagctagaaatttctttagaacaccagctctagcatgcatctcccacttttggctttcctggagaggagcttgaagaggtggttctgcagacagccacagtgatactcaggaaaccagaggaatggatttgacttttctgctaggattctttgttatagtttctccctgagttgtaagaggcatggaaatatacatgaaactgaagaacctgcaaggaagggaagtggaactttccatgctgagtgaaaactaaccaagtggcagttgtgactgaaaacactgaaacctaccacgtccagattcactggattgggggatagaggaacggtcacagctagggagaaagaagtgataccggaaaagaaaacctaaatgaagagaatgaggatgactgcacagtagatggccacctctacctccacagaggcaaagtcagcctcgtgaccctgctagaccaacaggagttgctttgtggacagattgctggagttgtccgctgtgtttctgacatttctgactctcctcctactcttgttcgtctgagaaaactgaagtttgccataaaagttgatggagattacctttgggtgctgggctgtgctgtggagctccctgatgtcagctgcaagcggtttctggatcagctagttggattctttaatttttacaatggacctgtttccctagcttatgagaactgttctcaggaagaactgagcacggagtgggacaccttcatcgagcaaattctgaaaaacaccagtgatctgcataagattttcaattccctctggaacttggaccaaactaaagtggagcccctgttgttgctgaaggcagcccgcattctgcagacctgccagcgctcgcctcacattctcgctggctgcatcctctataaaggactgattgtcagcacccaactcccgccctccctcaccgccaaggtcctgcttcaccgaacagcacctcaggagcagagactccctacgggagaggatgccccgcaggaacatggagcggcattgcccccgaatgtccagattatccctgtttttgtgaccaaagaggaagccattagtctccacgagttcccggtggaacagatgacaaggtctctagcatctccagcaggactccaggatggttcagcccagcaccatccaaagggtgggagcacatctgccctgaaagaaaacgccactggccatgtggaatccatggcctggaccaccccagatcccacatcccctgacgaagcttgtccagatggcaggaaggagaacggatgcttgtctggccatgatctggagagcatcaggcccgcaggactgcacaactctgccaggggtgaggttcttggcctcagctcctccctggggaaggaactagtctttctccaagaagaactcgacttgtctgaaatccacattccagaggctcaggaagtggaaatggcctcaggtcattttgccttcctacatgtgcctgttccagatggcagggctccttactgcaaggcatctctcagcgcctccagcagcctggaacccacgcctcctgaggacacagccatcagcagcttgcgccctccctctgctcctgagatgctgacccagcatggagcccaagagcagctcgaagaccatcctggccatagcagccaagcccccattcccagagcagaccctctccccagaaggacccgcaggcccttgttattgcctcgcttagatccaggacagagaggaaacaagcttcccacgggggaacaaggcctggatgaggatgttgatggggtctgtgaaagccacgcagcccctggtctggaatgcagttcaggctcagcaaactgtcagggtgctggcccctctgcagatggaatcagctccaggctgacaccagcagagtcctgcatggggctcgtgaggatgaatctctacactcactgcgtcaaagggctgatgctgtccctgctggctgaggagccgctgctgggagacagcgcagccatagaggaagtgtaccacagcagcctggcttcactgaatgggctggaagtccacctgaaagagacgctgcccagggatgaggcagcctccacgagcagcacctacaacttcacatattacgaccgcattcagagcttgctgatggcaaacctgccgcaggtggccaccccgcatgatcgccgcttcctccaggccgtcagcctgatgcatagcgaatttgcccagctgcccgcgctttatgaaatgactgtcagaaatgcctccacggctgtgtacgcctgttgcaaccccatccaggagacatatttccagcagctggcacctgcagcacggagctccggcttcccaaaccctcaggatggcgccttcagcctctccggcaaagcaaagcagaagctgctgaagcacggggtgaacttgctctgaactgcacccaggaggtgactgggaaggagaaaaccagcaaaggaagctctgccttttataattgaaaaggcccctctattttatttttcttgaaaacattcccttttttaggaaccaaatgatatttgagtttttgttattccttttgcagattgggatgtgttttgggggcaggggttagttcttcaggtcggcagacccagagcacttgataaagaactgtatttaatcggtagtgttggggccgggacgggcttggctccctctctgccatactgagcctgaggtatttcatatctcctgctgttccatcccagcttgaattggtgccacaagcttccaagttggcattttttctagaacctgatcgtccactagcccagagtgtgtgtgttcaacccccacaccaggtggtggtaggcggtgtgactgcacagcgaggtgccggatctgtgagcaggccgactccactcccacgccgcaggtaggtttctccagtgcgctcttgctgggaggtccggatcgttcctgcagggaagcggcagcacacggagaccacttggttgaattctgttggaactctactcaaatctaggggcgtcttctttggacccacaatgggggcaagccttaataatatggaagggagtttgggctttagagatccctttataaaagctctgggggctgagccctgagaattcagtgacaacaggaccaacctgcgctgcctttgactacaagtgggccgtgcagctggttcctctcgagcgagtgtccctaaataggagtttacaagatgtctgggggtaaaagcactgtgcttttcagtggtggctgcgtgaaagggagcgacactcagctgtgtgttcctgggcttgtgtggtacttagaacctcagttctattacgttatagtcagacatttttttgacagtatgagacagactgcaggatgaaaatatttgtcaaaatcttaactgaatgtttactggaagtacttgagattccatttgagagttgtattgttaataatttcatgtcagtgaactgatatctgatgtttatgatatggtgtctttttcttgaaacaagcttccaagggctagaaataaaatagccaaaaaatgctgga

SEQ ID NO: 439156 - DNA, 3559 bp, Homo sapiens
gcagatggtctaacggctggatagaggcatatttttagtttgaatttcctgcgcttacagaatggttttatctaatttgtagctactggggttctttattctctggggccacctgaaggctttcaaacacagtaataagccctcctcgggctgggaaacaggaagctgtgttttaaatgccgtgatcactggattaaaggaaacatggctccactctgttctcttgccaggtggaattatttttttctttatgatggttccaaggtaaaggaagaaggcgatccaacaagagctggcatttgttacttttatccttcccagaccctgctagaccaacaggagttgctttgtggacagattgctggagttgtccgctgtgtttctgacatttctgactctcctcctactcttgttcgtctgagaaaactgaagtttgccataaaagttgatggagattacctttgggtgctgggctgtgctgtggagctccctgatgtcagctgcaagcggtttctggatcagctagttggattctttaatttttacaatggacctgtttccctagcttatgagaactgttctcaggaagaactgagcacggagtgggacaccttcatcgagcaaattctgaaaaacaccagtgatctgcataagattttcaattccctctggaacttggaccaaactaaagctttgagctacaccctgtccagctgttctgtacaaccctttccccttttctcccttcctgattgtgagcatgctgatgggtgggcatgatgcctcttgccctgcacaggtggagcccctgttgttgctgaaggcagcccgcattctgcagacctgccagcgctcgcctcacattctcgctggctgcatcctctataaaggactgattgtcagcacccaactcccgccctccctcaccgccaaggtcctgcttcaccgaacagcacctcaggagcagagactccctacgggagaggatgccccgcaggaacatggagcggcattgcccccgaatgtccagattatccctgtttttgtgaccaaagaggaagccattagtctccacgagttcccggtggaacagatgacaaggtctctagcatctccagcaggactccaggatggttcagcccagcaccatccaaagggtgggagcacatctgccctgaaagaaaacgccactggccatgtggaatccatggcctggaccaccccagatcccacatcccctgacgaagcttgtccagatggcaggaaggagaacggatgcttgtctggccatgatctggagagcatcaggcccgcaggactgcacaactctgccaggggtgaggttcttggcctcagctcctccctggggaaggaactagtctttctccaagaagaactcgacttgtctgaaatccacattccagaggctcaggaagtggaaatggcctcaggtcattttgccttcctacatgtgcctgttccagatggcagggctccttactgcaaggcatctctcagcgcctccagcagcctggaacccacgcctcctgaggacacagccatcagcagcttgcgccctccctctgctcctgagatgctgacccagcatggagcccaagagcagctcgaagaccatcctggccatagcagccaagcccccattcccagagcagaccctctccccagaaggacccgcaggcccttgttattgcctcgcttagatccaggacagagaggaaacaagcttcccacgggggaacaaggcctggatgaggatgttgatggggtctgtgaaagccacgcagcccctggtctggaatgcagttcaggctcagcaaactgtcagggtgctggcccctctgcagatggaatcagctccaggctgacaccagcagagtcctgcatggggctcgtgaggatgaatctctacactcactgcgtcaaagggctgatgctgtccctgctggctgaggagccgctgctgggagacagcgcagccatagaggaagtgtaccacagcagcctggcttcactgaatgggctggaagtccacctgaaagagacgctgcccagggatgaggcagcctccacgagcagcacctacaacttcacatattacgaccgcattcagagcttgctgatggcaaacctgccgcaggtggccaccccgcatgatcgccgcttcctccaggccgtcagcctgatgcatagcgaatttgcccagctgcccgcgctttatgaaatgactgtcagaaatgcctccacggctgtgtacgcctgttgcaaccccatccaggagacatatttccagcagctggcacctgcagcacggagctccggcttcccaaaccctcaggatggcgccttcagcctctccggcaaagcaaagcagaagctgctgaagcacggggtgaacttgctctgaactgcacccaggaggtgactgggaaggagaaaaccagcaaaggaagctctgccttttataattgaaaaggcccctctattttatttttcttgaaaacattcccttttttaggaaccaaatgatatttgagtttttgttattccttttgcagattgggatgtgttttgggggcaggggttagttcttcaggtcggcagacccagagcacttgataaagaactgtatttaatcggtagtgttggggccgggacgggcttggctccctctctgccatactgagcctgaggtatttcatatctcctgctgttccatcccagcttgaattggtgccacaagcttccaagttggcattttttctagaacctgatcgtccactagcccagagtgtgtgtgttcaacccccacaccaggtggtggtaggcggtgtgactgcacagcgaggtgccggatctgtgagcaggccgactccactcccacgccgcaggtaggtttctccagtgcgctcttgctgggaggtccggatcgttcctgcagggaagcggcagcacacggagaccacttggttgaattctgttggaactctactcaaatctaggggcgtcttctttggacccacaatgggggcaagccttaataatatggaagggagtttgggctttagagatccctttataaaagctctgggggctgagccctgagaattcagtgacaacaggaccaacctgcgctgcctttgactacaagtgggccgtgcagctggttcctctcgagcgagtgtccctaaataggagtttacaagatgtctgggggtaaaagcactgtgcttttcagtggtggctgcgtgaaagggagcgacactcagctgtgtgttcctgggcttgtgtggtacttagaacctcagttctattacgttatagtcagacatttttttgacagtatgagacagactgcaggatgaaaatatttgtcaaaatcttaactgaatgtttactggaagtacttgagattccatttgagagttgtattgttaataatttcatgtcagtgaactgatatctgatgtttatgatatggtgtctttttcttgaaacaagcttccaagggctagaaataaaatagccaaaaaatgctgga

SEQ ID NO: 439157 - DNA, 2996 bp, Homo sapiens
agctatacaggagacagctattaccaggagacatgtatagcaggaagacatgctgtatcaggaagataggatttatccaagtgtaaatacgatgtgacctgtatccctagtcttatgagaactgttctcaggaagaactgagcacggagtgggacaccttcatcgagcaaattctgaaaaacaccagtgatctgcataagattttcaattccctctggaacttggaccaaactaaagtggagcccctgttgttgctgaaggcagcccgcattctgcagacctgccagcgctcgcctcacattctcgctggctgcatcctctataaaggactgattgtcagcacccaactcccgccctccctcaccgccaaggtcctgcttcaccgaacagcacctcaggagcagagactccctacgggagaggatgccccgcaggaacatggagcggcattgcccccgaatgtccagattatccctgtttttgtgaccaaagaggaagccattagtctccacgagttcccggtggaacagatgacaaggtctctagcatctccagcaggactccaggatggttcagcccagcaccatccaaagggtgggagcacatctgccctgaaagaaaacgccactggccatgtggaatccatggcctggaccaccccagatcccacatcccctgacgaagcttgtccagatggcaggaaggagaacggatgcttgtctggccatgatctggagagcatcaggcccgcaggactgcacaactctgccaggggtgaggttcttggcctcagctcctccctggggaaggaactagtctttctccaagaagaactcgacttgtctgaaatccacattccagaggctcaggaagtggaaatggcctcaggtcattttgccttcctacatgtgcctgttccagatggcagggctccttactgcaaggcatctctcagcgcctccagcagcctggaacccacgcctcctgaggacacagccatcagcagcttgcgccctccctctgctcctgagatgctgacccagcatggagcccaagagcagctcgaagaccatcctggccatagcagccaagcccccattcccagagcagaccctctccccagaaggacccgcaggcccttgttattgcctcgcttagatccaggacagagaggaaacaagcttcccacgggggaacaaggcctggatgaggatgttgatggggtctgtgaaagccacgcagcccctggtctggaatgcagttcaggctcagcaaactgtcagggtgctggcccctctgcagatggaatcagctccaggctgacaccagcagagtcctgcatggggctcgtgaggatgaatctctacactcactgcgtcaaagggctgatgctgtccctgctggctgaggagccgctgctgggagacagcgcagccatagaggaagtgtaccacagcagcctggcttcactgaatgggctggaagtccacctgaaagagacgctgcccagggatgaggcagcctccacgagcagcacctacaacttcacatattacgaccgcattcagagcttgctgatggcaaacctgccgcaggtggccaccccgcatgatcgccgcttcctccaggccgtcagcctgatgcatagcgaatttgcccagctgcccgcgctttatgaaatgactgtcagaaatgcctccacggctgtgtacgcctgttgcaaccccatccaggagacatatttccagcagctggcacctgcagcacggagctccggcttcccaaaccctcaggatggcgccttcagcctctccggcaaagcaaagcagaagctgctgaagcacggggtgaacttgctctgaactgcacccaggaggtgactgggaaggagaaaaccagcaaaggaagctctgccttttataattgaaaaggcccctctattttatttttcttgaaaacattcccttttttaggaaccaaatgatatttgagtttttgttattccttttgcagattgggatgtgttttgggggcaggggttagttcttcaggtcggcagacccagagcacttgataaagaactgtatttaatcggtagtgttggggccgggacgggcttggctccctctctgccatactgagcctgaggtatttcatatctcctgctgttccatcccagcttgaattggtgccacaagcttccaagttggcattttttctagaacctgatcgtccactagcccagagtgtgtgtgttcaacccccacaccaggtggtggtaggcggtgtgactgcacagcgaggtgccggatctgtgagcaggccgactccactcccacgccgcaggtaggtttctccagtgcgctcttgctgggaggtccggatcgttcctgcagggaagcggcagcacacggagaccacttggttgaattctgttggaactctactcaaatctaggggcgtcttctttggacccacaatgggggcaagccttaataatatggaagggagtttgggctttagagatccctttataaaagctctgggggctgagccctgagaattcagtgacaacaggaccaacctgcgctgcctttgactacaagtgggccgtgcagctggttcctctcgagcgagtgtccctaaataggagtttacaagatgtctgggggtaaaagcactgtgcttttcagtggtggctgcgtgaaagggagcgacactcagctgtgtgttcctgggcttgtgtggtacttagaacctcagttctattacgttatagtcagacatttttttgacagtatgagacagactgcaggatgaaaatatttgtcaaaatcttaactgaatgtttactggaagtacttgagattccatttgagagttgtattgttaataatttcatgtcagtgaactgatatctgatgtttatgatatggtgtctttttcttgaaacaagcttccaagggctagaaataaaatagccaaaaaatgctgga

SEQ ID NO: 439158 - DNA, 2398 bp, Homo sapiens
ctcatagtctgatctcttgagtatccccggtaacccggctatctccatgaccatgtacaccccagatcccacatcccctgacgaagcttgtccagatggcaggaaggagaacggatgcttgtctggccatgatctggagagcatcaggcccgcaggactgcacaactctgccaggggtgaggttcttggcctcagctcctccctggggaaggaactagtctttctccaagaagaactcgacttgtctgaaatccacattccagaggctcaggaagtggaaatggcctcaggtcattttgccttcctacatgtgcctgttccagatggcagggctccttactgcaaggcatctctcagcgcctccagcagcctggaacccacgcctcctgaggacacagccatcagcagcttgcgccctccctctgctcctgagatgctgacccagcatggagcccaagagcagctcgaagaccatcctggccatagcagccaagcccccattcccagagcagaccctctccccagaaggacccgcaggcccttgttattgcctcgcttagatccaggacagagaggaaacaagcttcccacgggggaacaaggcctggatgaggatgttgatggggtctgtgaaagccacgcagcccctggtctggaatgcagttcaggctcagcaaactgtcagggtgctggcccctctgcagatggaatcagctccaggctgacaccagcagagtcctgcatggggctcgtgaggatgaatctctacactcactgcgtcaaagggctgatgctgtccctgctggctgaggagccgctgctgggagacagcgcagccatagaggaagtgtaccacagcagcctggcttcactgaatgggctggaagtccacctgaaagagacgctgcccagggatgaggcagcctccacgagcagcacctacaacttcacatattacgaccgcattcagagcttgctgatggcaaacctgccgcaggtggccaccccgcatgatcgccgcttcctccaggccgtcagcctgatgcatagcgaatttgcccagctgcccgcgctttatgaaatgactgtcagaaatgcctccacggctgtgtacgcctgttgcaaccccatccaggagacatatttccagcagctggcacctgcagcacggagctccggcttcccaaaccctcaggatggcgccttcagcctctccggcaaagcaaagcagaagctgctgaagcacggggtgaacttgctctgaactgcacccaggaggtgactgggaaggagaaaaccagcaaaggaagctctgccttttataattgaaaaggcccctctattttatttttcttgaaaacattcccttttttaggaaccaaatgatatttgagtttttgttattccttttgcagattgggatgtgttttgggggcaggggttagttcttcaggtcggcagacccagagcacttgataaagaactgtatttaatcggtagtgttggggccgggacgggcttggctccctctctgccatactgagcctgaggtatttcatatctcctgctgttccatcccagcttgaattggtgccacaagcttccaagttggcattttttctagaacctgatcgtccactagcccagagtgtgtgtgttcaacccccacaccaggtggtggtaggcggtgtgactgcacagcgaggtgccggatctgtgagcaggccgactccactcccacgccgcaggtaggtttctccagtgcgctcttgctgggaggtccggatcgttcctgcagggaagcggcagcacacggagaccacttggttgaattctgttggaactctactcaaatctaggggcgtcttctttggacccacaatgggggcaagccttaataatatggaagggagtttgggctttagagatccctttataaaagctctgggggctgagccctgagaattcagtgacaacaggaccaacctgcgctgcctttgactacaagtgggccgtgcagctggttcctctcgagcgagtgtccctaaataggagtttacaagatgtctgggggtaaaagcactgtgcttttcagtggtggctgcgtgaaagggagcgacactcagctgtgtgttcctgggcttgtgtggtacttagaacctcagttctattacgttatagtcagacatttttttgacagtatgagacagactgcaggatgaaaatatttgtcaaaatcttaactgaatgtttactggaagtacttgagattccatttgagagttgtattgttaataatttcatgtcagtgaactgatatctgatgtttatgatatggtgtctttttcttgaaacaagcttccaagggctagaaataaaatagccaaaaaatgctgga

SEQ ID NO: 439159 - DNA, 3621 bp, Homo sapiens
actcggcacgtcatcgccgcgcgccggcttgccaggagctggagggggaggtaggcggggcggcgcgtgacctaaggcctctctgccgcgcgcgcaggtacggggcagaagtcgcaggtacccagctgctgcccacatttctggtccagagtcccgaaccccgagcactgggatgcctggctactccgagccaaggcactgatgtttgaactggaaacttcaaaacgtttaataagagtcttcaggatgggtttgaactagacaagctagaaatttctttagaacaccagctctagcatgcatctcccacttttggctttcctggagaggagcttgaagaggtggttctgcagacagccacagtgatactcaggaaaccagaggaatggatttgacttttctgctaggattctttgttatagtttctccctgagttgtaagaggcatggaaatatacatgaaactgaagaacctgcaaggaagggaagtggaactttccatgctgagtgaaaactaaccaagtggcagttgtgactgaaaacactgaaacctaccacgtccagattcactggattgggggatagaggaacggtcacagctagggagaaagaagtgataccggaaaagaaaacctaaatgaagagaatgaggatgactgcacagtagatggccacctctacctccacagaggcaaagtcagcctcgtggtggaattatttttttctttatgatggttccaaggtaaaggaagaaggcgatccaacaagagctggcatttgttacttttatccttcccagaccctgctagaccaacaggagttgctttgtggacagattgctggagttgtccgctgtgtttctgacatttctgactctcctcctactcttgttcgtctgagaaaactgaagtttgccataaaagttgatggagattacctttgggtgctgggctgtgctgtggagctccctgatgtcagctgcaagcggtttctggatcagctagttggattctttaatttttacaatggacctgtttccctagcttatgagaactgttctcaggaagaactgagcacggagtgggacaccttcatcgagcaaattctgaaaaacaccagtgatctgcataagattttcaattccctctggaacttggaccaaactaaagtggagcccctgttgttgctgaaggcagcccgcattctgcagacctgccagcgctcgcctcacattctcgctggctgcatcctctataaaggactgattgtcagcacccaactcccgccctccctcaccgccaaggtcctgcttcaccgaacagcacctcaggagcagagactccctacgggagaggatgccccgcaggaacatggagcggcattgcccccgaatgtccagattatccctgtttttgtgaccaaagaggaagccattagtctccacgagttcccggtggaacagatgacaaggtctctagcatctccagcaggactccaggatggttcagcccagcaccatccaaagggtgggagcacatctgccctgaaagaaaacgccactggccatgtggaatccatggcctggaccaccccagatcccacatcccctgacgaagcttgtccagatggcaggaaggagaacggatgcttgtctggccatgatctggagagcatcaggcccgcaggactgcacaactctgccaggggtgaggttcttggcctcagctcctccctggggaaggaactagtctttctccaagaagaactcgacttgtctgaaatccacattccagaggctcaggaagtggaaatggcctcaggtcattttgccttcctacatgtgcctgttccagatggcagggctccttactgcaaggcatctctcagcgcctccagcagcctggaacccacgcctcctgaggacacagccatcagcagcttgcgccctccctctgctcctgagatgctgacccagcatggagcccaagagcagctcgaagaccatcctggccatagcagccaagcccccattcccagagcagaccctctccccagaaggacccgcaggcccttgttattgcctcgcttagatccaggacagagaggaaacaagcttcccacgggggaacaaggcctggatgaggatgttgatggggtctgtgaaagccacgcagcccctggtctggaatgcagttcaggctcagcaaactgtcagggtgctggcccctctgcagatggaatcagctccaggctgacaccagcagagtcctgcatggggctcgtgaggatgaatctctacactcactgcgtcaaagggctgatgctgtccctgctggctgaggagccgctgctgggagacagcgcagccatagaggaagtgtaccacagcagcctggcttcactgaatgggctggaagtccacctgaaagagacgctgcccagggatgaggcagcctccacgagcagcacctacaacttcacatattacgaccgcattcagagcttgctgatggcaaacctgccgcaggtggccaccccgcatgatcgccgcttcctccaggccgtcagcctgatgcatagcgaatttgcccagctgcccgcgctttatgaaatgactgtcagaaatgcctccacggctgtgtacgcctgttgcaaccccatccaggagacatatttccagcagctggcacctgcagcacggagctccggcttcccaaaccctcaggatggcgccttcagcctctccggcaaagcaaagcagaagctgctgaagcacggggtgaacttgctctgaactgcacccaggaggtgactgggaaggagaaaaccagcaaaggaagctctgccttttataattgaaaaggcccctctattttatttttcttgaaaacattcccttttttaggaaccaaatgatatttgagtttttgttattccttttgcagattgggatgtgttttgggggcaggggttagttcttcaggtcggcagacccagagcacttgataaagaactgtatttaatcggtagtgttggggccgggacgggcttggctccctctctgccatactgagcctgaggtatttcatatctcctgctgttccatcccagcttgaattggtgccacaagcttccaagttggcattttttctagaacctgatcgtccactagcccagagtgtgtgtgttcaacccccacaccaggtggtggtaggcggtgtgactgcacagcgaggtgccggatctgtgagcaggccgactccactcccacgccgcaggatctctgctgtctcttggatcccatctgcctagatggaagaggatcctatccgaagctaggataaatgttgtcttactcctctgctatgttctcccagaaaaaattgattacaagttctctgctgtggttgctgcagctccaggaagtccccgcaatgtctcacgttgtctttgaccagtggtccccagtaccaggccagagaagacaactttataatgtcatttgtgttgtgaaaattcttccactgacccaaaatggaaccgtacaaagcctatccgtgtatatggaaaagtctcatgcacctggattaactcagaaaaagtaaagtcctgaaacttcact

SEQ ID NO: 439160 - DNA, 1578 bp, Homo sapiens
actcggcacgtcatcgccgcgcgccggcttgccaggagctggagggggaggtaggcggggcggcgcgtgacctaaggcctctctgccgcgcgcgcaggtacggggcagaagtcgcaggtacccagctgctgcccacatttctggtccagagtcccgaaccccgagcactgggatgcctggctactccgagccaaggcactgatgtttgaactggaaacttcaaaacgtttaataagagtcttcaggatgggtttgaactagacaagctagaaatttctttagaacaccagctctagcatgcatctcccacttttggctttcctggagaggagcttgaagaggtggttctgcagacagccacagtgatactcaggaaaccagaggaatggatttgacttttctgctaggattctttgttatagtttctccctgagttgtaagaggcatggaaatatacatgaaactgaagaacctgcaaggaagggaagtggaactttccatgctgagtgaaaactaaccaagtggcagttgtgactgaaaacactgaaacctaccacgtccagattcactggattgggggatagaggaacggtcacagctagggagaaagaagtgataccggaaaagaaaacctaaatgaagagaatgaggatgactgcacagtagatggccacctctacctccacagaggcaaagtcagcctcgtggtggaattatttttttctttatgatggttccaaggtaaaggaagaaggcgatccaacaagagctggcatttgttacttttatccttcccagaccctgctagaccaacaggagttgctttgtggacagattgctggagttgtccgctgtgtttctgacatttctgactctcctcctactcttgttcgtctgagaaaactgaagtttgccataaaagttgatggagattacctttgggtaagttgaatggcagaatcagtgctgaagtgttgcaatgataagtttaggaagttatgttgtttctgagtcttgaatttagaattatctgcccccaccaacctcatccatgtactgtgtttagtaatcaccctcgcttcctgtggtactctctgcaggttttcatcatcaagtgctttccaaaacatttctaacatattctgcattgcacacagctggtttctcctttcctttcaaagacttaggccaacttgtggaaattctgtttactctgtgttgtaaattgagtttttatcatcatcttttcttctccatgctctctacacttactgggtaagtgacccagaaaaaaatgatagatatatgttaggttttagagaacccattaaaaaaaaaaaaagaatattgcttgagtccaggagttcgatatcagcctgggcaacatagtaagacccccgtctctataaaaaatttaaaaattaaccgggtgtggtggctcatgtctgtggtcttagctactggggaggctgaggggaggattgcttgagcttaggagtttcaggctgcagtgagccatgattgccactgcacgctagcctaggcaacagagtgacaccctgtcttaaaaaaaaaaaa

SEQ ID NO: 439161 - DNA, 4087 bp, Homo sapiens
  misc_feature (2213)..(2213): n is a, c, g, or t
  misc_feature (2293)..(2293): n is a, c, g, or t
  misc_feature (2759)..(2759): n is a, c, g, or t
  misc_feature (2820)..(2820): n is a, c, g, or t
  misc_feature (3080)..(3080): n is a, c, g, or t
actcggcacgtcatcgccgcgcgccggcttgccaggagctggagggggaggtaggcggggcggcgcgtgacctaaggcctctctgccgcgcgcgcaggtacggggcagaagtcgcaggtacccagctgctgcccacatttctggtccagagtcccgaaccccgagcactgggatgcctggctactccgagccaaggcactgatgtttgaactggaaacttcaaaacgtttaataagagtcttcaggatgggtttgaactagacaagctagaaatttctttagaacaccagctctagcatgcatctcccacttttggctttcctggagaggagcttgaagaggtggttctgcagacagccacagtgatactcaggaaaccagaggaatggatttgacttttctgctaggattctttgttatagtttctccctgagttgtaagaggcatggaaatatacatgaaactgaagaacctgcaaggaagggaagtggaactttccatgctgagtgaaaactaaccaagtggcagttgtgactgaaaacactgaaacctaccacgtccagattcactggattgggggatagaggaacggtcacagctagggagaaagaagtgataccggaaaagaaaacctaaatgaagagaatgaggatgactgcacagtagatggccacctctacctccacagaggcaaagtcagcctcgtggtggaattatttttttctttatgatggttccaaggtaaaggaagaaggcgatccaacaagagctggcatttgttacttttatccttcccagaccctgctagaccaacaggagttgctttgtggacagattgctggagttgtccgctgtgtttctgacatttctgactctcctcctactcttgttcgtctgagaaaactgaagtttgccataaaagttgatggagattacctttgggtgctgggctgtgctgtggagctccctgatgtcagctgcaagcggtttctggatcagctagttggattctttaatttttacaatggacctgtttccctagcttatgagaactgttctcaggaagaactgagcacggagtgggacaccttcatcgagcaaattctgaaaaacaccagtgatctgcataagattttcaattccctctggaacttggaccaaactaaagtggagcccctgttgttgctgaaggcagcccgcattctgcagacctgccagcgctcgcctcacattctcgctggctgcatcctctataaaggactgattgtcagcacccaactcccgccctccctcaccgccaaggtcctgcttcaccgaacagcacctcaggagcaggtattgtaaagtccacccacctggctggacagcatcccccagagcactggtcactgagcctgaggctggagggatcaggagcagaggccgtggagcagttgtttcacttggtcttgtcaggaccccaagtcctccaatgtcattctcctcagtagtgaagccattggtgaggctgaaagaaaatgttttcttccacgagctaggcctggatagttgttttttcttcaaaccaaggaaatcttggttgaattcgacttcccataagaatttgatgtctctttatgtcaaagagatgttagacttttcagagacagactgtaaaggatgtgtctttagaaagatttagggggttgggcacggtggttcacacctgtaatcccagcactttgggtggctgaggtgggcagatcacttgaggtgaggagttcaagaccagcctggccaacatgatgaaacccatctctatttaaaatacaaaaattagctgggtgtggtggtgcacacctgtaaatcccagctacttgggaggctgaggcaggagaatcgcttgaacctggcaggcagaggttgaggtgagctgagatcgcgccactgcactccagcctgggtagcaagagtgagactctgtctcaaaaaataaaaataaaaataaaaaaataaggaaaacaaactcttctaaaatacttccattttatatttatttaattgtttttatattgaaaaaaaagccatgcatgctcattgagaataaaattgcccatctttgaactgtacagggatagccactgccagcatctggcatatctccttccagtcctttttttgttttgtgtatgaagctgtggtttccagcgtatcatgaggctgtctttttacangtattagtgaacaggcatgtaaaatgctggtagggctctattcagcctcctcagccactgtggctatgggtgtcaattcnagtagcctttctgggaaacactttgataatgagaacgttaaggatgccctttatttttttcctaataatttgacttctaggaatatatcttaaggaaataatgtaactgctgaaaaaaatttatactcaaaacttgatcacaacaagctttatgaaagtgaaaaatcagacaaaacttgaatgcttaaagtaggaggtggcaaattatggcctgtgggccacctgcctacaaatgaagttttatttggctgcttttgagctataatagcagaaccaagtaggtgggacagagaccatatgccctgcaaagccaaaaatatttactgtcttgtcttttgcacagaaagtttactaattactggtctaaggtaggtaaatgattaatttactcatatcacttaaaccttcataaaattttaatcagccgtttaaaatggccaaagatgttttagtggcaggaaatgcntgttactgttttaagcagaaatatgaaattttatatagtgtggcctcaaaagtataaaaantgcataggcttaaggaaaaaatacccaatattaatagtactagcttggggatgagggattgtatgtgattttttttttcaacgctttgtctagagtaaattgaggttaggcttagtaatctaaaacatagttttttaaaaatcaccaaaaaaggaagaacaccatatcattctaagattgaaagtcattttggctagaagagcagttcttgtttggtttggttttgttttggtgggttcttttggaaccctcagattganacgagagatgttttcatttttgagaaaatcatcaggttttaggccctgattgtgaaccagaacaaacgagagattgggtatagcattttgtttaagtcaaatcctttatcgtgagagtcacagtattttgacatttttattataatggaatttatgtgaattctacatcagggctgtggcagatgtgactgtattctagaatatgagttccccaaaggtgtaaaagagaacaggaatcctcaattttattcccagaagggagagagactgagaaaatcagaacgtagagtgtgatgtgagtttgggtggagctgctgccttgcagcctgtgtgggcccaggttcttgcttcatcccagccatagtgggagccagcagcttgggggagcttctgttccatctgcttggctcttagcatgtggttgggacaagctttctgggcctggctaagttttatgaacagatggcacagcaaattcctgatggttaggtcaagaggagaatgtggtgcccagcgccaacttctgtgtgtgtttgttttcagagactccctacgggagaggatgccccgcaggaacatggaaaatggatgttatggagcttcaagaatcgagttacccaccagaaccctaatggtaaagctatgattttaggcatgctgtcaaatccctgctttcagaccctccttaacttcatattgtgagactgctcggtcaagtgccaggagattgtgattgggagagggtaaggcaaacagcgactgccagaaagaccttttgcaggatgtggaggcgtcctcaggagagttatttcgatttattctgaagcctgagttggagcagatccctttcttagcttatatcttcttcttgtaaaagtgcttttcaacctttctctcccgaacatcttccttctccaaagctgggagtcatgttgcctgcagggactctttccttactgggcccaggagttcgaggtgcagtttggcaacctgtgtcctggctgagg

SEQ ID NO: 439162 - DNA, 450 bp, Homo sapiens
catttagtggtgtcagcagttctgagtatagagaggtagaatagtcccaagccatggcacagctttcactgtgtgacacattctccttttccaggctttgagctacaccctgtccagctgttctgtacaaccctttccccttttctcccttcctgattgtgagcatgctgatgggtgggcatgatgcctcttgccctgcacaggtggagcccctgttgttgctgaaggcagcccgcattctgcagacctgccagcgctcgcctcacattctcgctggctgcatcctctataaaggactgtgagtaactccagacccctttcttccagccccattcccttgctgcacaactgaccatcagccacctccagatcacagtggggagcccagtctctggccagttccaagtgggctggttcggcaaatatcaggtagtttagatttgactcagt

SEQ ID NO: 439163 - DNA, 6144 bp, Homo sapiens
  misc_feature (2142)..(2142): n is a, c, g, or t
  misc_feature (2222)..(2222): n is a, c, g, or t
  misc_feature (2688)..(2688): n is a, c, g, or t
  misc_feature (2749)..(2749): n is a, c, g, or t
  misc_feature (3009)..(3009): n is a, c, g, or t
actcggcacgtcatcgccgcgcgccggcttgccaggagctggagggggaggtaggcggggcggcgcgtgacctaaggcctctctgccgcgcgcgcaggtacggggcagaagtcgcagagccaaggcactgatgtttgaactggaaacttcaaaacgtttaataagagtcttcaggatgggtttgaactagacaagctagaaatttctttagaacaccagctctagcatgcatctcccacttttggctttcctggagaggagcttgaagaggtggttctgcagacagccacagtgatactcaggaaaccagaggaatggatttgacttttctgctaggattctttgttatagtttctccctgagttgtaagaggcatggaaatatacatgaaactgaagaacctgcaaggaagggaagtggaactttccatgctgagtgaaaactaaccaagtggcagttgtgactgaaaacactgaaacctaccacgtccagattcactggattgggggatagaggaacggtcacagctagggagaaagaagtgataccggaaaagaaaacctaaatgaagagaatgaggatgactgcacagtagatggccacctctacctccacagaggcaaagtcagcctcgtggtggaattatttttttctttatgatggttccaaggtaaaggaagaaggcgatccaacaagagctggcatttgttacttttatccttcccagaccctgctagaccaacaggagttgctttgtggacagattgctggagttgtccgctgtgtttctgacatttctgactctcctcctactcttgttcgtctgagaaaactgaagtttgccataaaagttgatggagattacctttgggtgctgggctgtgctgtggagctccctgatgtcagctgcaagcggtttctggatcagctagttggattctttaatttttacaatggacctgtttccctagcttatgagaactgttctcaggaagaactgagcacggagtgggacaccttcatcgagcaaattctgaaaaacaccagtgatctgcataagattttcaattccctctggaacttggaccaaactaaagtggagcccctgttgttgctgaaggcagcccgcattctgcagacctgccagcgctcgcctcacattctcgctggctgcatcctctataaaggactgattgtcagcacccaactcccgccctccctcaccgccaaggtcctgcttcaccgaacagcacctcaggagcaggtattgtaaagtccacccacctggctggacagcatcccccagagcactggtcactgagcctgaggctggagggatcaggagcagaggccgtggagcagttgtttcacttggtcttgtcaggaccccaagtcctccaatgtcattctcctcagtagtgaagccattggtgaggctgaaagaaaatgttttcttccacgagctaggcctggatagttgttttttcttcaaaccaaggaaatcttggttgaattcgacttcccataagaatttgatgtctctttatgtcaaagagatgttagacttttcagagacagactgtaaaggatgtgtctttagaaagatttagggggttgggcacggtggttcacacctgtaatcccagcactttgggtggctgaggtgggcagatcacttgaggtgaggagttcaagaccagcctggccaacatgatgaaacccatctctatttaaaatacaaaaattagctgggtgtggtggtgcacacctgtaaatcccagctacttgggaggctgaggcaggagaatcgcttgaacctggcaggcagaggttgaggtgagctgagatcgcgccactgcactccagcctgggtagcaagagtgagactctgtctcaaaaaataaaaataaaaataaaaaaataaggaaaacaaactcttctaaaatacttccattttatatttatttaattgtttttatattgaaaaaaaagccatgcatgctcattgagaataaaattgcccatctttgaactgtacagggatagccactgccagcatctggcatatctccttccagtcctttttttgttttgtgtatgaagctgtggtttccagcgtatcatgaggctgtctttttacangtattagtgaacaggcatgtaaaatgctggtagggctctattcagcctcctcagccactgtggctatgggtgtcaattcnagtagcctttctgggaaacactttgataatgagaacgttaaggatgccctttatttttttcctaataatttgacttctaggaatatatcttaaggaaataatgtaactgctgaaaaaaatttatactcaaaacttgatcacaacaagctttatgaaagtgaaaaatcagacaaaacttgaatgcttaaagtaggaggtggcaaattatggcctgtgggccacctgcctacaaatgaagttttatttggctgcttttgagctataatagcagaaccaagtaggtgggacagagaccatatgccctgcaaagccaaaaatatttactgtcttgtcttttgcacagaaagtttactaattactggtctaaggtaggtaaatgattaatttactcatatcacttaaaccttcataaaattttaatcagccgtttaaaatggccaaagatgttttagtggcaggaaatgcntgttactgttttaagcagaaatatgaaattttatatagtgtggcctcaaaagtataaaaantgcataggcttaaggaaaaaatacccaatattaatagtactagcttggggatgagggattgtatgtgattttttttttcaacgctttgtctagagtaaattgaggttaggcttagtaatctaaaacatagttttttaaaaatcaccaaaaaaggaagaacaccatatcattctaagattgaaagtcattttggctagaagagcagttcttgtttggtttggttttgttttggtgggttcttttggaaccctcagattganacgagagatgttttcatttttgagaaaatcatcaggttttaggccctgattgtgaaccagaacaaacgagagattgggtatagcattttgtttaagtcaaatcctttatcgtgagagtcacagtattttgacatttttattataatggaatttatgtgaattctacatcagggctgtggcagatgtgactgtattctagaatatgagttccccaaaggtgtaaaagagaacaggaatcctcaattttattcccagaagggagagagactgagaaaatcagaacgtagagtgtgatgtgagtttgggtggagctgctgccttgcagcctgtgtgggcccaggttcttgcttcatcccagccatagtgggagccagcagcttgggggagcttctgttccatctgcttggctcttagcatgtggttgggacaagctttctgggcctggctaagttttatgaacagatggcacagcaaattcctgatggttaggtcaagaggagaatgtggtgcccagcgccaacttctgtgtgtgtttgttttcagagactccctacgggagaggatgccccgcaggaacatggagcggcattgcccccgaatgtccagattatccctgtttttgtgaccaaagaggaagccattagtctccacgagttcccggtggaacagatgacaaggtctctagcatctccagcaggactccaggatggttcagcccagcaccatccaaagggtgggagcacatctgccctgaaagaaaacgccactggccatgtggaatccatggcctggaccaccccagatcccacatcccctgacgaagcttgtccagatggcaggaaggagaacggatgcttgtctggccatgatctggagagcatcaggcccgcaggactgcacaactctgccaggggtgaggttcttggcctcagctcctccctggggaaggaactagtctttctccaagaagaactcgacttgtctgaaatccacattccagaggctcaggaagtggaaatggcctcaggtcattttgccttcctacatgtgcctgttccagatggcagggctccttactgcaaggcatctctcagcgcctccagcagcctggaacccacgcctcctgaggacacagccatcagcagcttgcgccctccctctgctcctgagatgctgacccagcatggagcccaagagcagctcgaagaccatcctggccatagcagccaagcccccattcccagagcagaccctctccccagaaggacccgcaggcccttgttattgcctcgcttagatccaggacagagaggaaacaagcttcccacgggggaacaaggcctggatgaggatgttgatggggtctgtgaaagccacgcagcccctggtctggaatgcagttcaggctcagcaaactgtcagggtgctggcccctctgcagatggaatcagctccaggctgacaccagcagagtcctgcatggggctcgtgaggatgaatctctacactcactgcgtcaaagggctgatgctgtccctgctggctgaggagccgctgctgggagacagcgcagccatagaggaagtgtaccacagcagcctggcttcactgaatgggctggaagtccacctgaaagagacgctgcccagggatgaggcagcctccacgagcagcacctacaacttcacatattacgaccgcattcagagcttgctgatggcaaacctgccgcaggtggccaccccgcatgatcgccgcttcctccaggccgtcagcctgatgcatagcgaatttgcccagctgcccgcgctttatgaaatgactgtcagaaatgcctccacggctgtgtacgcctgttgcaaccccatccaggagacatatttccagcagctggcacctgcagcacggagctccggcttcccaaaccctcaggatggcgccttcagcctctccggcaaagcaaagcagaagctgctgaagcacggggtgaacttgctctgaactgcacccaggaggtgactgggaaggagaaaaccagcaaaggaagctctgccttttataattgaaaaggcccctctattttatttttcttgaaaacattcccttttttaggaaccaaatgatatttgagtttttgttattccttttgcagattgggatgtgttttgggggcaggggttagttcttcaggtcggcagacccagagcacttgataaagaactgtatttaatcggtagtgttggggccgggacgggcttggctccctctctgccatactgagcctgaggtatttcatatctcctgctgttccatcccagcttgaattggtgccacaagcttccaagttggcattttttctagaacctgatcgtccactagcccagagtgtgtgtgttcaacccccacaccaggtggtggtaggcggtgtgactgcacagcgaggtgccggatctgtgagcaggccgactccactcccacgccgcaggtaggtttctccagtgcgctcttgctgggaggtccggatcgttcctgcagggaagcggcagcacacggagaccacttggttgaattctgttggaactctactcaaatctaggggcgtcttctttggacccacaatgggggcaagccttaataatatggaagggagtttgggctttagagatccctttataaaagctctgggggctgagccctgagaattcagtgacaacaggaccaacctgcgctgcctttgactacaagtgggccgtgcagctggttcctctcgagcgagtgtccctaaataggagtttacaagatgtctgggggtaaaagcactgtgcttttcagtggtggctgcgtgaaagggagcgacactcagctgtgtgttcctgggcttgtgtggtacttagaacctcagttctattacgttatagtcagacatttttttgacagtatgagacagactgcaggatgaaaatatttgtcaaaatcttaactgaatgtttactggaagtacttgagattccatttgagagttgtattgttaataatttcatgtcagtgaactgatatctgatgtttatgatatggtgtctttttcttgaaacaagcttccaagggctagaaataaaatagccaaaaaatgctgga

SEQ ID NO: 439164 - DNA, 3927 bp, Homo sapiens
actcggcacgtcatcgccgcgcgccggcttgccaggagctggagggggaggtaggcggggcggcgcgtgacctaaggcctctctgccgcgcgcgcaggtacggggcagaagtcgcaggtacccagctgctgcccacatttctggtccagagtcccgaaccccgagcactgggatgcctggctactccgagccaaggcactgatgtttgaactggaaacttcaaaacgtttaataagagtcttcaggatgggtttgaactagacaagctagaaatttctttagaacaccagctctagcatgcatctcccacttttggctttcctggagaggagcttgaagaggtggttctgcagacagccacagtgatactcaggaaaccagaggaatggatttgacttttctgctaggattctttgttatagtttctccctgagttgtaagaggcatggaaatatacatgaaactgaagaacctgcaaggaagggaagtggaactttccatgctgagtgaaaactaaccaagtggcagttgtgactgaaaacactgaaacctaccacgtccagattcactggattgggggatagaggaacggtcacagctagggagaaagaagtgataccggaaaagaaaacctaaatgaagagaatgaggatgactgcacagtagatggccacctctacctccacagaggcaaagtcagcctcgtggtggaattatttttttctttatgatggttccaaggtaaaggaagaaggcgatccaacaagagctggcatttgttacttttatccttcccagaccctgctagaccaacaggagttgctttgtggacagattgctggagttgtccgctgtgtttctgacatttctgactctcctcctactcttgttcgtctgagaaaactgaagtttgccataaaagttgatggagattacctttgggtgctgggctgtgctgtggagctccctgatgtcagctgcaagcggtttctggatcagctagttggattctttaatttttacaatggacctgtttccctagcttatgagaactgttctcaggaagaactgagcacggagtgggacaccttcatcgagcaaattctgaaaaacaccagtgatctgcataagattttcaattccctctggaacttggaccaaactaaagtggagcccctgttgttgctgaaggcagcccgcattctgcagacctgccagcgctcgcctcacattctcgctggctgcatcctctataaaggactgattgtcagcacccaactcccgccctccctcaccgccaaggtcctgcttcaccgaacagcacctcaggagcagagactccctacgggagaggatgccccgcaggaacatggagcggcattgcccccgaatgtccagattatccctgtttttgtgaccaaagaggaagccattagtctccacgagttcccggtggaacagatgacaaggtctctagcatctccagcaggactccaggatggttcagcccagcaccatccaaagggtgggagcacatctgccctgaaagaaaacgccactggccatgtggaatccatggcctggaccaccccagatcccacatcccctgacgaagcttgtccagatggcaggaaggagaacggatgcttgtctggccatgatctggagagcatcaggcccgcaggactgcacaactctgccaggggtgaggttcttggcctcagctcctccctggggaaggaactagtctttctccaagaagaactcgacttgtctgaaatccacattccagaggctcaggaagtggaaatggcctcaggtcattttgccttcctacatgtgcctgttccagatggcagggctccttactgcaaggcatctctcagcgcctccagcagcctggaacccacgcctcctgaggacacagccatcagcagcttgcgccctccctctgctcctgagatgctgacccagcatggagcccaagagcagctcgaagaccatcctggccatagcagccaagcccccattcccagagcagaccctctccccagaaggacccgcaggcccttgttattgcctcgcttagatccaggacagagaggaaacaagcttcccacgggggaacaaggcctggatgaggatgttgatggggtctgtgaaagccacgcagcccctggtctggaatgcagttcaggctcagcaaactgtcagggtgctggcccctctgcagatggaatcagctccaggctgacaccagcagagtcctgcatggggctcgtgaggatgaatctctacactcactgcgtcaaagggctgatgctgtccctgctggctgaggagccgctgctgggagacagcgcagccatagaggaagtgtaccacagcagcctggcttcactgaatgggctggaagtccacctgaaagagacgctgcccagggatgaggcagcctccacgagcagcacctacaacttcacatattacgaccgcattcagagcttgctgatggcaaacctgccgcaggtggccaccccgcatgatcgccgcttcctccaggccgtcagcctgatgcatagcgaatttgcccagctgcccgcgctttatgaaatgactgtcagaaatgcctccacggctgtgtacgcctgttgcaaccccatccaggagacatatttccagcagctggcacctgcagcacggagctccggcttcccaaaccctcaggatggcgccttcagcctctccggcaaagcaaagcagaagctgctgaagcacggggtgaacttgctctgaactgcacccaggaggtgactgggaaggagaaaaccagcaaaggaagctctgccttttataattgaaaaggcccctctattttatttttcttgaaaacattcccttttttaggaaccaaatgatatttgagtttttgttattccttttgcagattgggatgtgttttgggggcaggggttagttcttcaggtcggcagacccagagcacttgataaagaactgtatttaatcggtagtgttggggccgggacgggcttggctccctctctgccatactgagcctgaggtatttcatatctcctgctgttccatcccagcttgaattggtgccacaagcttccaagttggcattttttctagaacctgatcgtccactagcccagagtgtgtgtgttcaacccccacaccaggtggtggtaggcggtgtgactgcacagcgaggtgccggatctgtgagcaggccgactccactcccacgccgcaggtaggtttctccagtgcgctcttgctgggaggtccggatcgttcctgcagggaagcggcagcacacggagaccacttggttgaattctgttggaactctactcaaatctaggggcgtcttctttggacccacaatgggggcaagccttaataatatggaagggagtttgggctttagagatccctttataaaagctctgggggctgagccctgagaattcagtgacaacaggaccaacctgcgctgcctttgactacaagtgggccgtgcagctggttcctctcgagcgagtgtccctaaataggagtttacaagatgtctgggggtaaaagcactgtgcttttcagtggtggctgcgtgaaagggagcgacactcagctgtgtgttcctgggcttgtgtggtacttagaacctcagttctattacgttatagtcagacatttttttgacagtatgagacagactgcaggatgaaaatatttgtcaaaatcttaactgaatgtttactggaagtacttgagattccatttgagagttgtattgttaataatttcatgtcagtgaactgatatctgatgtttatgatatggtgtctttttcttgaaacaagcttccaagggctagaaataaaatagccaaaaaatgctgga

SEQ ID NO: 439165 - DNA, 3981 bp, Homo sapiens
actcggcacgtcatcgccgcgcgccggcttgccaggagctggagggggaggtaggcggggcggcgcgtgacctaaggcctctctgccgcgcgcgcaggtacggggcagaagtcgcaggtacccagctgctgcccacatttctggtccagagtcccgaaccccgagcactgggatgcctggctactccgagccaaggcactgatgtttgaactggaaacttcaaaacgtttaataagagtcttcaggatgggtttgaactagacaagctagaaatttctttagaacaccagctctagcatgcatctcccacttttggctttcctggagaggagcttgaagaggtggttctgcagacagccacagtgatactcaggaaaccagaggaatggatttgacttttctgctaggattctttgttatagtttctccctgagttgtaagaggcatggaaatatacatgaaactgaagaacctgcaaggaagggaagtggaactttccatgctgagtgaaaactaaccaagtggcagttgtgactgaaaacactgaaacctaccacgtccagattcactggattgggggatagaggaacggtcacagctagggagaaagaagtgataccggaaaagaaaacctaaatgaagagaatgaggatgactgcacagtagatggccacctctacctccacagaggcaaagtcagcctcgtggtggaattatttttttctttatgatggttccaaggtaaaggaagaaggcgatccaacaagagctggcatttgttacttttatccttcccagaccctgctagaccaacaggagttgctttgtggacagattgctggagttgtccgctgtgtttctgacatttctgactctcctcctactcttgttcgtctgagaaaactgaagtttgccataaaagttgatggagattacctttgggtgctgggctgtgctgtggagctccctgatgtcagctgcaagcggtttctggatcagctagttggattctttaatttttacaatggacctgtttccctagcttatgagaactgttctcaggaagaactgagcacggagtgggacaccttcatcgagcaaattctgaaaaacaccagtgatctgcataagattttcaattccctctggaacttggaccaaactaaagtggagcccctgttgttgctgaaggcagcccgcattctgcagacctgccagcgctcgcctcacattctcgctggctgcatcctctataaaggactgattgtcagcacccaactcccgccctccctcaccgccaaggtcctgcttcaccgaacagcacctcaggagcagagactccctacgggagaggatgccccgcaggaacatggaaaatggatgttatggagcttcaagaatcgagttacccaccagaaccctaatggagcggcattgcccccgaatgtccagattatccctgtttttgtgaccaaagaggaagccattagtctccacgagttcccggtggaacagatgacaaggtctctagcatctccagcaggactccaggatggttcagcccagcaccatccaaagggtgggagcacatctgccctgaaagaaaacgccactggccatgtggaatccatggcctggaccaccccagatcccacatcccctgacgaagcttgtccagatggcaggaaggagaacggatgcttgtctggccatgatctggagagcatcaggcccgcaggactgcacaactctgccaggggtgaggttcttggcctcagctcctccctggggaaggaactagtctttctccaagaagaactcgacttgtctgaaatccacattccagaggctcaggaagtggaaatggcctcaggtcattttgccttcctacatgtgcctgttccagatggcagggctccttactgcaaggcatctctcagcgcctccagcagcctggaacccacgcctcctgaggacacagccatcagcagcttgcgccctccctctgctcctgagatgctgacccagcatggagcccaagagcagctcgaagaccatcctggccatagcagccaagcccccattcccagagcagaccctctccccagaaggacccgcaggcccttgttattgcctcgcttagatccaggacagagaggaaacaagcttcccacgggggaacaaggcctggatgaggatgttgatggggtctgtgaaagccacgcagcccctggtctggaatgcagttcaggctcagcaaactgtcagggtgctggcccctctgcagatggaatcagctccaggctgacaccagcagagtcctgcatggggctcgtgaggatgaatctctacactcactgcgtcaaagggctgatgctgtccctgctggctgaggagccgctgctgggagacagcgcagccatagaggaagtgtaccacagcagcctggcttcactgaatgggctggaagtccacctgaaagagacgctgcccagggatgaggcagcctccacgagcagcacctacaacttcacatattacgaccgcattcagagcttgctgatggcaaacctgccgcaggtggccaccccgcatgatcgccgcttcctccaggccgtcagcctgatgcatagcgaatttgcccagctgcccgcgctttatgaaatgactgtcagaaatgcctccacggctgtgtacgcctgttgcaaccccatccaggagacatatttccagcagctggcacctgcagcacggagctccggcttcccaaaccctcaggatggcgccttcagcctctccggcaaagcaaagcagaagctgctgaagcacggggtgaacttgctctgaactgcacccaggaggtgactgggaaggagaaaaccagcaaaggaagctctgccttttataattgaaaaggcccctctattttatttttcttgaaaacattcccttttttaggaaccaaatgatatttgagtttttgttattccttttgcagattgggatgtgttttgggggcaggggttagttcttcaggtcggcagacccagagcacttgataaagaactgtatttaatcggtagtgttggggccgggacgggcttggctccctctctgccatactgagcctgaggtatttcatatctcctgctgttccatcccagcttgaattggtgccacaagcttccaagttggcattttttctagaacctgatcgtccactagcccagagtgtgtgtgttcaacccccacaccaggtggtggtaggcggtgtgactgcacagcgaggtgccggatctgtgagcaggccgactccactcccacgccgcaggtaggtttctccagtgcgctcttgctgggaggtccggatcgttcctgcagggaagcggcagcacacggagaccacttggttgaattctgttggaactctactcaaatctaggggcgtcttctttggacccacaatgggggcaagccttaataatatggaagggagtttgggctttagagatccctttataaaagctctgggggctgagccctgagaattcagtgacaacaggaccaacctgcgctgcctttgactacaagtgggccgtgcagctggttcctctcgagcgagtgtccctaaataggagtttacaagatgtctgggggtaaaagcactgtgcttttcagtggtggctgcgtgaaagggagcgacactcagctgtgtgttcctgggcttgtgtggtacttagaacctcagttctattacgttatagtcagacatttttttgacagtatgagacagactgcaggatgaaaatatttgtcaaaatcttaactgaatgtttactggaagtacttgagattccatttgagagttgtattgttaataatttcatgtcagtgaactgatatctgatgtttatgatatggtgtctttttcttgaaacaagcttccaagggctagaaataaaatagccaaaaaatgctgga

SEQ ID NO: 439166 - DNA, 3280 bp, Homo sapiens
taaggctaggtacgaggctgggtgtgtgctctacctccacagaggcaagtcagcctcgtggtggaattatttttttctttatgatggttccaaggtaaaggaagaaggcgatccaacaagagctggcatttgttacttttatccttcccagaccctgctagaccaacaggagttgctttgtggacagattgctggagttgtccgctgtgtttctgacatttctgactctcctcctactcttgttcgtctgagaaaactgaagtttgccataaaagttgatggagattacctttgggtgctgggctgtgctgtggagctccctgatgtcagctgcaagcggtttctggatcagctagttggattctttaatttttacaatggacctgtttccctagcttatgagaactgttctcaggaagaactgagcacggagtgggacaccttcatcgagcaaattctgaaaaacaccagtgatctgcataagattttcaattccctctggaacttggaccaaactaaagtggagcccctgttgttgctgaaggcagcccgcattctgcagacctgccagcgctcgcctcacattctcgctggctgcatcctctataaaggactgattgtcagcacccaactcccgccctccctcaccgccaaggtcctgcttcaccgaacagcacctcaggagcagagactccctacgggagaggatgccccgcaggaacatggagcggcattgcccccgaatgtccagattatccctgtttttgtgaccaaagaggaagccattagtctccacgagttcccggtggaacagatgacaaggtctctagcatctccagcaggactccaggatggttcagcccagcaccatccaaagggtgggagcacatctgccctgaaagaaaacgccactggccatgtggaatccatggcctggaccaccccagatcccacatcccctgacgaagcttgtccagatggcaggaaggagaacggatgcttgtctggccatgatctggagagcatcaggcccgcaggactgcacaactctgccaggggtgaggttcttggcctcagctcctccctggggaaggaactagtctttctccaagaagaactcgacttgtctgaaatccacattccagaggctcaggaagtggaaatggcctcaggtcattttgccttcctacatgtgcctgttccagatggcagggctccttactgcaaggcatctctcagcgcctccagcagcctggaacccacgcctcctgaggacacagccatcagcagcttgcgccctccctctgctcctgagatgctgacccagcatggagcccaagagcagctcgaagaccatcctggccatagcagccaagcccccattcccagagcagaccctctccccagaaggacccgcaggcccttgttattgcctcgcttagatccaggacagagaggaaacaagcttcccacgggggaacaaggcctggatgaggatgttgatggggtctgtgaaagccacgcagcccctggtctggaatgcagttcaggctcagcaaactgtcagggtgctggcccctctgcagatggaatcagctccaggctgacaccagcagagtcctgcatggggctcgtgaggatgaatctctacactcactgcgtcaaagggctgatgctgtccctgctggctgaggagccgctgctgggagacagcgcagccatagaggaagtgtaccacagcagcctggcttcactgaatgggctggaagtccacctgaaagagacgctgcccagggatgaggcagcctccacgagcagcacctacaacttcacatattacgaccgcattcagagcttgctgatggcaaacctgccgcaggtggccaccccgcatgatcgccgcttcctccaggccgtcagcctgatgcatagcgaatttgcccagctgcccgcgctttatgaaatgactgtcagaaatgcctccacggctgtgtacgcctgttgcaaccccatccaggagacatatttccagcagctggcacctgcagcacggagctccggcttcccaaaccctcaggatggcgccttcagcctctccggcaaagcaaagcagaagctgctgaagcacggggtgaacttgctctgaactgcacccaggaggtgactgggaaggagaaaaccagcaaaggaagctctgccttttataattgaaaaggcccctctattttatttttcttgaaaacattcccttttttaggaaccaaatgatatttgagtttttgttattccttttgcagattgggatgtgttttgggggcaggggttagttcttcaggtcggcagacccagagcacttgataaagaactgtatttaatcggtagtgttggggccgggacgggcttggctccctctctgccatactgagcctgaggtatttcatatctcctgctgttccatcccagcttgaattggtgccacaagcttccaagttggcattttttctagaacctgatcgtccactagcccagagtgtgtgtgttcaacccccacaccaggtggtggtaggcggtgtgactgcacagcgaggtgccggatctgtgagcaggccgactccactcccacgccgcaggtaggtttctccagtgcgctcttgctgggaggtccggatcgttcctgcagggaagcggcagcacacggagaccacttggttgaattctgttggaactctactcaaatctaggggcgtcttctttggacccacaatgggggcaagccttaataatatggaagggagtttgggctttagagatccctttataaaagctctgggggctgagccctgagaattcagtgacaacaggaccaacctgcgctgcctttgactacaagtgggccgtgcagctggttcctctcgagcgagtgtccctaaataggagtttacaagatgtctgggggtaaaagcactgtgcttttcagtggtggctgcgtgaaagggagcgacactcagctgtgtgttcctgggcttgtgtggtacttagaacctcagttctattacgttatagtcagacatttttttgacagtatgagacagactgcaggatgaaaatatttgtcaaaatcttaactgaatgtttactggaagtacttgagattccatttgagagttgtattgttaataatttcatgtcagtgaactgatatctgatgtttatgatatggtgtctttttcttgaaacaagcttccaagggctagaaataaaatagccaaaaaatgctgga

SEQ ID NO: 439167 - DNA, 3873 bp, Homo sapiens
actcggcacgtcatcgccgcgcgccggcttgccaggagctggagggggaggtaggcggggcggcgcgtgacctaaggcctctctgccgcgcgcgcaggtacggggcagaagtcgcaggtacccagctgctgcccacatttctggtccagagtcccgaaccccgagcactgggatgcctggctactccgagccaaggcactgatgtttgaactggaaacttcaaaacgtttaataagagtcttcaggatgggtttgaactagacaagctagaaatttctttagaacaccagctctagcatgcatctcccacttttggctttcctggagaggagcttgaagaggtggttctgcagacagccacagtgatactcaggaaaccagaggaatggatttgacttttctgctaggattctttgttatagtttctccctgagttgtaagaggcatggaaatatacatgaaactgaagaacctgcaaggaagggaagtggaactttccatgctgagtgaaaactaaccaagtggcagttgtgactgaaaacactgaaacctaccacgtccagattcactggattgggggatagaggaacggtcacagctagggagaaagaagtgataccggaaaagaaaacctaaatgaagagaatgaggatgactgcacagtagatggccacctctacctccacagaggcaaagtcagcctcgtggtggaattatttttttctttatgatggttccaaggtaaaggaagaaggcgatccaacaagagctggcatttgttacttttatccttcccagaccctgctagaccaacaggagttgctttgtggacagattgctggagttgtccgctgtgtttctgacatttctgactctcctcctactcttgttcgtctgagaaaactgaagtttgccataaaagttgatggagattacctttgggtgctgggctgtgctgtggagctccctgatgtcagctgcaagcggtttctggatcagctagttggattctttaatttttacaatggacctgtttccctagcttatgagaactgttctcaggaagaactgagcacggagtgggacaccttcatcgagcaaattctgaaaaacaccagtgatctgcataagattttcaattccctctggaacttggaccaaactaaagtggagcccctgttgttgctgaaggcagcccgcattctgcagacctgccagcgctcgcctcacattctcgctggctgcatcctctataaaggactgattgtcagcacccaactcccgccctccctcaccgccaaggtcctgcttcaccgaacagcacctcaggagcagagactccctacgggagaggatgccccgcaggaacatggagcggcattgcccccgaatgtccagattatccctgtttttgtgaccaaagaggaagccattagtctccacgagttcccggtggaacagatgacaaggtctctagcatctccagcaggactccaggatggttcagcccagcaccatccaaagggtgggagcacatctgccctgaaagaaaacgccactggccatgtggaatccatggcctggaccaccccagatcccacatcccctgacgaagcttgtccagatggcaggaaggagaacggatgcttgtctggccatgatctggagagcatcaggcccgcaggactgcacaactctgccaggggtgaggttcttggcctcagctcctccctggggaaggaactagtctttctccaagaagaactcgacttgtctgaaatccacattccagaggctcaggaagtggaaatggcctcaggtcattttgccttcctacatgtgcctgttccagatggcagggctccttactgcaaggcatctctcagcgcctccagcagcctggaacccacgcctcctgaggacacagccatcagcagcttgcgccctccctctgctcctgagatgctgacccagcatggagcccaagagcagctcgaagaccatcctggccatagcagccaagcccccattcccagagcagaccctctccccagaaggacccgcaggcccttgttattgcctcgcttagatccaggacagagaggaaacaagcttcccacgggggaacaaggcctggatgaggatgttgatggggtctgtgaaagccacgcagcccctggtctggaatgcagttcaggctcagcaaactgtcagggtgctggcccctctgcagatggaatcagctccaggctgacaccagcagagtcctgcatggggctcgtgaggatgaatctctacactcactgcgtcaaagggctgatgctgtccctgctggctgaggagccgctgctgggagacagcgcagccatagaggaagtgtaccacagcagcctggcttcactgaatgggctggaagtccacctgaaagagacgctgcccagggatgaggcagcctccacgagcagcacctacaacttcacatattacgaccgcattcagagcttgctgatggcaaacctgccgcaggtggccaccccgcatgatcgccgcttcctccaggccgtcagcctgatgcatagcgaatttgcccagctgcccgcgctttatgaaatgactgtcagaaatgcctccacggctgtgtacgcctgttgcaaccccatccaggagacatatttccagcagctggcacctgcagcacggagctccggcttcccaaaccctcaggatggcgccttcagcctctccggcaaagcaaagcagaagctgctgaagcacggggtgaacttgctctgaactgcacccaggaggtgactgggaaggagaaaaccagcaaaggaagctctgccttttataattgaaaaggcccctctattttatttttcttttgcagattgggatgtgttttgggggcaggggttagttcttcaggtcggcagacccagagcacttgataaagaactgtatttaatcggtagtgttggggccgggacgggcttggctccctctctgccatactgagcctgaggtatttcatatctcctgctgttccatcccagcttgaattggtgccacaagcttccaagttggcattttttctagaacctgatcgtccactagcccagagtgtgtgtgttcaacccccacaccaggtggtggtaggcggtgtgactgcacagcgaggtgccggatctgtgagcaggccgactccactcccacgccgcaggtaggtttctccagtgcgctcttgctgggaggtccggatcgttcctgcagggaagcggcagcacacggagaccacttggttgaattctgttggaactctactcaaatctaggggcgtcttctttggacccacaatgggggcaagccttaataatatggaagggagtttgggctttagagatccctttataaaagctctgggggctgagccctgagaattcagtgacaacaggaccaacctgcgctgcctttgactacaagtgggccgtgcagctggttcctctcgagcgagtgtccctaaataggagtttacaagatgtctgggggtaaaagcactgtgcttttcagtggtggctgcgtgaaagggagcgacactcagctgtgtgttcctgggcttgtgtggtacttagaacctcagttctattacgttatagtcagacatttttttgacagtatgagacagactgcaggatgaaaatatttgtcaaaatcttaactgaatgtttactggaagtacttgagattccatttgagagttgtattgttaataatttcatgtcagtgaactgatatctgatgtttatgatatggtgtctttttcttgaaacaagcttccaagggctagaaataaaatagccaaaaaatgctgga

SEQ ID NO: 439168 - DNA, 2883 bp, Homo sapiens
actcggcacgtcatcgccgcgcgccggcttgccaggagctggagggggaggtaggcggggcggcgcgtgacctaaggcctctctgccgcgcgcgcaggtacggggcagaagtcgcaggtacccagctgctgcccacatttctggtccagagtcccgaaccccgagcactgggatgcctggctactccgagccaaggcactgatgtttgaactggaaacttcaaaacgtttaataagagtcttcaggatgggtttgaactagacaagctagaaatttctttagaacaccagctctagcatgcatctcccacttttggctttcctggagaggagcttgaagaggtggttctgcagacagccacagtgatactcaggaaaccagaggaatggatttgacttttctgctaggattctttgttatagtttctccctgagttgtaagaggcatggaaatatacatgaaactgaagaacctgcaaggaagggaagtggaactttccatgctgagtgaaaactaaccaagtggcagttgtgactgaaaacactgaaacctaccacgtccagattcactggattgggggatagaggaacggtcacagctagggagaaagaagtgataccggaaaagaaaacctaaatgaagagaatgaggatgactgcacagtagatggccacctctacctccacagaggcaaagtcagcctcgtggtggaattatttttttctttatgatggttccaaggtaaaggaagaaggcgatccaacaagagctggcatttgttacttttatccttcccagaccctgctagaccaacaggagttgctttgtggacagattgctggagttgtccgctgtgtttctgacatttctgactctcctcctactcttgttcgtctgagaaaactgaagtttgccataaaagttgatggagattacctttgggtgctgggctgtgctgtggagctccctgatgtcagctgcaagcggtttctggatcagctagttggattctttaatttttacaatggacctgtttccctagcttatgagaactgttctcaggaagaactgagcacggagtgggacaccttcatcgagcaaattctgaaaaacaccagtgatctgcataagattttcaattccctctggaacttggaccaaactaaagtggagcccctgttgttgctgaaggcagcccgcattctgcagacctgccagcgctcgcctcacattctcgctggctgcatcctctataaaggactgattgtcagcacccaactcccgccctccctcaccgccaaggtcctgcttcaccgaacagcacctcaggagcagtaccacagcagcctggcttcactgaatgggctggaagtccacctgaaagagacgctgcccagggatgaggcagcctccacgagcagcacctacaacttcacatattacgaccgcattcagagcttgctgatggcaaacctgccgcaggtggccaccccgcatgatcgccgcttcctccaggccgtcagcctgatgcatagcgaatttgcccagctgcccgcgctttatgaaatgactgtcagaaatgcctccacggctgtgtacgcctgttgcaaccccatccaggagacatatttccagcagctggcacctgcagcacggagctccggcttcccaaaccctcaggatggcgccttcagcctctccggcaaagcaaagcagaagctgctgaagcacggggtgaacttgctctgaactgcacccaggaggtgactgggaaggagaaaaccagcaaaggaagctctgccttttataattgaaaaggcccctctattttatttttcttgaaaacattcccttttttaggaaccaaatgatatttgagtttttgttattccttttgcagattgggatgtgttttgggggcaggggttagttcttcaggtcggcagacccagagcacttgataaagaactgtatttaatcggtagtgttggggccgggacgggcttggctccctctctgccatactgagcctgaggtatttcatatctcctgctgttccatcccagcttgaattggtgccacaagcttccaagttggcattttttctagaacctgatcgtccactagcccagagtgtgtgtgttcaacccccacaccaggtggtggtaggcggtgtgactgcacagcgaggtgccggatctgtgagcaggccgactccactcccacgccgcaggtaggtttctccagtgcgctcttgctgggaggtccggatcgttcctgcagggaagcggcagcacacggagaccacttggttgaattctgttggaactctactcaaatctaggggcgtcttctttggacccacaatgggggcaagccttaataatatggaagggagtttgggctttagagatccctttataaaagctctgggggctgagccctgagaattcagtgacaacaggaccaacctgcgctgcctttgactacaagtgggccgtgcagctggttcctctcgagcgagtgtccctaaataggagtttacaagatgtctgggggtaaaagcactgtgcttttcagtggtggctgcgtgaaagggagcgacactcagctgtgtgttcctgggcttgtgtggtacttagaacctcagttctattacgttatagtcagacatttttttgacagtatgagacagactgcaggatgaaaatatttgtcaaaatcttaactgaatgtttactggaagtacttgagattccatttgagagttgtattgttaataatttcatgtcagtgaactgatatctgatgtttatgatatggtgtctttttcttgaaacaagcttccaagggctagaaataaaatagccaaaaaatgctgga

SEQ ID NO: 439169 - DNA, 1607 bp, Homo sapiens
aggccttagtgattctatagctaaaatattagatgttttattttggggggagtggggaaatagcatagaccgtcatttaagccttcagacaattagtgactgtgttgtacaaaaaagatggcgaaagcctgatctagataccaaaattcacatgtcatccaacctagcttactcttattttttcgcttttggtaactttacttttcaggttcacatagtacgaccgcattcagagcttgctgatggcaaacctgccgcaggtggccaccccgcatgatcgccgcttcctccaggccgtcagcctgatgcatagcgaatttgcccagctgcccgcgctttatgaaatgactgtcagaaatgcctccacggctgtgtacgcctgttgcaaccccatccaggagacatatttccagcagctggcacctgcagcacggagctccggcttcccaaaccctcaggatggcgccttcagcctctccggcaaagcaaagcagaagctgctgaagcacggggtgaacttgctctgaactgcacccaggaggtgactgggaaggagaaaaccagcaaaggaagctctgccttttataattgaaaaggcccctctattttatttttcttttgcagattgggatgtgttttgggggcaggggttagttcttcaggtcggcagacccagagcacttgataaagaactgtatttaatcggtagtgttggggccgggacgggcttggctccctctctgccatactgagcctgaggtatttcatatctcctgctgttccatcccagcttgaattggtgccacaagcttccaagttggcattttttctagaacctgatcgtccactagcccagagtgtgtgtgttcaacccccacaccaggtggtggtaggcggtgtgactgcacagcgaggtgccggatctgtgagcaggccgactccactcccacgccgcaggtaggtttctccagtgcgctcttgctgggaggtccggatcgttcctgcagggaagcggcagcacacggagaccacttggttgaattctgttggaactctactcaaatctaggggcgtcttctttggacccacaatgggggcaagccttaataatatggaagggagtttgggctttagagatccctttataaaagctctgggggctgagccctgagaattcagtgacaacaggaccaacctgcgctgcctttgactacaagtgggccgtgcagctggttcctctcgagcgagtgtccctaaataggagtttacaagatgtctgggggtaaaagcactgtgcttttcagtggtggctgcgtgaaagggagcgacactcagctgtgtgttcctgggcttgtgtggtacttagaacctcagttctattacgttatagtcagacatttttttgacagtatgagacagactgcaggatgaaaatatttgtcaaaatcttaactgaatgtttactggaagtacttgagattccatttgagagttgtattgttaataatttcatgtcagtgaactgatatctgatgtttatgatatggtgtctttttcttgaaacaagcttccaagggctagaaataaaatagccaaaaaatgctgga

SEQ ID NO: 439170 - DNA, 5841 bp, Homo sapiens
aaacgccgcccaggacgcagccgccgccgccgccgctcctctgccactggctctgcgccccagcccggctctgctgcagcggcagggaggaagagccgccgcagcgcgactcgggagccccgggccacagcctggcctccggagccacccacaggcctccccgggcggcgcccacgctcctaccgcccggacgcgcggatcctccgccggcaccgcagccacctgctcccggcccagaggcgacgacacgatgcgctgcgcgctggcgctctcggcgctgctgctactgttgtcaacgccgccgctgctgccgtcgtcgccgtcgccgtcgccgtcgccgtcgccctcccagaatgcaacccagactactacggactcatctaacaaaacagcaccgactccagcatccagtgtcaccatcatggctacagatacagcccagcagagcacagtccccacttccaaggccaacgaaatcttggcctcggtcaaggcgaccacccttggtgtatccagtgactcaccggggactacaaccctggctcagcaagtctcaggcccagtcaacactaccgtggctagaggaggcggctcaggcaaccctactaccaccatcgagagccccaagagcacaaaaagtgcagacaccactacagttgcaacctccacagccacagctaaacctaacaccacaagcagccagaatggagcagaagatacaacaaactctggggggaaaagcagccacagtgtgaccacagacctcacatccactaaggcagaacatctgacgacccctcaccctacaagtccacttagcccccgacaacccactttgacgcatcctgtggccaccccaacaagctcgggacatgaccatcttatgaaaatttcaagcagttcaagcactgtggctatccctggctacaccttcacaagcccggggatgaccaccaccctaccgtcatcggttatctcgcaaagaactcaacagacctccagtcagatgccagccagctctacggccccttcctcccaggagacagtgcagcccacgagcccggcaacggcattgagaacacctaccctgccagagaccatgagctccagccccacagcagcatcaactacccaccgataccccaaaacaccttctcccactgtggctcatgagagtaactgggcaaagtgtgaggatcttgagacacagacacagagtgagaagcagctcgtcctgaacctcacaggaaacaccctctgtgcagggggcgcttcggatgagaaattgatctcactgatatgccgagcagtcaaagccaccttcaacccggcccaagataagtgcggcatacggctggcatctgttccaggaagtcagaccgtggtcgtcaaagaaatcactattcacactaagctccctgccaaggatgtgtacgagcggctgaaggacaaatgggatgaactaaaggaggcaggggtcagtgacatgaagctaggggaccaggggccaccggaggaggccgaggaccgcttcagcatgcccctcatcatcaccatcgtctgcatggcgtcattcctgctcctcgtggcggccctctatggctgctgccaccagcgcctctcccagaggaaggaccagcagcggctaacagaggagctgcagacagtggagaatggttaccatgacaacccaacactggaagtgatggagacctcttctgagatgcaggagaagaaggtggtcagcctcaacggggagctgggggacagctggatcgtccctctggacaacctgaccaaggacgacctggatgaggaggaagacacacacctctagtccggtctgccggtggcctccagcagcaccacagagctccagaccaaccaccccaagtgccgtttggatggggaagggaaagactggggagggagagtgaactccgaggggtgtcccctcccaatccccccagggccttaatttttcccttttcaacctgaacaaatcacattctgtccagattcctcttgtaaaataacccactagtgcctgagctcagtgctgctggatgatgagggagatcaagaaaaagccacgtaagggactttatagatgaactagtggaatcccttcattctgcagtgagattgccgagacctgaagagggtaagtgacttgcccaaggtcagagccacttggtgacagagccaggatgagaacaaagattccatttgcaccatgccacactgctgtgttcacatgtgccttccgtccagagcagtcccgggcaggggtgaaactccagcaggtggctgggctggaaaggagggcagggctacatcctggctcggtgggatctgacgacctgaaagtccagctcccaagttttccttctcctaccccagcctcgtgtacccatcttcccaccctctatgttcttacccctccctacactcagtgtttgttcccacttactctgtcctggggcctctgggattagcacaggttattcataaccttgaaccccttgttctggattcggattttctcacatttgcttcgtgagatgggggcttaacccacacaggtctccgtgcgtgaaccaggtctgcttaggggacctgcgtgcaggtgaggagagaaggggacactcgagtccaggctggtatctcagggcagctgatgaggggtcagcaggaacactggcccattgcccctggcactccttgcagaggccacccacgatcttctttgggcttccatttccaccagggactaaaatctgctgtagctagtgagagcagcgtgttccttttgttgttcactgctcagctgatgggagtgattccctgagacccagtatgaaagagcagtggctgcaggagaggccttcccggggccccccatcagcgatgtgtcttcagagacaatccattaaagcagccaggaaggacaggctttcccctgtatatcataggaaactcagggacatttcaagttgctgagagttttgttatagttgttttctaacccagccctccactgccaaaggccaaaagctcagacagttggcagacgtccagttagctcatctcactcactctgattctcctgtgccacaggaaaagagggcctggaaagcgcagtgcatgctgggtgcatgaagggcagcctgggggacagactgttgtgggaacgtcccactgtcctggcctggagctaggccttgctgttcctcttctctgtgagcctagtggggctgctgcggttctcttgcagtttctggtggcatctcaggggaacacaaagctatgtaaggctcctaagcagtgggcatggtgaggtttcatctgattgagaagggggaatcctgtgtggaatgttgaactttcgccatggtctccatcgttctgggcgtaaattccctgggatcaagtaggaaaatgggcagaactgcttaggggaatgaaattgccatttttcgggtgaaacgccacacctccagggtcttaagagtcaggctccggctgtagtagctctgatgaaataggctatccactcgggatggcttactttttaaaagggtagggggaggggctggggaagatctgtcctgcaccatctgcctaattccttcctcacagtctgtagccatctgatatcctaggggaaaaggaaggccaggggttcacatagggccccagcgagtttcccaggagttagagggatgcgaggctaacaagttccaaaaacatctgccccgatgctctagtgtttggaggtgggcaggatggagaacagtgcctgtttgggggaaaacaggaaatcttgttaggcttgagtgaggtgtttgcttccttcttgcccagcgctgggttctctccacccagtaggttttctgttgtggtcccgtgggagaggccagactggattattcctcctttgctgatcctgggtcacacttcaccagccagggcttttgacggagacagcaaataggcctctgcaaatcaatcaaaggctgcaaccctatggcctcttggagacagatgatgactggcaaggactagagagcaggagtgcctggccaggtcggtcctgactctcctgactctccatcgctctgtccaaggagaacccggagaggctctgggctgattcagaggttactgctttatattcgtccaaactgtgttagtctaggcttaggacagcttcagaatctgacaccttgccttgctcttgccaccaggacacctatgtcaacaggccaaacagccatgcatctataaaggtcatcatcttctgccacctttactgggttctaaatgctctctgataattcagagagcattgggtctgggaagaggtaagaggaacactagaagctcagcatgacttaaacaggttgtagcaaagacagtttatcatcaactctttcagtggtaaactgtggtttccccaagctgcacaggaggccagaaaccacaagtatgatgactaggaagcctactgtcatgagagtggggagacaggcagcaaagcttatgaaggaggtacagaatattctttgcgttgtaagacagaatacgggtttaatctagtctaggcaccagatttttttcccgcttgataaggaaagctagcagaaagtttatttaaaccacttcttgagctttatcttttttgacaatatactggagaaactttgaagaacaagttcaaactgatacatatacacatatttttttgataatgtaaatacagtgaccatgttaacctaccctgcactgctttaagtgaacatactttgaaaaagcattatgttagctgagtgatggccaagttttttctctggacaggaatgtaaatgtcttactggaaatgacaagtttttgcttgatttttttttttaaacaaaaaatgaaatataacaagacaaacttatgataaagtatttgtcttgtagatcaggtgttttgttttgtttttttaattttaaaatgcaaccctgccccctccccagcaaagtcacagctccatttcagtaaaggttggagtcaatatgctctggttggcaggcaaccctgtagtcatggagaaaggtatttcaagatctagtccaatctttttctagagaaaaagataatctgaagctcacaaagatgaagtgacttcctcaaaatcacatggttcaggacagaaacaagattaaaacctggatccacagactgtgcgcctcagaaggaataatcggtaaattaagaattgctactcgaaggtgccagaatgacacaaaggacagaattcctttcccagttgttaccctagcaaggctagggagggcatgaacacaaacataagaactggtcttctacactttctctgaatcatttaggtttaagatgtaagtgaacaattctttctttctgccaagaaacaaagttttggatgagcttttatatatggaacttactccaacaggactgagggaccaaggaaacatgatgggggaggcagagagggcaagagtaaaactgtagcatagcttttgtcacggtcactagctgatccctcaggtctgctgcaaacacagcatggaggacacagatgactctttggtgttggtctttttgtctgcagtgaatgttcaacagtttgcccaggaactgggggatcatatatgtcttagtggacaggggtctgaagtacactggaatttactgagaaacttgtttgtaaaaactatagttaataattattgcattttcttacaaaaatatattttggaaaattgtatactgtcaattaaagtgtttttgtgtaaactggttaaaaaaaaa

SEQ ID NO: 439171 - DNA, 1920 bp, Homo sapiens
  misc_feature (21)..(21): n is a, c, g, or t
  misc_feature (24)..(24): n is a, c, g, or t
  misc_feature (57)..(57): n is a, c, g, or t
  misc_feature (63)..(63): n is a, c, g, or t
  misc_feature (90)..(91): n is a, c, g, or t
gctgaattctctttgattganttncaagaggcctattttgctgtctccgtcccaaanccctgnctggtgaagtgtgacccaggatcaccnnaggaggaataatccagtctggcctcttggagacagatgatgactggcaaggactagagagcaggagtgcctggccaggtcggtcctgactctcctgactctccatcgctctgtccaaggagaacccggagaggctctgggctgattcagaggttactgctttatattcgtccaaactgtgttagtctaggcttaggacagcttcagaatctgacaccttgccttgctcttgccaccaggacacctatgtcaacaggccaaacagccatgcatctataaaggtcatcatcttctgccacctttactgggttctaaatgctctctgataattcagagagcattgggtctgggaagaggtaagaggaacactagaagctcagcatgacttaaacaggttgtagcaaagacagtttatcatcaactctttcagtggtaaactgtggtttccccaagctgcacaggaggccagaaaccacaagtatgatgactaggaagcctactgtcatgagagtggggagacaggcagcaaagcttatgaaggaggtacagaatattctttgcgttgtaagacagaatacgggtttaatctagtctaggcaccagatttttttcccgcttgataaggaaagctagcagaaagtttatttaaaccacttcttgagctttatcttttttgacaatatactggagaaactttgaagaacaagttcaaactgatacatatacacatatttttttgataatgtaaatacagtgaccatgttaacctaccctgcactgctttaagtgaacatactttgaaaaagcattatgttagctgagtgatggccaagttttttctctggacaggaatgtaaatgtcttactggaaatgacaagtttttgcttgatttttttttttaaacaaaaaatgaaatataacaagacaaacttatgataaagtatttgtcttgtagatcaggtgttttgttttgtttttttaattttaaaatgcaaccctgccccctccccagcaaagtcacagctccatttcagtaaaggttggagtcaatatgctctggttggcaggcaaccctgtagtcatggagaaaggtatttcaagatctagtccaatctttttctagagaaaaagataatctgaagctcacaaagatgaagtgacttcctcaaaatcacatggttcaggacagaaacaagattaaaacctggatccacagactgtgcgcctcagaaggaataatcggtaaattaagaattgctactcgaaggtgccagaatgacacaaaggacagaattcctttcccagttgttaccctagcaaggctagggagggcatgaacacaaacataagaactggtcttctacactttctctgaatcatttaggtttaagatgtaagtgaacaattctttctttctgccaagaaacaaagttttggatgagcttttatatatggaacttactccaacaggactgagggaccaaggaaacatgatgggggaggcagagagggcaagagtaaaactgtagcatagcttttgtcacggtcactagctgatccctcaggtctgctgcaaacacagcatggaggacacagatgactctttggtgttggtctttttgtctgcagtgaatgttcaacagtttgcccaggaactgggggatcatatatgtcttagtggacaggggtctgaagtacactggaatttactgagaaacttgtttgtaaaaactatagttaataattattgcattttcttacaaaaatatattttggaaaattgtatactgtcaattaaagtgtttttgtgtaaactggttaaaaaaaaa

SEQ ID NO: 439172 - DNA, 1384 bp, Homo sapiens
aaacgccgcccaggacgcagccgccgccgccgccgctcctctgccactggctctgcgccccagcccggctctgctgcagcggcagggaggaagagccgccgcagcgcgactcgggagccccgggccacagcctggcctccggagccacccacaggcctccccgggcggcgcccacgctcctaccgcccggacgcgcggatcctccgccggcaccgcagccacctgctcccggcccagaggcgacgacacgatgcgctgcgcgctggcgctctcggcgctgctgctactgttgtcaacgccgccgctgctgccgtcgtcgccgtcgccgtcgccgtcgccgtcgccctcccagaatgcaacccagactactacggactcatctaacaaaacagcaccgactccagcatccagtgtcaccatcatggctacagatacagcccagcagagcacagtccccacttccaaggccaacgaaatcttggcctcggtcaaggcgaccacccttggtgtatccagtgactcaccggggactacaaccctggctcagcaagtctcaggcccagtcaacactaccgtggctagaggaggcggctcaggcaaccctactaccaccatcgagagccccaagagcacaaaaagtgcagacaccactacagttgcaacctccacagccacagctaaacctaacaccacaagcagccagaatggagcagaagatacaacaaactctggggggaaaagcagccacagtgtgaccacagacctcacatccactaaggcagaacatctgacgacccctcaccctacaagtccacttagcccccgacaacccactttgacgcatcctgtggccaccccaacaagctcgggacatgaccatcttatgaaaatttcaagcagttcaagcactgtggctatccctggctacaccttcacaagcccggggatgaccaccaccctaccgtcatcggttatctcgcaaagaactcaacagacctccagtcagatgccagccagctctacggccccttcctcccaggagacagtgcagcccacgagcccggcaacggcattgagaacacctaccctgccagagaccatgagctccagccccacagcagcatcaactacccaccgataccccaaaacaccttctcccactgtggctcatgagagtaactgggcaaagtgtgaggatcttgagacacagacacagagtgagaagcagctcgtcctgaacctcacaggaaacaccctctgtgcaggcggacatagtcgtggatcactacaaggaggagaagtttgaggacaggtccccagccgccgagtgcctatcagagaaggagacggaggagctcatgcctggatgagaaatgtctccgcg

SEQ ID NO: 439173 - DNA, 5892 bp, Homo sapiens
aaacgccgcccaggacgcagccgccgccgccgccgctcctctgccactggctctgcgccccagcccggctctgctgcagcggcagggaggaagagccgccgcagcgcgactcgggagccccgggccacagcctggcctccggagccacccacaggcctccccgggcggcgcccacgctcctaccgcccggacgcgcggatcctccgccggcaccgcagccacctgctcccggcccagaggcgacgacacgatgcgctgcgcgctggcgctctcggcgctgctgctactgttgtcaacgccgccgctgctgccgtcgtcgccgtcgccgtcgccgtcgccgtcgccctcccagaatgcaacccagactactacggactcatctaacaaaacagcaccgactccagcatccagtgtcaccatcatggctacagatacagcccagcagagcacagtccccacttccaaggccaacgaaatcttggcctcggtcaaggcgaccacccttggtgtatccagtgactcaccggggactacaaccctggctcagcaagtctcaggcccagtcaacactaccgtggctagaggaggcggctcaggcaaccctactaccaccatcgagagccccaagagcacaaaaagtgcagacaccactacagttgcaacctccacagccacagctaaacctaacaccacaagcagccagaatggagcagaagatacaacaaactctggggggaaaagcagccacagtgtgaccacagacctcacatccactaaggcagaacatctgacgacccctcaccctacaagtccacttagcccccgacaacccactttgacgcatcctgtggccaccccaacaagctcgggacatgaccatcttatgaaaatttcaagcagttcaagcactgtggctatccctggctacaccttcacaagcccggggatgaccaccaccctaccgtcatcggttatctcgcaaagaactcaacagacctccagtcagatgccagccagctctacggccccttcctcccaggagacagtgcagcccacgagcccggcaacggcattgagaacacctaccctgccagagaccatgagctccagccccacagcagcatcaactacccaccgataccccaaaacaccttctcccactgtggctcatgagagtaactgggcaaagtgtgaggatcttgagacacagacacagagtgagaagcagctcgtcctgaacctcacaggaaacaccctctgtgcagggggcgcttcggatgagaaattgatctcactgatatgccgagcagtcaaagccaccttcaacccggcccaagataagtgcggcatacggctggcatctgttccaggaagtcagaccgtggtcgtcaaagaaatcactattcacactaagctccctgccaaggatgtgtacgagcggctgaaggacaaatgggatgaactaaaggaggcaggggtcagtgacatgaagctaggggaccaggggccaccggaggaggccgaggaccgcttcagcatgcccctcatcatcaccatcgtctgcatggcgtcattcctgctcctcgtggcggccctctatggctgctgccaccagcgcctctcccagaggaaggaccagcagcggctaacagaggagctgcagacagtggagaatggttaccatgacaacccaacactggaagtgatggagacctcttctgagatgcaggagaagaaggtggtcagcctcaacggggagctgggggacagctggatcgtccctctggacaacctgaccaaggacgacctggatgaggaggaagacacacacctctagtccggtctgccggtggcctccagcagcaccacagagctccagaccaaccaccccaagtgccgtttggatggggaagggaaagactggggagggagagtgaactccgaggggtgtcccctcccaatccccccagggccttaatttttcccttttcaacctgaacaaatcacattctgtccagattcctcttgtaaaataacccactagtgcctgagctcagtgctgctggatgatgagggagatcaagaaaaagccacgtaagggactttatagatgaactagtggaatcccttcattctgcagtgagattgccgagacctgaagagggtaagtgacttgcccaaggtcagagccacttggtgacagagccaggatgagaacaaagattccatttgcaccatgccacactgctgtgttcacatgtgccttccgtccagagcagtcccgggcaggggtgaaactccagcaggtggctgggctggaaaggagggcagggctacatcctggctcggtgggatctgacgacctgaaagtccagctcccaagttttccttctcctaccccagcctcgtgtacccatcttcccaccctctatgttcttacccctccctacactcagtgtttgttcccacttactctgtcctggggcctctgggattagcacaggttattcataaccttgaaccccttgttctggattcggattttctcacatttgcttcgtgagatgggggcttaacccacacaggtctccgtgcgtgaaccaggtctgcttaggggacctgcgtgcaggtgaggagagaaggggacactcgagtccaggctggtatctcagggcagctgatgaggggtcagcaggaacactggcccattgcccctggcactccttgcagaggccacccacgatcttctttgggcttccatttccaccagggactaaaatctgctgtagctagtgagagcagcgtgttccttttgttgttcactgctcagctgatgggagtgattccctgagacccagtatgaaagagcagtggctgcaggagaggccttcccggggccccccatcagcgatgtgtcttcagagacaatccattaaagcagccaggaaggacaggctttcccctgtatatcataggaaactcagggacatttcaagttgctgagagttttgttatagttgttttctaacccagccctccactgccaaaggccaaaagctcagacagttggcagacgtccagttagctcatctcactcactctgattctcctgtgccacaggaaaagagggcctggaaagcgcagtgcatgctgggtgcatgaagggcagcctgggggacagactgttgtgggaacgtcccactgtcctggcctggagctaggccttgctgttcctcttctctgtgagcctagtggggctgctgcggttctcttgcagtttctggtggcatctcaggggaacacaaagctatgtctattccccaatataggacttttatgggctcggcagttagctgccatgtagaaggctcctaagcagtgggcatggtgaggtttcatctgattgagaagggggaatcctgtgtggaatgttgaactttcgccatggtctccatcgttctgggcgtaaattccctgggatcaagtaggaaaatgggcagaactgcttaggggaatgaaattgccatttttcgggtgaaacgccacacctccagggtcttaagagtcaggctccggctgtagtagctctgatgaaataggctatccactcgggatggcttactttttaaaagggtagggggaggggctggggaagatctgtcctgcaccatctgcctaattccttcctcacagtctgtagccatctgatatcctaggggaaaaggaaggccaggggttcacatagggccccagcgagtttcccaggagttagagggatgcgaggctaacaagttccaaaaacatctgccccgatgctctagtgtttggaggtgggcaggatggagaacagtgcctgtttgggggaaaacaggaaatcttgttaggcttgagtgaggtgtttgcttccttcttgcccagcgctgggttctctccacccagtaggttttctgttgtggtcccgtgggagaggccagactggattattcctcctttgctgatcctgggtcacacttcaccagccagggcttttgacggagacagcaaataggcctctgcaaatcaatcaaaggctgcaaccctatggcctcttggagacagatgatgactggcaaggactagagagcaggagtgcctggccaggtcggtcctgactctcctgactctccatcgctctgtccaaggagaacccggagaggctctgggctgattcagaggttactgctttatattcgtccaaactgtgttagtctaggcttaggacagcttcagaatctgacaccttgccttgctcttgccaccaggacacctatgtcaacaggccaaacagccatgcatctataaaggtcatcatcttctgccacctttactgggttctaaatgctctctgataattcagagagcattgggtctgggaagaggtaagaggaacactagaagctcagcatgacttaaacaggttgtagcaaagacagtttatcatcaactctttcagtggtaaactgtggtttccccaagctgcacaggaggccagaaaccacaagtatgatgactaggaagcctactgtcatgagagtggggagacaggcagcaaagcttatgaaggaggtacagaatattctttgcgttgtaagacagaatacgggtttaatctagtctaggcaccagatttttttcccgcttgataaggaaagctagcagaaagtttatttaaaccacttcttgagctttatcttttttgacaatatactggagaaactttgaagaacaagttcaaactgatacatatacacatatttttttgataatgtaaatacagtgaccatgttaacctaccctgcactgctttaagtgaacatactttgaaaaagcattatgttagctgagtgatggccaagttttttctctggacaggaatgtaaatgtcttactggaaatgacaagtttttgcttgatttttttttttaaacaaaaaatgaaatataacaagacaaacttatgataaagtatttgtcttgtagatcaggtgttttgttttgtttttttaattttaaaatgcaaccctgccccctccccagcaaagtcacagctccatttcagtaaaggttggagtcaatatgctctggttggcaggcaaccctgtagtcatggagaaaggtatttcaagatctagtccaatctttttctagagaaaaagataatctgaagctcacaaagatgaagtgacttcctcaaaatcacatggttcaggacagaaacaagattaaaacctggatccacagactgtgcgcctcagaaggaataatcggtaaattaagaattgctactcgaaggtgccagaatgacacaaaggacagaattcctttcccagttgttaccctagcaaggctagggagggcatgaacacaaacataagaactggtcttctacactttctctgaatcatttaggtttaagatgtaagtgaacaattctttctttctgccaagaaacaaagttttggatgagcttttatatatggaacttactccaacaggactgagggaccaaggaaacatgatgggggaggcagagagggcaagagtaaaactgtagcatagcttttgtcacggtcactagctgatccctcaggtctgctgcaaacacagcatggaggacacagatgactctttggtgttggtctttttgtctgcagtgaatgttcaacagtttgcccaggaactgggggatcatatatgtcttagtggacaggggtctgaagtacactggaatttactgagaaacttgtttgtaaaaactatagttaataattattgcattttcttacaaaaatatattttggaaaattgtatactgtcaattaaagtgtttttgtgtaaactggttaaaaaaaaa

SEQ ID NO: 439174 - DNA, 1482 bp, Homo sapiens
aaacgccgcccaggacgcagccgccgccgccgccgctcctctgccactggctctgcgccccagcccggctctgctgcagcggcagggaggaagagccgccgcagcgcgactcgggagccccgggccacagcctggcctccggagccacccacaggcctccccgggcggcgcccacgctcctaccgcccggacgcgcggatcctccgccggcaccgcagccacctgctcccggcccagaggcgacgacacgatgcgctgcgcgctggcgctctcggcgctgctgctactgttgtcaacgccgccgctgctgccgtcgtcgccgtcgccgtcgccgtcgccgtcgccctcccagaatgcaacccagactactacggactcatctaacaaaacagcaccgactccagcatccagtgtcaccatcatggctacagatacagcccagcagagcacagtccccacttccaaggccaacgaaatcttggcctcggtcaaggcgaccacccttggtgtatccagtgactcaccggggactacaaccctggctcagcaagtctcaggcccagtcaacactaccgtggctagaggaggcggctcaggcaaccctactaccaccatcgagagccccaagagcacaaaaagtgcagacaccactacagttgcaacctccacagccacagctaaacctaacaccacaagcagccagaatggagcagaagatacaacaaactctggggggaaaagcagccacagtgtgaccacagacctcacatccactaaggcagaacatctgacgacccctcaccctacaagtccacttagcccccgacaacccactttgacgcatcctgtggccaccccaacaagctcgggacatgaccatcttatgaaaatttcaagcagttcaagcactgtggctatccctggctacaccttcacaagcccggggatgaccaccaccctaccgtcatcggttatctcgcaaagaactcaacagacctccagtcagatgccagccagctctacggccccttcctcccaggagacagtgcagcccacgagcccggcaacggcattgagaacacctaccctgccagagaccatgagctccagccccacagcagcatcaactacccaccgataccccaaaacaccttctcccactgtggctcatgagagtaactgggcaaagtgtgaggatcttgagacacagacacagagtgagaagcagctcgtcctgaacctcacaggaaacaccctctgtgcagggggcgcttcggatgagaaattgatctcactgatatgccgagcagtcaaagccagctctacggccccttcctcccaggagacagtgcagcccacgagcccggcaacggcacttcagaacacctaccctgccagagaccatgagctccagccccacagcagcatcaactacccaccagataccccaaaacaccttctcccgtgccgcagagccggtgc

SEQ ID NO: 439175 - DNA, 219 bp, Homo sapiens
tcatcttttctcattaccctcgttttcccaatgacagcgtcatcggttatctcgcaaagaactcaacagacctccagtcagatgccagccagctctacggccccttcctcccaggagacagtgcagcccacgagcccggcaacggcattgagaacacctaccctgccagagaccatgagctccagccccacagcagcatcaactacccaccgatacccc

SEQ ID NO: 439176 - DNA, 2435 bp, Homo sapiens
gaaaccatggtcaggtggtctcttacctgttaaaatcaggagctgacaaagaaaagttggcgacatggtggcacccgtgctggagacttctcacgtgttttgctgcccaaaccgggtgcggggagtcctgaactggagctctgggcccagaggacttctggcctttggcacgtcctgctccgtggtgctctatgaccccctgaaaagggttgttgttaccaacttgaatggtcacaccgcccgagtcaattgcatacagtggatttgtaaacaggatggctccccttctactgaattagtttctggaggatctgataatcaagtgattcactgggaaatagaggataatcagcttttaaaagcagtgcatcttcaaggccatgaaggacctgtttatgcggtgcatgctgtttaccagaggaggacatcagatcctgcattatgtacactgatcgtttctgcagctgcagattctgctgttcgactctggtctaaaaagggtccagaagtaccaatattagcatgtggcaatgatgattgcagaattcacatatttgctcaacaaaatgatcagtttcagaaagtgctttctctctgtggacatgaggattggattagaggagtggaatgggcagcctttggtagagatcttttcctagcaagctgttcacaagattgcctgataagaatatggaagctgtatataaagtcaacatctttagaaactcaggatgacgataacataagactgaaagaaaatacttttaccatagaaaatgaaagtgttaaaatagcatttgctgttactctggagacagtgctagccggtcatgaaaactgggtaaatgcagttcactggcaacctgtgttttacaaagatggtgtcctacagcagccagtgagattattatctgcttccatggataaaaccatgattctctgggctccagatgaagagtcaggagtttggctagaacagagagagtggactccagagattgtcatttcaggacactttgatggtgtccaagacctagtctgggatccagaaggagaatttattatcactgttggtactgatcagacaactagactttttgctccatggaagagaaaagaccaatcacaggtgacttggcatgaaattgcaaggcctcagatacatgggtatgacctgaaatgtttggcaatgattaatcggtttcagtttgtatctggagcagatgaaaaagttcttcgggttttttctgcacctcggaattttgtggaaaatttttgtgccattacaggacaatcactgaatcatgtgctctgtaatcaagatagtgatcttccagaaggagccactgtccctgcattgggattatcaaataaagctgtctttcagggagatatagcttctcagccttctgatgaagaggagctgttaactagtactggttttgagtatcagcaggtggcctttcagccctccatacttactgagcctcccactgaggatcatcttctgcagaatactttgtggcctgaagttcaaaaactatatgggcacggttatgaaatattttgtgttacttgtaacagttcaaagactctgcttgcctcagcttgtaaggcagctaagaaagagcatgcagctatcattctttggaacactacatcttggaaacaggtgcagaatttagttttccacagtttgacagtcacgcagatggccttctcacctaatgagaagttcttactagctgtttccagagatcgaacctggtcattgtggaaaaagcaggatacaatctcacctgagttcgagccagtttttagtctttttgccttcaccaacaaaattacttctgtgcacagtagaattatttggtcttgtgattggagtcctgacagcaagtatttcttcactgggagtcgagacaaaaaggtggttgtctggggtgagtgcgactccactgatgactgtattgagcacaacattggcccctgctcctcagtcctggacgtgggtggggctgtgacagctgtcagcgtctgcccagtgctccacccttctcaacgatacgtggttgcagtaggattggagtgtggaaagatttgcttatatacctggaaaaagactgatcaagttccagaaataaatgactggacccactgtgtagaaacaagtcaaagccaaagtcatacactggctatcagaaaattatgctggaagaattgcagtggaaaaactgaacagaaggaagcagaaggtgctgagtggttacactttgcaagctgtggtgaagatcacactgtgaagatacacagagtcaataaatgtgcactgtaatggacttaataactacatgcttgcagtcactggtatcttaaaatattatcatgtaaacaggtcatctttaccttcataactgaattgagtttctgggttt

SEQ ID NO: 439177 - DNA, 2471 bp, Homo sapiens
gaaaccatggtcaggtggtctcttacctgttaaaatcaggagctgacaaagaaaagttggcgacatggtggcacccgtgctggagacttctcacgtgttttgctgcccaaaccgggtgcggggagtcctgaactggagctctgggcccagaggacttctggcctttggcacgtcctgctccgtggtgctctatgaccccctgaaaagggttgttgttaccaacttgaatggtcacaccgcccgagtcaattgcatacagtggatttgtaaacaggatggctccccttctactgaattagtttctggaggatctgataatcaagtgattcactgggaaatagaggataatcagcttttaaaagcagtgcatcttcaaggccatgaaggacctgtttatgcggtgcatgctgtttaccagaggaggacatcagatcctgcattatgtacactgatcgtttctgcagctgcagattctgctgttcgactctggtctaaaaagggtccagaagtaccaatattagcatgtggcaatgatgattgcagaattcacatatttgctcaacaaaatgatcagtttcagaaagtgctttctctctgtggacatgaggattggattagaggagtggaatgggcagcctttggtagagatcttttcctagcaagctgttcacaagattgcctgataagaatatggaagctgtatataaagtcaacatctttagaaactcaggatgacgataacataagactgaaagaaaatacttttaccatagaaaatgaaagtgttaaaatagcatttgctgttactctggagacagtgctagccggtcatgaaaactgggtaaatgcagttcactggcaacctgtgttttacaaagatggtgtcctacagcagccagtgagattattatctgcttccatggataaaaccatgattctctgggctccagatgaagagtcaggagtttggctagaacaggttcgagtaggtgaagtaggtgggaatactttgggattttatgattgccagttcaatgaagatggctccatgatcattgctcatgctttccacggagcgttgcacctttggaaacagaatacagttaacccaagagagtggactccagagattgtcatttcaggacactttgatggtgtccaagacctagtctgggatccagaaggagaatttattatcactgttggtactgatcagacaactagactttttgctccatggaagagaaaagaccaatcacaggtgacttggcatgaaattgcaaggcctcagatacatgggtatgacctgaaatgtttggcaatgattaatcggtttcagtttgtatctggagcagatgaaaaagttcttcgggttttttctgcacctcggaattttgtggaaaatttttgtgccattacaggacaatcactgaatcatgtgctctgtaatcaagatagtgatcttccagaaggagccactgtccctgcattgggattatcaaataaagctgtctttcagggagatatagcttctcagccttctgatgaagaggagctgttaactagtactggttttgagtatcagcaggtggcctttcagccctccatacttactgagcctcccactgaggatcatcttctgcagaatactttgtggcctgaagttcaaaaactatatgggcacggttatgaaatattttgtgttacttgtaacagttcaaagactctgcttgcctcagcttgtaaggcagctaagaaagagcatgcagctatcattctttggaacactacatcttggaaacaggtgcagaatttagttttccacagtttgacagtcacgcagatggccttctcacctaatgagaagttcttactagctgtttccagagatcgaacctggtcattgtggaaaaagcaggatacaatctcacctgagttcgagccagtttttagtctttttgccttcaccaacaaaattacttctgtgcacagtagaattatttggtcttgtgattggagtcctgacagcaagtatttcttcactgggagtcgagacaaaaaggtggttgtctggggtgagtgcgactccactgatgactgtattgagcacaacattggcccctgctcctcagtcctggacgtgggtggggctgtgacagctgtcagcgtctgcccagtgctccacccttctcaacgatacgtggttgcagtaggattggagtgtggaaagatttgcttatatacctggaaaaagactgatcaagttccagaaataaatgactggacccactgtgtagaaacaagtcaaagccaaagtcatacactggctatcagaaaattatgctggaagaattgcagtggaaaaactgaacagaaggaagcagaaggtgctgagtggttacactttgcaagctgtggtgaagatcacactgtgaagatacacagagtcaataaatgtgcactgtaatgga

SEQ ID NO: 439178 - DNA, 1002 bp, Homo sapiens
attctcctgcctcagcctcccaagtaggtgggattacaggcatgcgccgtcacgcctggctcctttttttatatttttaatagagatggggtttcaccatgttggtcaggcaggtcttaatctcctgacctcaagtgatccatctgcctcgtcctcccaaagtgctgggattacaggcgtatgccaccgtgcctggcctgagttactgtcttttgcaaaatgcttatgtttctcataataatttttaaattgatagaacctaatgattcagaatgtaaaatacaggttaggaatggggctcaaagattcttacttcaccaaatctaggactataatactttctctgtaacaagcatcttcagtggaacaagggtccctacagccagctggggaaacactggctcatgggccttgccagcagaggacacagataaatctgtgtgcagcccctgtaaagaggaggctccttgaggacacaggagagcagtgcagcatgtcctgggctgatgcctgcagagtcttttgtaaggcagggacagttgggacactgtgaagaactactttagagcaatgacgaagataacaatttcatgctaagttaatcactgttgtccccctcccttaaaaacagatacgtggttgcagtaggattggagtgtggaaagatttgcttatatacctggaaaaagactgatcaagttccagaaataaatgactggacccactgtgtagaaacaagtcaaagccaaagtcatacactggctatcagaaaattatgctggaagaattgcagtggaaaaactgaacagaaggaagcagaaggtgctgagtggttacactttgcaagctgtggtgaagatcacactgtgaagatacacagagtcaataaatgtgcactgtaatggacttaataactacatgcttgcagtcactggtatcttaaaatattatcatgtaaacaggtcatctttaccttcataactgaattgagtttctgggttt

SEQ ID NO: 439179 - DNA, 1193 bp, Homo sapiens
aatttttgtatttttagtagagactgggtttcaccgttggccaggcgggtctcaaactcctcgtctcaggtgatctgcttgcctcggcctcccaaagtgctgggattacaggcgtgagccactgcgcccagcctgagtttcattttttaagtcacatagcagtagtccttatttcagtgctagaccctttgaaatgcgatgaaagctatatggacccttcgctttgttatataacatatgcacacatacccagaattttgcacatatgttcagagattcctagacctgcagacctgcctctgtgtgtcccaatttaagaacctctgttctttcttcatgactggatttgcccaattttgtgttattttgggacttaatttgtccctctttgggacatttccttatttattgccctcttcagagagtagatgtagaaaataaagagaggaaacctagattacttaatttttattttaacattttctatagatagcataccacgccaagtgtgctctgtcttgatccccttctttctagcatctgccagacattgtagagtttcgcaagcagttgtaggtttgagctgcagccagtcatttcttttattctttaaaagtacatagatttgtctttttagggctttactgaaagtaaaatatcctgacatttaaactgacagatgtaggaggtaaaaaatagagttctgaaacatttgaatttatgtgacagctgaagtcacgagatgagggatgtatgtcccccagggaggatgcagaaagaagaaaagggtactggaaacagcatgtcagtggtgccagctgagggctggaggcagccaggagagttgggagcctgggtgctgggtggagagaggttaacagggaagacatgggaagtattgtgaaggctggtgtgagcaggggactactccagccctgttggaacatagagccatttggcagattgacaatgcagtgacagctgtatataataaatgtgttgaaaggaggaaggtgaggattttcttggtgggagtttatgctgttatttaacatattttgcttccaaggggttaagatgttttacctaaatggaggtttctaggtcagtgctatacaatatttctaatctgtgttttatagtgtgagctacatatgtaattttaaaattttcaagtagccacataataaagg

SEQ ID NO: 439180 - DNA, 323 bp, Homo sapiens
atattgtcgacccacgcgtccgcaaaaaataaatgactggaccccctgtgtagaaccaagtcaaagccaaagtcatacactggctatcagaaaattatgctggaagaattgcagtggaaaaactgaacagaaggaagcagaaggtgctgagtggttacactttgcaagctgtggtgaagatcacactgtgaagatacacagagtcaataaatgtgcactgtaatggacttaataactacatgcttgcagtcactggtatcttaaaatattatcatgtaaacaggtcatctttaccttcataactgaattgagtttctgggttt

SEQ ID NO: 439181 - DNA, 452 bp, Homo sapiens
gaatgtaatgatgcattttttaaaataccagagcaaatactttgttttatctttgccgatgaaactgtagtacatggctagaaaccttgcaaagagaaggctttacagtgtgtgatctgtctgtattaggtggttgtctggggtgagtgcgactccactgatgactgtattgagcacaacattggcccctgctcctcagtcctggacgtgggtggggctgtgacagctgtcagcgtctgcccagtgctccacccttctcaacggtcagtctctgtgtggggcttagttttaagaggaccacttggtttcttaatatgtagccctcatgtcatttcatttgtgaattctcctagcctctgagttactgtcttttttttctttttttttttttggtttgagatggagtctcactctgtcgcccaggctggaatgcagtggcgtgatctctgctc

SEQ ID NO: 439182 - DNA, 2618 bp, Homo sapiens
gcgcgtctcttgtttgtgcggctgaccagttggcgacatggtggcacccgtgctggagacttctcacgtgttttgctgcccaaaccgggtgcggggagtcctgaactggagctctgggcccagaggacttctggcctttggcacgtcctgctccgtggtgctctatgaccccctgaaaagggttgttgttaccaacttgaatggtcacaccgcccgagtcaattgcatacagtggatttgtaaacaggatggctccccttctactgaattagtttctggaggatctgataatcaagtgattcactgggaaatagaggataatcagcttttaaaagcagtgcatcttcaaggccatgaaggacctgtttatgcggtgcatgctgtttaccagaggaggacatcagatcctgcattatgtacactgatcgtttctgcagctgcagattctgctgttcgactctggtctaaaaagggtccagaagtaatgtgccttcagactttaaactttggaaatggatttgctttggctctctgcttatcttttttgccaaatactgatgtaccaatattagcatgtggcaatgatgattgcagaattcacatatttgctcaacaaaatgatcagtttcagaaagtgctttctctctgtggacatgaggattggattagaggagtggaatgggcagcctttggtagagatcttttcctagcaagctgttcacaagattgcctgataagaatatggaagctgtatataaagtcaacatctttagaaactcaggatgacgataacataagactgaaagaaaatacttttaccatagaaaatgaaagtgttaaaatagcatttgctgttactctggagacagtgctagccggtcatgaaaactgggtaaatgcagttcactggcaacctgtgttttacaaagatggtgtcctacagcagccagtgagattattatctgcttccatggataaaaccatgattctctgggctccagatgaagagtcaggagtttggctagaacaggttcgagtaggtgaagtaggtgggaatactttgggattttatgattgccagttcaatgaagatggctccatgatcattgctcatgctttccacggagcgttgcacctttggaaacagaatacagttaacccaagagagtggactccagagattgtcatttcaggacactttgatggtgtccaagacctagtctgggatccagaaggagaatttattatcactgttggtactgatcagacaactagactttttgctccatggaagagaaaagaccaatcacaggtgacttggcatgaaattgcaaggcctcagatacatgggtatgacctgaaatgtttggcaatgattaatcggtttcagtttgtatctggagcagatgaaaaagttcttcgggttttttctgcacctcggaattttgtggaaaatttttgtgccattacaggacaatcactgaatcatgtgctctgtaatcaagatagtgatcttccagaaggagccactgtccctgcattgggattatcaaataaagctgtctttcagggagatatagcttctcagccttctgatgaagaggagctgttaactagtactggttttgagtatcagcaggtggcctttcagccctccatacttactgagcctcccactgaggatcatcttctgcagaatactttgtggcctgaagttcaaaaactatatgggcacggttatgaaatattttgtgttacttgtaacagttcaaagactctgcttgcctcagcttgtaaggcagctaagaaagagcatgcagctatcattctttggaacactacatcttggaaacaggtgcagaatttagttttccacagtttgacagtcacgcagatggccttctcacctaatgagaagttcttactagctgtttccagagatcgaacctggtcattgtggaaaaagcaggatacaatctcacctgagttcgagccagtttttagtctttttgccttcaccaacaaaattacttctgtgcacagtagaattatttggtcttgtgattggagtcctgacagcaagtatttcttcactgggagtcgagacaaaaaggtggttgtctggggtgagtgcgactccactgatgactgtattgagcacaacattggcccctgctcctcagtcctggacgtgggtggggctgtgacagctgtcagcgtctgcccagtgctccacccttctcaacgatacgtggttgcagtaggattggagtgtggaaagatttgcttatatacctggaaaaagactgatcaagttccagaaataaatgactggacccactgtgtagaaacaagtcaaagccaaagtcatacactggctatcagaaaattatgctggaagaattgcagtggaaaaactgaacagaaggaagcagaaggtgctgagtggttacactttgcaagctgtggtgaagatcacactgtgaagatacacagagtcaataaatgtgcactgtaatggacttaataactacatgcttgcagtcactggtatcttaaaatattatcatgtaaacaggtcatctttaccttcataactgaattgagtttctgggttt

SEQ ID NO: 439183 - DNA, 2560 bp, Homo sapiens
gcgcgtctcttgtttgtgcggctgaccagttggcgacatggtggcacccgtgctggagacttctcacgtgttttgctgcccaaaccgggtgcggggagtcctgaactggagctctgggcccagaggacttctggcctttggcacgtcctgctccgtggtgctctatgaccccctgaaaagggttgttgttaccaacttgaatggtcacaccgcccgagtcaattgcatacagtggatttgtaaacaggatggctccccttctactgaattagtttctggaggatctgataatcaagtgattcactgggaaatagaggataatcagcttttaaaagcagtgcatcttcaaggccatgaaggacctgtttatgcggtgcatgctgtttaccagaggaggacatcagatcctgcattatgtacactgatcgtttctgcagctgcagattctgctgttcgactctggtctaaaaagggtccagaagtaatgtgccttcagactttaaactttggaaatggatttgctttggctctctgcttatcttttttgccaaatactgatgtaccaatattagcatgtggcaatgatgattgcagaattcacatatttgctcaacaaaatgatcagtttcagaaagtgctttctctctgtggacatgaggattggattagaggagtggaatgggcagcctttggtagagatcttttcctagcaagctgttcacaagattgcctgataagaatatggaagctgtatataaagtcaacatctttagaaactcaggatgacgataacataagactgaaagaaaatacttttaccatagaaaatgaaagtgttaaaatagcatttgctgttactctggagacagtgctagccggtcatgaaaactgggtaaatgcagttcactggcaacctgtgttttacaaagatggtgtcctacagcagccagtgagattattatctgcttccatggataaaaccatgattctctgggctccagatgaagagtcaggagtttggctagaacaggttcgagtaggtgaagtaggtgggaatactttgggattttatgattgccagttcaatgaagatggctccatgatcattgctcatgctttccacggagcgttgcacctttggaaacagaatacagttaacccaagagagtggactccagagattgtcatttcaggacactttgatggtgtccaagacctagtctgggatccagaaggagaatttattatcactgttggtactgatcagacaactagactttttgctccatggaagagaaaagaccaatcacaggtgacttggcatgaaattgcaaggcctcagatacatgggtatgacctgaaatgtttggcaatgattaatcggtttcagtttgtatctggagcagatgaaaaagttcttcgggttttttctgcacctcggaattttgtggaaaatttttgtgccattacaggacaatcactgaatcatgtgctctgtaatcaagatagtgatcttccagaaggagccactgtccctgcattgggattatcaaataaagctgtctttcagggagatatagcttctcagccttctgatgaagaggagctgttaactagtactggttttgagtatcagcaggtggcctttcagccctccatacttactgatatgggcacggttatgaaatattttgtgttacttgtaacagttcaaagactctgcttgcctcagcttgtaaggcagctaagaaagagcatgcagctatcattctttggaacactacatcttggaaacaggtgcagaatttagttttccacagtttgacagtcacgcagatggccttctcacctaatgagaagttcttactagctgtttccagagatcgaacctggtcattgtggaaaaagcaggatacaatctcacctgagttcgagccagtttttagtctttttgccttcaccaacaaaattacttctgtgcacagtagaattatttggtcttgtgattggagtcctgacagcaagtatttcttcactgggagtcgagacaaaaaggtggttgtctggggtgagtgcgactccactgatgactgtattgagcacaacattggcccctgctcctcagtcctggacgtgggtggggctgtgacagctgtcagcgtctgcccagtgctccacccttctcaacgatacgtggttgcagtaggattggagtgtggaaagatttgcttatatacctggaaaaagactgatcaagttccagaaataaatgactggacccactgtgtagaaacaagtcaaagccaaagtcatacactggctatcagaaaattatgctggaagaattgcagtggaaaaactgaacagaaggaagcagaaggtgctgagtggttacactttgcaagctgtggtgaagatcacactgtgaagatacacagagtcaataaatgtgcactgtaatggacttaataactacatgcttgcagtcactggtatcttaaaatattatcatgtaaacaggtcatctttaccttcataactgaattgagtttctgggttt

SEQ ID NO: 439184 - DNA, 2593 bp, Homo sapiens
gcgcgtctcttgtttgtgcggctgaccagttggcgacatggtggcacccgtgctggagacttctcacgtgttttgctgcccaaaccgggtgcggggagtcctgaactggagctctgggcccagaggacttctggcctttggcacgtcctgctccgtggtgctctatgaccccctgaaaagggttgttgttaccaacttgaatggtcacaccgcccgagtcaattgcatacagtggatttgtaaacaggatggctccccttctactgaattagtttctggaggatctgataatcaagtgattcactgggaaatagaggataatcaggccatgaaggacctgtttatgcggtgcatgctgtttaccagaggaggacatcagatcctgcattatgtacactgatcgtttctgcagctgcagattctgctgttcgactctggtctaaaaagggtccagaagtaatgtgccttcagactttaaactttggaaatggatttgctttggctctctgcttatcttttttgccaaatactgatgtaccaatattagcatgtggcaatgatgattgcagaattcacatatttgctcaacaaaatgatcagtttcagaaagtgctttctctctgtggacatgaggattggattagaggagtggaatgggcagcctttggtagagatcttttcctagcaagctgttcacaagattgcctgataagaatatggaagctgtatataaagtcaacatctttagaaactcaggatgacgataacataagactgaaagaaaatacttttaccatagaaaatgaaagtgttaaaatagcatttgctgttactctggagacagtgctagccggtcatgaaaactgggtaaatgcagttcactggcaacctgtgttttacaaagatggtgtcctacagcagccagtgagattattatctgcttccatggataaaaccatgattctctgggctccagatgaagagtcaggagtttggctagaacaggttcgagtaggtgaagtaggtgggaatactttgggattttatgattgccagttcaatgaagatggctccatgatcattgctcatgctttccacggagcgttgcacctttggaaacagaatacagttaacccaagagagtggactccagagattgtcatttcaggacactttgatggtgtccaagacctagtctgggatccagaaggagaatttattatcactgttggtactgatcagacaactagactttttgctccatggaagagaaaagaccaatcacaggtgacttggcatgaaattgcaaggcctcagatacatgggtatgacctgaaatgtttggcaatgattaatcggtttcagtttgtatctggagcagatgaaaaagttcttcgggttttttctgcacctcggaattttgtggaaaatttttgtgccattacaggacaatcactgaatcatgtgctctgtaatcaagatagtgatcttccagaaggagccactgtccctgcattgggattatcaaataaagctgtctttcagggagatatagcttctcagccttctgatgaagaggagctgttaactagtactggttttgagtatcagcaggtggcctttcagccctccatacttactgagcctcccactgaggatcatcttctgcagaatactttgtggcctgaagttcaaaaactatatgggcacggttatgaaatattttgtgttacttgtaacagttcaaagactctgcttgcctcagcttgtaaggcagctaagaaagagcatgcagctatcattctttggaacactacatcttggaaacaggtgcagaatttagttttccacagtttgacagtcacgcagatggccttctcacctaatgagaagttcttactagctgtttccagagatcgaacctggtcattgtggaaaaagcaggatacaatctcacctgagttcgagccagtttttagtctttttgccttcaccaacaaaattacttctgtgcacagtagaattatttggtcttgtgattggagtcctgacagcaagtatttcttcactgggagtcgagacaaaaaggtggttgtctggggtgagtgcgactccactgatgactgtattgagcacaacattggcccctgctcctcagtcctggacgtgggtggggctgtgacagctgtcagcgtctgcccagtgctccacccttctcaacgatacgtggttgcagtaggattggagtgtggaaagatttgcttatatacctggaaaaagactgatcaagttccagaaataaatgactggacccactgtgtagaaacaagtcaaagccaaagtcatacactggctatcagaaaattatgctggaagaattgcagtggaaaaactgaacagaaggaagcagaaggtgctgagtggttacactttgcaagctgtggtgaagatcacactgtgaagatacacagagtcaataaatgtgcactgtaatggacttaataactacatgcttgcagtcactggtatcttaaaatattatcatgtaaacaggtcatctttaccttcataactgaattgagtttctgggttt

SEQ ID NO: 439185 - DNA, 2039 bp, Homo sapiens
  misc_feature (24)..(24): n is a, c, g, or t
  misc_feature (28)..(28): n is a, c, g, or t
aacggctaggtagaggctgggtgntganttgtcacaaaatgatcagtttcagaaagtgctttctctctgtggacatgaggattggattagaggagtggaatgggcagcctttggtagagatcttttcctagcaagctgttcacaagattgcctgataagaatatggaagctgtatataaagtcaacatctttagaaactcaggatgacgataacataagactgaaagaaaatacttttaccatagaaaatgaaagtgttaaaatagcatttgctgttactctggagacagtgctagccggtcatgaaaactgggtaaatgcagttcactggcaacctgtgttttacaaagatggtgtcctacagcagccagtgagattattatctgcttccatggataaaaccatgattctctgggctccagatgaagagtcaggagtttggctagaacaggttcgagtaggtgaagtaggtgggaatactttgggattttatgattgccagttcaatgaagatggctccatgatcattgctcatgctttccacggagcgttgcacctttggaaacagaatacagttaacccaagagagtggactccagagattgtcatttcaggacactttgatggtgtccaagacctagtctgggatccagaaggagaatttattatcactgttggtactgatcagacaactagactttttgctccatggaagagaaaagaccaatcacaggtgacttggcatgaaattgcaaggcctcagatacatgggtatgacctgaaatgtttggcaatgattaatcggtttcagtttgtatctggagcagatgaaaaagttcttcgggttttttctgcacctcggaattttgtggaaaatttttgtgccattacaggacaatcactgaatcatgtgctctgtaatcaagatagtgatcttccagaaggagccactgtccctgcattgggattatcaaataaagctgtctttcagggagatatagcttctcagccttctgatgaagaggagctgttaactagtactggttttgagtatcagcaggtggcctttcagccctccatacttactgagcctcccactgaggatcatcttctgcagaatactttgtggcctgaagttcaaaaactatatgggcacggttatgaaatattttgtgttacttgtaacagttcaaagactctgcttgcctcagcttgtaaggcagctaagaaagagcatgcagctatcattctttggaacactacatcttggaaacaggtgcagaatttagttttccacagtttgacagtcacgcagatggccttctcacctaatgagaagttcttactagctgtttccagagatcgaacctggtcattgtggaaaaagcaggatacaatctcacctgagttcgagccagtttttagtctttttgccttcaccaacaaaattacttctgtgcacagtagaattatttggtcttgtgattggagtcctgacagcaagtatttcttcactgggagtcgagacaaaaaggtggttgtctggggtgagtgcgactccactgatgactgtattgagcacaacattggcccctgctcctcagtcctggacgtgggtggggctgtgacagctgtcagcgtctgcccagtgctccacccttctcaacgatacgtggttgcagtaggattggagtgtggaaagatttgcttatatacctggaaaaagactgatcaagttccagaaataaatgactggacccactgtgtagaaacaagtcaaagccaaagtcatacactggctatcagaaaattatgctggaagaattgcagtggaaaaactgaacagaaggaagcagaaggtgctgagtggttacactttgcaagctgtggtgaagatcacactgtgaagatacacagagtcaataaatgtgcactgtaatggacttaataactacatgcttgcagtcactggtatcttaaaatattatcatgtaaacaggtcatctttaccttcataactgaattgagtttctgggttt

SEQ ID NO: 439186 - DNA, 2569 bp, Homo sapiens
  misc_feature (2534)..(2534): n is a, c, g, or t
gcgcgtctcttgtttgtgcggctgaccagttggcgacatggtggcacccgtgctggagacttctcacgtgttttgctgcccaaaccgggtgcggggagtcctgaactggagctctgggcccagaggacttctggcctttggcacgtcctgctccgtggtgctctatgaccccctgaaaagggttgttgttaccaacttgaatggtcacaccgcccgagtcaattgcatacagtggatttgtaaacaggatggctccccttctactgaattagtttctggaggatctgataatcaagtgattcactgggaaatagaggataatcagcttttaaaagcagtgcatcttcaaggccatgaaggacctgtttatgcggtgcatgctgtttaccagaggaggacatcagatcctgcattatgtacactgatcgtttctgcagctgcagattctgctgttcgactctggtctaaaaagggtccagaagtaatgtgccttcagactttaaactttggaaatggatttgctttggctctctgcttatcttttttgccaaatactgatgtaccaatattagcatgtggcaatgatgattgcagaattcacatatttgctcaacaaaatgatcagtttcagaaagtgctttctctctgtggacatgaggattggattagaggagtggaatgggcagcctttggtagagatcttttcctagcaagctgttcacaagattgcctgataagaatatggaagctgtatataaagtcaacatctttagaaactcaggatgacgataacataagactgaaagaaaatacttttaccatagaaaatgaaagtgttaaaatagcatttgctgttactctggagacagtgctagccggtcatgaaaactgggtaaatgcagttcactggcaacctgtgttttacaaagatggtgtcctacagcagccagtgagattattatctgcttccatggataaaaccatgattctctgggctccagatgaagagtcaggagtttggctagaacaggttcgagtaggtgaagtaggtgggaatactttgggattttatgattgccagttcaatgaagatggctccatgatcattgctcatgctttccacggagcgttgcacctttggaaacagaatacagttaacccaagagagtggactccagagattgtcatttcaggacactttgatggtgtccaagacctagtctgggatccagaaggagaatttattatcactgttggtactgatcagacaactagactttttgctccatggaagagaaaagaccaatcacaggtgacttggcatgaaattgcaaggcctcagatacatgggtatgacctgaaatgtttggcaatgattaatcggtttcagtttgtatctggagcagatgaaaaagttcttcgggttttttctgcacctcggaattttgtggaaaatttttgtgccattacaggacaatcactgaatcatgtgctctgtaatcaagatagtgatcttccagaaggagccactgtccctgcattgggattatcaaataaagctgtctttcagggagatatagcttctcagccttctgatgaagaggagctgttaactagtactggttttgagtatcagcaggtggcctttcagccctccatacttactgagcctcccactgaggatcatcttctgcagaatactttgtggcctgaagttcaaaaactatatgggcacggttatgaaatattttgtgttacttgtaacagttcaaagactctgcttgcctcagcttgtaaggcagctaagaaagagcatgcagctatcattctttggaacactacatcttggaaacaggtgcagaatttagttttccacagtttgacagtcacgcagatggccttctcacctaatgagaagttcttactagctgtttccagagatcgaacctggtcattgtggaaaaagcaggatacaatctcacctgagttcgagccagtttttagtctttttgccttcaccaacaaaattacttctgtgcacagtagaattatttggtcttgtgattggagtcctgacagcaagtatttcttcactgggagtcgagacaaaaaggtggttgtctggggtgagtgcgactccactgatgactgtattgagcacaacattggcccctgctcctcagtcctggacgtgggtggggctgtgacagctgtcagcgtctgcccagtgctccacccttctcaacgatacgtggttgcagtaggattggagtgtggaaagatttgcttatatacctggaaaaagactgatcaagttccagaaataaatgactggacccactgtgtagaaacaagtcaaagccaaagtcatacactggctatcagaaaattatgctggaagaattgcagtggaaaaactgaacagaaggaagcagaaggtgctgagtggttacactttgcaagctgtggtgaagatcacactgtgaagatacacagagtcaataaatgtgcactgtaatggaaaaaccaaaaangataatacttaatgttattattattaaaaaaaaaa

SEQ ID NO: 439187 - DNA, 1476 bp, Homo sapiens
tatgagcacttccattgcagagagagtggactccagagattgtcatttcaggacactttgatggtgtccaagacctagtctgggatccagaaggagaatttattatcactgttggtactgatcagacaactagactttttgctccatggaagagaaaagaccaatcacaggtgacttggcatgaaattgcaaggcctcagatacatgggtatgacctgaaatgtttggcaatgattaatcggtttcagtttgtatctggagcagatgaaaaagttcttcgggttttttctgcacctcggaattttgtggaaaatttttgtgccattacaggacaatcactgaatcatgtgctctgtaatcaagatagtgatcttccagaaggagccactgtccctgcattgggattatcaaataaagctgtctttcagggagatatagcttctcagccttctgatgaagaggagctgttaactagtactggttttgagtatcagcaggtggcctttcagccctccatacttactgagcctcccactgaggatcatcttctgcagaatactttgtggcctgaagttcaaaaactatatgggcacggttatgaaatattttgtgttacttgtaacagttcaaagactctgcttgcctcagcttgtaaggcagctaagaaagagcatgcagctatcattctttggaacactacatcttggaaacaggtgcagaatttagttttccacagtttgacagtcacgcagatggccttctcacctaatgagaagttcttactagctgtttccagagatcgaacctggtcattgtggaaaaagcaggatacaatctcacctgagttcgagccagtttttagtctttttgccttcaccaacaaaattacttctgtgcacagtagaattatttggtcttgtgattggagtcctgacagcaagtatttcttcactgggagtcgagacaaaaaggtggttgtctggggtgagtgcgactccactgatgactgtattgagcacaacattggcccctgctcctcagtcctggacgtgggtggggctgtgacagctgtcagcgtctgcccagtgctccacccttctcaacgatacgtggttgcagtaggattggagtgtggaaagatttgcttatatacctggaaaaagactgatcaagttccagaaataaatgactggacccactgtgtagaaacaagtcaaagccaaagtcatacactggctatcagaaaattatgctggaagaattgcagtggaaaaactgaacagaaggaagcagaaggtgctgagtggttacactttgcaagctgtggtgaagatcacactgtgaagatacacagagtcaataaatgtgcactgtaatggacttaataactacatgcttgcagtcactggtatcttaaaatattatcatgtaaacaggtcatctttaccttcataactgaattgagtttctgggttt

SEQ ID NO: 439188 - DNA, 2470 bp, Homo sapiens
gcgcgtctcttgtttgtgcggctgaccagttggcgacatggtggcacccgtgctggagacttctcacgtgttttgctgcccaaaccgggtgcggggagtcctgaactggagctctgggcccagaggacttctggcctttggcacgtcctgctccgtggtgctctatgaccccctgaaaagggttgttgttaccaacttgaatggtcacaccgcccgagtcaattgcatacagtggatttgtaaacaggatggctccccttctactgaattagtttctggaggatctgataatcaagtgattcactgggaaatagaggataatcagcttttaaaagcagtgcatcttcaaggccatgaaggacctgtttatgcggtgcatgctgtttaccagaggaggacatcagatcctgcattatgtacactgatcgtttctgcagctgcagattctgctgttcgactctggtctaaaaagggtccagaagtaatgtgccttcagactttaaactttggaaatggatttgctttggctctctgcttatcttttttgccaaatactgatgtaccaatattagcatgtggcaatgatgattgcagaattcacatatttgctcaacaaaatgatcagtttcagaaagtgctttctctctgtggacatgaggattggattagaggagtggaatgggcagcctttggtagagatcttttcctagcaagctgttcacaagattgcctgataagaatatggaagctgtatataaagtcaacatctttagaaactcaggatgacgataacataagactgaaagaaaatacttttaccatagaaaatgaaagtgttaaaatagcatttgctgttactctggagacagtgctagccggtcatgaaaactgggtaaatgcagttcactggcaacctgtgttttacaaagatggtgtcctacagcagccagtgagattattatctgcttccatggataaaaccatgattctctgggctccagatgaagagtcaggagtttggctagaacaggttcgagtaggtgaagtaggtgggaatactttgggattttatgattgccagttcaatgaagatggctccatgatcattgctcatgctttccacggagcgttgcacctttggaaacagaatacagttaacccaagagagtggactccagagattgtcatttcaggacactttgatggtgtccaagacctagtctgggatccagaaggagaatttattatcactgttggtactgatcagacaactagactttttgctccatggaagagaaaagaccaatcacaggtgacttggcatgaaattgcaaggcctcagatacatgggtatgacctgaaatgtttggcaatgattaatcggtttcagtttgtatctggagcagatgaaaaagttcttcgggttttttctgcacctcggaattttgtggaaaatttttgtgccattacaggacaatcactgaatcatgtgctctgtaatcaagatagtgatcttccagaaggagccactgtccctgcattgggattatcaaataaagctgtctttcagggagatatagcttctcagccttctgatgaagaggagctgttaactagtactggttttgagtatcagcaggtggcctttcagccctccatacttactgagcctcccactgaggatcatcttctgcagaatactttgtggcctgaagttcaaaaactatatgggcacggttatgaaatattttgtgttacttgtaacagttcaaagactctgcttgcctcagcttgtaaggcagctaagaaagagcatgcagctatcattctttggaacactacatcttggaaacaggtgcagaatttagttttccacagtttgacagtcacgcagatggccttctcacctaatgagaagttcttactagctgtttccagagatcgaacctggtcattgtggaaaaagcaggatacaatctcacctgagttcgtagaattatttggtcttgtgattggagtcctgacagcaagtatttcttcactgggagtcgagacaaaaaggtggttgtctggggtgagtgcgactccactgatgactgtattgagcacaacattggcccctgctcctcagtcctggacgtgggtggggctgtgacagctgtcagcgtctgcccagtgctccacccttctcaacgatacgtggttgcagtaggattggagtgtggaaagatttgcttatatacctggaaaaagactgatcaagttccagaaataaatgactggacccactgtgtagaaacaagtcaaagccaaagtcatacactggctatcagaaaattatgctggaagaattgcagtggaaaaactgaacagaaggaagcagaaggtgctgagtggttacactttgcaagctgtggtgaagatcacactgtgaagatacacagagtcaataaatgtgcactgtaatgga

SEQ ID NO: 439189 - DNA, 3202 bp, Homo sapiens
gcgcgtctcttgtttgtgcggctgaccagttggcgacatggtggcacccgtgctggagacttctcacgtgttttgctgcccaaaccgggtgcggggagtcctgaactggagctctgggcccagaggacttctggcctttggcacgtcctgctccgtggtgctctatgaccccctgaaaagggttgttgttaccaacttgaatggtcacaccgcccgagtcaattgcatacagtggatttgtaaacaggatggctccccttctactgaattagtttctggaggatctgataatcaagtgattcactgggaaatagaggataatcagcttttaaaagcagtgcatcttcaaggccatgaaggacctgtttatgcggtgcatgctgtttaccagaggaggacatcagatcctgcattatgtacactgatcgtttctgcagctgcagattctgctgttcgactctggtctaaaaagggtccagaagtaatgtgccttcagactttaaactttggaaatggatttgctttggctctctgcttatcttttttgccaaatactgatgtaccaatattagcatgtggcaatgatgattgcagaattcacatatttgctcaacaaaatgatcagtttcagaaagtgctttctctctgtggacatgaggattggattagaggagtggaatgggcagcctttggtagagatcttttcctagcaagctgttcacaagattgcctgataagaatatggaagctgtatataaagtcaacatctttagaaactcaggatgacgataacataagactgaaagaaaatacttttaccatagaaaatgaaagtgttaaaatagcatttgctgttactctggagacagtgctagccggtcatgaaaactgggtaaatgcagttcactggcaacctgtgttttacaaagatggtgtcctacagcagccagtgagattattatctgcttccatggataaaaccatgattctctgggctccagatgaagagtcaggagtttggctagaacaggttcgagtaggtgaagtaggtgggaatactttgggattttatgattgccagttcaatgaagatggctccatgatcattgctcatgctttccacggagcgttgcacctttggaaacagaatacagttaacccaagagagtggactccagagattgtcatttcaggacactttgatggtgtccaagacctagtctgggatccagaaggagaatttattatcactgttggtactgatcagacaactagactttttgctccatggaagagaaaagaccaatcacaggtgacttggcatgaaattgcaaggcctcagatacatgggtatgacctgaaatgtttggcaatgattaatcggtttcagtttgtatctggagcagatgaaaaagttcttcgggttttttctgcacctcggaattttgtggaaaatttttgtgccattacaggacaatcactgaatcatgtgctctgtaatcaagatagtgatcttccagaaggagccactgtccctgcattgggattatcaaataaagctgtctttcagggagatatagcttctcagccttctgatgaagaggagctgttaactagtactggttttgagtatcagcaggtggcctttcagccctccatacttactgagcctcccactgaggatcatcttctgcagaatactttgtggcctgaagttcaaaaactatatgggcacggttatgaaatattttgtgttacttgtaacagttcaaagactctgcttgcctcagcttgtaaggcagctaagaaagagcatgcagctatcattctttggaacactacatcttggaaacaggtgcagaatttagttttccacagtttgacagtcacgcagatggccttctcacctaatgagaagttcttactagctgtttccagagatcgaacctggtcattgtggaaaaagcaggatacaatctcacctgagttcggtaaaacagcttctgattgggaaagttattagtgaaacagttatgtccattttatctacattaagcagctttagttaagagaaagataacagagtgaagggtagagcctcatgtctttgaagcctttcaaagttcgtggataactgaggaagacttgaccttccttgtaagatttaaatggagatgatctttatttgggttgacctacttgtgattatgtagtcaagatggcatgcattcagatatctcagttcaagaaacataaacatctgtatgtaggaagttaggttttgcaaatggtgatagaatgctaccacaaaacctaatggataacttatcctaagctaggattttatgggacaggaataatgaagatacaactaagaaaactcatggttgagtggtttcttctctctgaactattttattaatatagtactattttaaattatgaaatgtagaggaaaccattatccttagctttttcctaccctctccagtcacctccttcattgagaagggcatattaggcatccatctggataaatgacccctgagcaaggtgttagcccacctacccacattctactctgaacctggcataaactgaaaaaaaaaaaaagaggactaaaaacctttgtgtagttgggtcagtggcctattcctgttcccccagattcttttggtggataagttctagagagtgtttaaagtatatttgcattgtttaatcctgttttaaatttttccattgataagactcgcatacagtttggttttgtgatatttctggtctctttgtttcttgtgttttagagaacacccagggactgtaaagtatactcagcaatatgttttagaacagactgttttcttttgcatcactaatcttttcctaacatgcagcatttactgtttaaaaagctaaagtccaccaggcacagtggctcatgcgtgtgatcccaaatgctgggattacaggcatgagccaccgcgcccagcccaaaagctgattagttcttaagcattttgtggtagcttcttggggaagtgcatgagcctactgatgggactccactggatcagaaccaatttgtgagtatagaaggcatgttagacacctctctgtggtctctgggcaggaacgctttgtctttggaccaaggtgagctctcggagacgcatgtctgctgtaccgtgccttctttctg

SEQ ID NO: 439190 - DNA, 2165 bp, Homo sapiens
gcgcgtctcttgtttgtgcggctgaccagttggcgacatggtggcacccgtgctggagacttctcacgtgttttgctgcccaaaccgggtgcggggagtcctgaactggagctctgggcccagaggacttctggcctttggcacgtcctgctccgtggtgctctatgaccccctgaaaagggttgttgttaccaacttgaatggtcacaccgcccgagtcaattgcatacagtggatttgtaaacaggatggctccccttctactgaattagtttctggaggatctgataatcaagtgattcactgggaaatagaggataatcagcttttaaaagcagtgcatcttcaaggccatgaaggacctgtttatgcggtgcatgctgtttaccagaggaggacatcagatcctgcattatgtacactgatcgtttctgcagctgcagattctgctgttcgactctggtctaaaaagggtccagaagtaatgtgccttcagactttaaactttggaaatggatttgctttggctctctgcttatcttttttgccaaatactgatgtaccaatattagcatgtggcaatgatgattgcagaattcacatatttgctcaacaaaatgatcagtttcagaaagtgctttctctctgtggacatgaggattggattagaggagtggaatgggcagcctttggtagagatcttttcctagcaagctgttcacaagattgcctgataagaatatggaagctgtatataaagtcaacatctttagaaactcaggatgacgataacataagactgaaagaaaatacttttaccatagaaaatgaaagtgttaaaatagcatttgctgttactctggagacagtgctagccggtcatgaaaactgggtaaatgcagttcactggcaacctgtgttttacaaagatggtgtcctacagcagccagtgagattattatctgcttccatggataaaaccatgattctctgggctccagatgaagagtcaggagtttggctagaacaggttcgagtaggtgaagtaggtgggaatactttgggattttatgattgccagttcaatgaagatggctccatgatcattgctcatgctttccacggagcgttgcacctttggaaacagaatacagttaacccaagagagtggactccagagattgtcatttcaggacactttgatggtgtccaagacctagtctgggatccagaaggagaatttattatcactgttggtactgatcagacaactagactttttgctccatggaagagaaaagaccaatcacaggtgacttggcatgaaattgcaaggcctcagatacatgggtatgacctgaaatgtttggcaatgattaatcggtttcagtttgtatctggagcagatgaaaaagttcttcgggttttttctgcacctcggaattttgtggaaaatttttgtgccattacaggacaatcactgaatcatgtgctctgtaatcaagatagtgatcttccagaaggagccactgtccctgcattgggattatcaaataaagctgtctttcagggagatatagcttctcagccttctgatgaagaggagctgttaactagtactggttttgagtatcagcaggtggcctttcagccctccatacttactgagcctcccactgaggatcatcttctgcagaatactttgtggcctgaagttcaaaaactatatgggcacggttatgaaatattttgtgttacttgtaacagttcaaagactctgcttgcctcagcttgtaaggcagctaagaaagagcatgcagctatcattctttggaacactacatcttggaaacaggtgcagaatttagttttccacagtttgacagtcacgcagatggccttctcacctaatgagaagttcttactagctgtttccagagatcgaacctggtcattgtggaaaaagcaggatacaatctcacctgagttcgagccagtttttagtctttttgccttcaccaacaaaattacttctgtgcacagtagaattatttggtcttgtgattggagtcctgacagcaagtatttcttcactgggagtcgagacaaaaaggtttgtctgggttgacgcgactccaccaggtcttaacgacaccacatgtatc

SEQ ID NO: 439191 - DNA, 2102 bp, Homo sapiens
gcgcgtctcttgtttgtgcggctgaccagttggcgacatggtggcacccgtgctggagacttctcacgtgttttgctgcccaaaccgggtgcggggagtcctgaactggagctctgggcccagaggacttctggcctttggcacgtcctgctccgtggtgctctatgaccccctgaaaagggttgttgttaccaacttgaatggtcacaccgcccgagtcaattgcatacagtggatttgtaaacaggatggctccccttctactgaattagtttctggaggatctgataatcaagtgattcactgggaaatagaggataatcagcttttaaaagcagtgcatcttcaaggccatgaaggacctgtttatgcggtgcatgctgtttaccagaggaggacatcagatcctgcattatgtacactgatcgtttctgcagctgcagattctgctgttcgactctggtctaaaaagggtccagaagtaatgtgccttcagactttaaactttggaaatggatttgctttggctctctgcttatcttttttgccaaatactgatgtaccaatattagcatgtggcaatgatgattgcagaattcacatatttgctcaacaaaatgatcagtttcagaaagtgctttctctctgtggacatgaggattggattagaggagtggaatgggcagcctttggtagagatcttttcctagcaagctgttcacaagattgcctgataagaatatggaagctgtatataaagtcaacatctttagaaactcaggatgacgataacataagactgaaagaaaatacttttaccatagaaaatgaaagtgttaaaatagcatttgctgttactctggagacagtgctagccggtcatgaaaactgggtaaatgcagttcactggcaacctgtgttttacaaagatggtgtcctacagcagccagtgagattattatctgcttccatggataaaaccatgattctctgggctccagatgaagagtcaggagtttggctagaacaggttcgagtaggtgaagtaggtgggaatactttgggattttatgattgccagttcaatgaagatggctccatgatcattgctcatgctttccacggagcgttgcacctttggaaacagaatacagttaacccaagagagtggactccagagattgtcatttcaggacactttgatggtgtccaagacctagtctgggatccagaaggagaatttattatcactgttggtactgatcagacaactagactttttgctccatggaagagaaaagaccaatcacaggtgacttggcatgaaattgcaaggcctcagatacatgggtatgacctgaaatgtttggcaatgattaatcggtttcagtttgtatctggagcagatgaaaaagttcttcgggttttttctgcacctcggaattttgtggaaaatttttgtgccattacaggacaatcactgaatcatgtgctctgtaatcaagatagtgatcttccagaaggagccactgtccctgcattgggattatcaaataaagctgtctttcagggagatatagcttctcagccttctgatgaagaggagctgttaactagtactggttttgagtatcagcaggtggcctttcagccctccatacttactgtcctggacgtgggtggggctgtgacagctgtcagcgtctgcccagtgctccacccttctcaacgatacgtggttgcagtaggattggagtgtggaaagatttgcttatatacctggaaaaagactgatcaagttccagaaataaatgactggacccactgtgtagaaacaagtcaaagccaaagtcatacactggctatcagaaaattatgctggaagaattgcagtggaaaaactgaacagaaggaagcagaaggtgctgagtggttacactttgcaagctgtggtgaagatcacactgtgaagatacacagagtcaataaatgtgcactgtaatggacttaataactacatgcttgcagtcactggtatcttaaaatattatcatgtaaacaggtcatctttaccttcataactgaattgagtttctgggttt

SEQ ID NO: 439192 - DNA, 2006 bp, Homo sapiens
gcgcgtctcttgtttgtgcggctgaccagttggcgacatggtggcacccgtgctggagacttctcacgtgttttgctgcccaaaccgggtgcggggagtcctgaactggagctctgggcccagaggacttctggcctttggcacgtcctgctccgtggtgctctatgaccccctgaaaagggttgttgttaccaacttgaatggtcacaccgcccgagtcaattgcatacagtggatttgtaaacaggatggctccccttctactgaattagtttctggaggatctgataatcaagtgattcactgggaaatagaggataatcagcttttaaaagcagtgcatcttcaaggccatgaaggacctgtttatgcggtgcatgctgtttaccagaggaggacatcagatcctgcattatgtacactgatcgtttctgcagctgcagattctgctgttcgactctggtctaaaaagggtccagaagtaatgtgccttcagactttaaactttggaaatggatttgctttggctctctgcttatcttttttgccaaatactgatgtaccaatattagcatgtggcaatgatgattgcagaattcacatatttgctcaacaaaatgatcagtttcagaaagtgctttctctctgtggacatgaggattggattagaggagtggaatgggcagcctttggtagagatcttttcctagcaagctgttcacaagattgcctgataagaatatggaagctgtatataaagtcaacatctttagaaactcaggatgacgataacataagactgaaagaaaatacttttaccatagaaaatgaaagtgttaaaatagcatttgctgttactctggagacagtgctagccggtcatgaaaactgggtaaatgcagttcactggcaacctgtgttttacaaagatggtgtcctacagcagccagtgagattattatctgcttccatggataaaaccatgattctctgggctccagatgaagagtcaggagtttggctagaacaggttcgagtaggtgaagtaggtgggaatactttgggattttatgattgccagttcaatgaagatggctccatgatcattgctcatgctttccacggagcgttgcacctttggaaacagaatacagttaacccaagagagtggactccagagattgtcatttcaggacactttgatggtgtccaagacctagtctgggatccagaaggagaatttattatcactgttggtactgatcagacaactagactttttgctccatggaagagaaaagaccaatcacaggtgacttggcatgaaattgcaaggcctcagatacatgggtatgacctgaaatgtttggcaatgattaatcggtttcagtttgtatctggagcagatgaaaaagttcttcgggttttttctgcacctcggaattttgtggaaaatttttgtgccattacaggacaatcactgaatcatgtgctctgtaatcaagatagtgatcttccagaaggagccactgtccctgcattgggattatcaaataaagctgtctttcagggagatatagcttctcagccttctgatgaagaggagctgttaactagtactggttttgagtatcagcaggtggcctttcagccctccatacttactgtcctggacgtgggtggggctgtgacagctgtcagcgtctgcccagtgctccacccttctcaacgatacgtggttgcagtaggattggagtgtggaaagatttgcttatatacctggaaaaagactgatcaagttccagaaataaatgactggacccactgtgtagaaacaagtcaaagccaaagtcatacactggctatcagaaaattatgctggaagaattgcagtggaaaaactgaacagaaggaagcagaaggtgctgagtggttacactttgcaagctgtggtgaagatcacactgtgaagatacacagagtcaataaatgtgcactgtaatgga

SEQ ID NO: 439193 - DNA, 263 bp, Homo sapiens
ctttttgccttcaccaacaaaattacttctgtgcacagtagaattatttggtcttgtgattggagtcctgacagcaagtatttcttcactgggagtcgagacaaaaaggtaattatttaaaaatttaatattttttcaaatgtaaaaataatatttttataggtatgtttgaataaaaaatgcataatcctgcctttctgttacagcttttaaaaatcagctatgtattcctttctgtttttcgtatatgtacatataaaaaa

SEQ ID NO: 439194 - DNA, 2522 bp, Homo sapiens
gcgcgtctcttgtttgtgcggctgaccagttggcgacatggtggcacccgtgctggagacttctcacgtgttttgctgcccaaaccgggtgcggggagtcctgaactggagctctgggcccagaggacttctggcctttggcacgtcctgctccgtggtgctctatgaccccctgaaaagggttgttgttaccaacttgaatggtcacaccgcccgagtcaattgcatacagtggatttgtaaacaggatggctccccttctactgaattagtttctggaggatctgataatcaagtgattcactgggaaatagaggataatcagcttttaaaagcagtgcatcttcaaggccatgaaggacctgtttatgcggtgcatgctgtttaccagaggaggacatcagatcctgcattatgtacactgatcgtttctgcagctgcagattctgctgttcgactctggtctaaaaagggtccagaagtaatgtgccttcagactttaaactttggaaatggatttgctttggctctctgcttatcttttttgccaaatactgatgtaccaatattagcatgtggcaatgatgattgcagaattcacatatttgctcaacaaaatgatcagtttcagaaagtgctttctctctgtggacatgaggattggattagaggagtggaatgggcagcctttggtagagatcttttcctagcaagctgttcacaagattgcctgataagaatatggaagctgtatataaagtcaacatctttagaaactcaggatgacgataacataagactgaaagaaaatacttttaccatagaaaatgaaagtgttaaaatagcatttgctgttactctggagacagtgctagccggtcatgaaaactgggtaaatgcagttcactggcaacctgtgttttacaaagatggtgtcctacagcagccagtgagattattatctgcttccatggataaaaccatgattctctgggctccagatgaagagtcaggagtttggctagaacaggttcgagtaggtgaagtaggtgggaatactttgggattttatgattgccagttcaatgaagatggctccatgatcattgctcatgctttccacggagcgttgcacctttggaaacagaatacagttaacccaagagagtggactccagagattgtcatttcaggacactttgatggtgtccaagacctagtctgggatccagaaggagaatttattatcactgttggtactgatcagacaactagactttttgctccatggaagagaaaagaccaatcacaggtgacttggcatgaaattgcaaggcctcagatacatgggtatgacctgaaatgtttggcaatgattaatcggtttcagtttgtatctggagcagatgaaaaagttcttcgggttttttctgcacctcggaattttgtggaaaatttttgtgccattacaggacaatcactgaatcatgtgctctgtaatcaagatagtgatcttccagaaggagccactgtccctgcattgggattatcaaataaagctgtctttcagggagatatagcttctcagccttctgatgaagaggagctgttaactagtactggttttgagtatcagcaggtggcctttcagccctccatacttactgagcctcccactgaggatcatcttctgcagaatactttgtggcctgaagttcaaaaactatatgggcacggttatgaaatattttgtgttacttgtaacagttcaaagactctgcttgcctcagcttgtaaggcagctaagaaagagcatgcagctatcattctttggaacactacatcttggaaacaggtgcagaatttagttttccacagtttgacagtcacgcagatggccttctcacctaatgagaagttcttactagctgtttccagagatcgaacctggtcattgtggaaaaagcaggatacaatctcacctgagttcgagccagtttttagtctttttgccttcaccaacaaaattacttctgtgcacagtagaattatttggtcttgtgattggagtcctgacagcaagtatttcttcactgggagtcgagacaaaaaggtggttgtctggggtgagtgcgactccactgatgactgtattgagcacaacattggcccctgctcctcagtcctggacgtgggtggggctgtgacagctgtcagcgtctgcccagtgctccacccttctcaacgatacgtggttgcagtaggattggagtgtggaaagatttgcttatatacctggaaaaagactgatcaagttccagaaataaatgactggacccactgtgtagaaacaagtcaaagccaaagtcatacactggctatcagaaaattatgctggaagaattgcagtggaaaaactgaacagaaggaagcagaaggtgctgagtggttacactttgcaagctgtggtgaagatcacactgtgaagatacacagagtcaataaatgtgcactgtaatgga

SEQ ID NO: 439195 - DNA, 2813 bp, Homo sapiens
gcgcgtctcttgtttgtgcggctgaccagttggcgacatggtggcacccgtgctggagacttctcacgtgttttgctgcccaaaccgggtgcggggagtcctgaactggagctctgggcccagaggacttctggcctttggcacgtcctgctccgtggtgctctatgaccccctgaaaagggttgttgttaccaacttgaatggtcacaccgcccgagtcaattgcatacagtggatttgtaaacaggatggctccccttctactgaattagtttctggaggatctgataatcaagtgattcactgggaaatagaggataatcagcttttaaaagcagtgcatcttcaaggccatgaaggacctgtttatgcggtgcatgctgtttaccagaggaggacatcagatcctgcattatgtacactgatcgtttctgcagctgcagattctgctgttcgactctggtctaaaaagggtccagaagtaatgtgccttcagactttaaactttggaaatggatttgctttggctctctgcttatcttttttgccaaatactgatgttacctggaagactggccaggtggaacgaggcagggcctggaagccaccagcctctctcgccctctgtagcaggagctgcgactctatggtttcatgttacgcttccattctgtgcaaggctctgtggaaggagaagctgcacacattctggcatcataacagaatttcatttcttccatctgcattcaggccaataccaatattagcatgtggcaatgatgattgcagaattcacatatttgctcaacaaaatgatcagtttcagaaagtgctttctctctgtggacatgaggattggattagaggagtggaatgggcagcctttggtagagatcttttcctagcaagctgttcacaagattgcctgataagaatatggaagctgtatataaagtcaacatctttagaaactcaggatgacgataacataagactgaaagaaaatacttttaccatagaaaatgaaagtgttaaaatagcatttgctgttactctggagacagtgctagccggtcatgaaaactgggtaaatgcagttcactggcaacctgtgttttacaaagatggtgtcctacagcagccagtgagattattatctgcttccatggataaaaccatgattctctgggctccagatgaagagtcaggagtttggctagaacaggttcgagtaggtgaagtaggtgggaatactttgggattttatgattgccagttcaatgaagatggctccatgatcattgctcatgctttccacggagcgttgcacctttggaaacagaatacagttaacccaagagagtggactccagagattgtcatttcaggacactttgatggtgtccaagacctagtctgggatccagaaggagaatttattatcactgttggtactgatcagacaactagactttttgctccatggaagagaaaagaccaatcacaggtgacttggcatgaaattgcaaggcctcagatacatgggtatgacctgaaatgtttggcaatgattaatcggtttcagtttgtatctggagcagatgaaaaagttcttcgggttttttctgcacctcggaattttgtggaaaatttttgtgccattacaggacaatcactgaatcatgtgctctgtaatcaagatagtgatcttccagaaggagccactgtccctgcattgggattatcaaataaagctgtctttcagggagatatagcttctcagccttctgatgaagaggagctgttaactagtactggttttgagtatcagcaggtggcctttcagccctccatacttactgagcctcccactgaggatcatcttctgcagaatactttgtggcctgaagttcaaaaactatatgggcacggttatgaaatattttgtgttacttgtaacagttcaaagactctgcttgcctcagcttgtaaggcagctaagaaagagcatgcagctatcattctttggaacactacatcttggaaacaggtgcagaatttagttttccacagtttgacagtcacgcagatggccttctcacctaatgagaagttcttactagctgtttccagagatcgaacctggtcattgtggaaaaagcaggatacaatctcacctgagttcgagccagtttttagtctttttgccttcaccaacaaaattacttctgtgcacagtagaattatttggtcttgtgattggagtcctgacagcaagtatttcttcactgggagtcgagacaaaaaggtggttgtctggggtgagtgcgactccactgatgactgtattgagcacaacattggcccctgctcctcagtcctggacgtgggtggggctgtgacagctgtcagcgtctgcccagtgctccacccttctcaacgatacgtggttgcagtaggattggagtgtggaaagatttgcttatatacctggaaaaagactgatcaagttccagaaataaatgactggacccactgtgtagaaacaagtcaaagccaaagtcatacactggctatcagaaaattatgctggaagaattgcagtggaaaaactgaacagaaggaagcagaaggtgctgagtggttacactttgcaagctgtggtgaagatcacactgtgaagatacacagagtcaataaatgtgcactgtaatggacttaataactacatgcttgcagtcactggtatcttaaaatattatcatgtaaacaggtcatctttaccttcataactgaattgagtttctgggttt

SEQ ID NO: 439196 - DNA, 2566 bp, Homo sapiens
gcgcgtctcttgtttgtgcggctgaccagttggcgacatggtggcacccgtgctggagacttctcacgtgttttgctgcccaaaccgggtgcggggagtcctgaactggagctctgggcccagaggacttctggcctttggcacgtcctgctccgtggtgctctatgaccccctgaaaagggttgttgttaccaacttgaatggtcacaccgcccgagtcaattgcatacagtggatttgtaaacaggatggctccccttctactgaattagtttctggaggatctgataatcaagtgattcactgggaaatagaggataatcagcttttaaaagcagtgcatcttcaaggccatgaaggacctgtttatgcggtgcatgctgtttaccagaggaggacatcagatcctgcattatgtacactgatcgtttctgcagctgcagattctgctgttcgactctggtctaaaaagggtccagaagtaatgtgccttcagactttaaactttggaaatggatttgctttggctctctgcttatcttttttgccaaatactgatgtaccaatattagcatgtggcaatgatgattgcagaattcacatatttgctcaacaaaatgatcagtttcagaaagtgctttctctctgtggacatgaggattggattagaggagtggaatgggcagcctttggtagagatcttttcctagcaagctgttcacaagattgcctgataagaatatggaagctgtatataaagtcaacatctttagaaactcaggatgacgataacataagactgaaagaaaatacttttaccatagaaaatgaaagtgttaaaatagcatttgctgttactctggagacagtgctagccggtcatgaaaactgggtaaatgcagttcactggcaacctgtgttttacaaagatggtgtcctacagcagccagtgagattattatctgcttccatggataaaaccatgattctctgggctccagatgaagagtcaggagtttggctagaacaggttcgagtaggtgaagtaggtgggaatactttgggattttatgattgccagttcaatgaagatggctccatgatcattgctcatgctttccacggagcgttgcacctttggaaacagaatacagttaacccaagagagtggactccagagattgtcatttcaggacactttgatggtgtccaagacctagtctgggatccagaaggagaatttattatcactgttggtactgatcagacaactagactttttgctccatggaagagaaaagaccaatcacaggtgacttggcatgaaattgcaaggcctcagatacatgggtatgacctgaaatgtttggcaatgattaatcggtttcagtttgtatctggagcagatgaaaaagttcttcgggttttttctgcacctcggaattttgtggaaaatttttgtgccattacaggacaatcactgaatcatgtgctctgtaatcaagatagtgatcttccagaaggagccactgtccctgcattgggattatcaaataaagctgtctttcagggagatatagcttctcagccttctgatgaagaggagctgttaactagtactggttttgagtatcagcaggtggcctttcagccctccatacttactgagcctcccactgaggatcatcttctgcagaatactttgtggcctgaagttcaaaaactatatgggcacggttatgaaatattttgtgttacttgtaacagttcaaagactctgcttgcctcagcttgtaaggcagctaagaaagagcatgcagctatcattctttggaacactacatcttggaaacaggtgcagaatttagttttccacagtttgacagtcacgcagatggccttctcacctaatgagaagttcttactagctgtttccagagatcgaacctggtcattgtggaaaaagcaggatacaatctcacctgagttcgtagaattatttggtcttgtgattggagtcctgacagcaagtatttcttcactgggagtcgagacaaaaaggtggttgtctggggtgagtgcgactccactgatgactgtattgagcacaacattggcccctgctcctcagtcctggacgtgggtggggctgtgacagctgtcagcgtctgcccagtgctccacccttctcaacgatacgtggttgcagtaggattggagtgtggaaagatttgcttatatacctggaaaaagactgatcaagttccagaaataaatgactggacccactgtgtagaaacaagtcaaagccaaagtcatacactggctatcagaaaattatgctggaagaattgcagtggaaaaactgaacagaaggaagcagaaggtgctgagtggttacactttgcaagctgtggtgaagatcacactgtgaagatacacagagtcaataaatgtgcactgtaatggacttaataactacatgcttgcagtcactggtatcttaaaatattatcatgtaaacaggtcatctttaccttcataactgaattgagtttctgggttt

SEQ ID NO: 439197 - DNA, 2979 bp, Homo sapiens
gcgcgtctcttgtttgtgcggctgaccagttggcgacatggtggcacccgtgctggagacttctcacgtgttttgctgcccaaaccgggtgcggggagtcctgaactggagctctgggcccagaggacttctggcctttggcacgtcctgctccgtggtgctctatgaccccctgaaaagggttgttgttaccaacttgaatggtcacaccgcccgagtcaattgcatacagtggatttgtaaacaggatggctccccttctactgaattagtttctggaggatctgataatcaagtgattcactgggaaatagaggataatcagcttttaaaagcagtgcatcttcaaggccatgaaggacctgtttatgcggtgcatgctgtttaccagaggaggacatcagatcctgcattatgtacactgatcgtttctgcagctgcagattctgctgttcgactctggtctaaaaagggtccagaagtaatgtgccttcagactttaaactttggaaatggatttgctttggctctctgcttatcttttttgccaaatactgatgtaccaatattagcatgtggcaatgatgattgcagaattcacatatttgctcaacaaaatgatcagtttcagaaagtgctttctctctgtggacatgaggattggattagaggagtggaatgggcagcctttggtagagatcttttcctagcaagctgttcacaagattgcctgataagaatatggaagctgtatataaagtcaacatctttagaaactcaggatgacgataacataagactgaaagaaaatacttttaccatagaaaatgaaagtgttaaaatagcatttgctgttactctggagacagtgctagccggtcatgaaaactgggtaaatgcagttcactggcaacctgtgttttacaaagatggtgtcctacagcagccagtgagattattatctgcttccatggataaaaccatgattctctgggctccagatgaagagtcaggagtttggctagaacaggttcgagtaggtgaagtaggtgggaatactttgggattttatgattgccagttcaatgaagatggctccatgatcattgctcatgctttccacggagcgttgcacctttggaaacagaatacagttaacccaagagagtggactccagagattgtcatttcaggacactttgatggtgtccaagacctagtctgggatccagaaggagaatttattatcactgttggtactgatcagacaactagactttttgctccatggaagagaaaagaccaatcacaggtgacttggcatgaaattgcaaggcctcagatacatgggtatgacctgaaatgtttggcaatgattaatcggtttcagtttgtatctggagcagatgaaaaagttcttcgggttttttctgcacctcggaattttgtggaaaatttttgtgccattacaggacaatcactgaatcatgtgctctgtaatcaagatagtgatcttccagaaggagccactgtccctgcattgggattatcaaataaagctgtctttcagggagatatagcttctcagccttctgatgaagaggagctgttaactagtactggttttgagtatcagcaggtggcctttcagccctccatacttactgagcctcccactgaggatcatcttctgcagaatactttgtggcctgaagttcaaaaactatatgggcacggttatgaaatattttgtgttacttgtaacagttcaaagactctgcttgcctcagcttgtaaggcagctaagaaagagcatgcagctatcattctttggaacactacatcttggaaacaggtgcagaatttagttttccacagtttgacagtcacgcagatggccttctcacctaatgagaagttcttactagctgtttccagagatcgaacctggtcattgtggaaaaagcaggatacaatctcacctgagttcgagccagtttttagtctttttgccttcaccaacaaaattacttctgtgcacagtagaattatttggtcttgtgattggagtcctgacagcaagtatttcttcactgggagtcgagacaaaaaggtggttgtctggggtgagtgcgactccactgatgactgtattgagcacaacattggcccctgctcctcagtcctggacgtgggtggggctgtgacagctgtcagcgtctgcccagtgctccacccttctcaacgatacgtggttgcagtaggattggagtgtggaaagatttgcttatatacctggaaaaagactgatcaagttccagaaataaatgactggacccactgtgtagaaacaagtcaaagccaaagtcatacactggctatcagaaaattatgctggaagaattgcagtggaaaaactgaacagaaggaagcagaaggtgctgagtggttacactttgcaagctgtggtgaagatcacactgtgaagatacacagagtcaataaatgtgcactgtaatggaaaaaaaaaaaaaaaaaaaaaaaaaaaaaaaaaacaaacaaaaaaaaaaaaaaaaaaaaaaaaaaaaaaaaaaaaacgggggggcgccacaaaaaaacccccgcgggggggcacaatgacataagcggaaacaacaagattctagacaagaaaggggggccccaaataaggagaaggatatataaaagaagaaagaagcggggcgaacatctaaaaaacacgccggcgggaggaaaaacaacacgaaccggaggctaccctctgtggggaaaacacaccacactggcgacgaggaaacacaagggaccaagcagccgacagaaaatagacaccgccgccagataacaaacactacagggcgtaacgcgaacaaccagacgacagatcggagagcaaaacctcgcacccgagagaaacgcagacacagtatcccgaacgacacaaacacagccggacgg

SEQ ID NO: 439198 - DNA, 3997 bp, Homo sapiens
gcgcgtctcttgtttgtgcggctgaccagttggcgacatggtggcacccgtgctggagacttctcacgtgttttgctgcccaaaccgggtgcggggagtcctgaactggagctctgggcccagaggacttctggcctttggcacgtcctgctccgtggtgctctatgaccccctgaaaagggttgttgttaccaacttgaatggtcacaccgcccgagtcaattgcatacagtggatttgtaaacaggatggctccccttctactgaattagtttctggaggatctgataatcaagtgattcactgggaaatagaggataatcagcttttaaaagcagtgcatcttcaaggccatgaaggacctgtttatgcggtgcatgctgtttaccagaggaggacatcagatcctgcattatgtacactgatcgtttctgcagctgcagattctgctgttcgactctggtctaaaaagggtccagaagtaatgtgccttcagactttaaactttggaaatggatttgctttggctctctgcttatcttttttgccaaatactgatgtaccaatattagcatgtggcaatgatgattgcagaattcacatatttgctcaacaaaatgatcagtttcagaaagtgctttctctctgtggacatgaggattggattagaggagtggaatgggcagcctttggtagagatcttttcctagcaagctgttcacaagattgcctgataagaatatggaagctgtatataaagtcaacatctttagaaactcaggatgacgataacataagactgaaagaaaatacttttaccatagaaaatgaaagtgttaaaatagcatttgctgttactctggagacagtgctagccggtcatgaaaactgggtaaatgcagttcactggcaacctgtgttttacaaagatggtgtcctacagcagccagtgagattattatctgcttccatggataaaaccatgattctctgggctccagatgaagagtcaggagtttggctagaacaggttcgagtaggtgaagtaggtgggaatactttgggattttatgattgccagttcaatgaagatggctccatgatcattgctcatgctttccacggagcgttgcacctttggaaacagaatacagttaacccaagagagtggactccagagattgtcatttcaggacactttgatggtgtccaagacctagtctgggatccagaaggagaatttattatcactgttggtactgatcagacaactagactttttgctccatggaagagaaaagaccaatcacaggtgacttggcatgaaattgcaaggcctcagatacatgggtatgacctgaaatgtttggcaatgattaatcggtttcagtttgtatctggagcagatgaaaaagttcttcgggttttttctgcacctcggaattttgtggaaaatttttgtgccattacaggacaatcactgaatcatgtgctctgtaatcaagatagtgatcttccagaaggagccactgtccctgcattgggattatcaaataaagctgtctttcagggagatatagcttctcagccttctgatgaagaggagctgttaactagtactggttttgagtatcagcaggtggcctttcagccctccatacttactgagcctcccactgaggatcatcttctgcagaatactttgtggcctgaagttcaaaaactatatgggcacggttatgaaatattttgtgttacttgtaacagttcaaagactctgcttgcctcagcttgtaaggcagctaagaaagagcatgcagctatcattctttggaacactacatcttggaaacaggtgcagaatttagttttccacagtttgacagtcacgcagatggccttctcacctaatgagaagttcttactagctgtttccagagatcgaacctggtcattgtggaaaaagcaggatacaatctcacctgagttcggtaaaacagcttctgattgggaaagttattagtgaaacagttatgtccattttatctacattaagcagctttagttaagagaaagataacagagtgaagggtagagcctcatgtctttgaagcctttcaaagttcgtggataactgaggaagacttgaccttccttgtaagatttaaatggagatgatctttatttgggttgacctacttgtgattatgtagtcaagatggcatgcattcagatatctcagttcaagaaacataaacatctgtatgtaggaagttaggttttgcaaatggtgatagaatgctaccacaaaacctaatggataacttatcctaagctaggattttatgggacaggaataatgaagatacaactaagaaaactcatggttgagtggtttcttctctctgaactattttattaatatagtactattttaaattatgaaatgtagaggaaaccattatccttagctttttcctaccctctccagtcacctccttcattgagaagggcatattaggcatccatctggataaatgacccctgagcaaggtgttagcccacctacccacattctactctgaacctggcataaactgaaaaaaaaaaaaagaggactaaaaacctttgtgtagttgggtcagtggcctattcctgttcccccagattcttttggtggataagttctagagagtgtttaaagtatatttgcattgtttaatcctgttttaaatttttccattgataagactcgcatacagtttggttttgtgatatttctggtctctttgtttcttgtgttttagagaacacccagggactgtaaagtatactcagcaatatgttttagaacagactgttttcttttgcatcactaatcttttcctaacatgcagcatttactgtttaaaaagctaaagtccactgcgcccagcctgagtttcattttttaagtcacatagcagtagtccttatttcagtgctagaccctttgaaatgcgatgaaagctatatggacccttcgctttgttatataacatatgcacacatacccagaattttgcacatatgttcagagattcctagacctgcagacctgcctctgtgtgtcccaatttaagaacctctgttctttcttcatgactggatttgcccaattttgtgttattttgggacttaatttgtccctctttgggacatttccttatttattgccctcttcagagagtagatgtagaaaataaagagaggaaacctagattacttaatttttattttaacattttctatagatagcataccacgccaagtgtgctctgtcttgatccccttctttctagcatctgccagacattgtagagtttcgcaagcagttgtaggtttgagctgcagccagtcatttcttttattctttaaaagtacatagatttgtctttttagggctttactgaaagtaaaatatcctgacatttaaactgacagatgtaggaggtaaaaaatagagttctgaaacatttgaatttatgtgacagctgaagtcacgagatgagggatgtatgtcccccagggaggatgcagaaagaagaaaagggtactggaaacagcatgtcagtggtgccagctgagggctggaggcagccaggagagttgggagcctgggtgctgggtggagagaggttaacagggaagacatgggaagtattgtgaaggctggtgtgagcaggggactactccagccctgttggaacatagagccatttggcagattgacaatgcagtgacagctgtatataataaatgtgttgaaaggaggaaggtgaggattttcttggtgggagtttatgctgttatttaacatattttgcttccaaggggttaagatgttttacctaaatggaggtttctaggtcagtgctatacaatatttctaatctgtgttttatagtgtgagctacatatgtaattttaaaattttcaagtagccacataataaagg

SEQ ID NO: 439199 - DNA, 2484 bp, Homo sapiens
gcgcgtctcttgtttgtgcggctgaccagttggcgacatggtggcacccgtgctggagacttctcacgtgttttgctgcccaaaccgggtgcggggagtcctgaactggagctctgggcccagaggacttctggcctttggcacgtcctgctccgtggtgctctatgaccccctgaaaagggttgttgttaccaacttgaatggtcacaccgcccgagtcaattgcatacagtggatttgtaaacaggatggctccccttctactgaattagtttctggaggatctgataatcaagtgattcactgggaaatagaggataatcagcttttaaaagcagtgcatcttcaaggccatgaaggacctgtttatgcggtgcatgctgtttaccagaggaggacatcagatcctgcattatgtacactgatcgtttctgcagctgcagattctgctgttcgactctggtctaaaaagggtccagaagtaatgtgccttcagactttaaactttggaaatggatttgctttggctctctgcttatcttttttgccaaatactgatgtaccaatattagcatgtggcaatgatgattgcagaattcacatatttgctcaacaaaatgatcagtttcagaaagtgctttctctctgtggacatgaggattggattagaggagtggaatgggcagcctttggtagagatcttttcctagcaagctgttcacaagattgcctgataagaatatggaagctgtatataaagtcaacatctttagaaactcaggatgacgataacataagactgaaagaaaatacttttaccatagaaaatgaaagtgttaaaatagcatttgctgttactctggagacagtgctagccggtcatgaaaactgggtaaatgcagttcactggcaacctgtgttttacaaagatggtgtcctacagcagccagtgagattattatctgcttccatggataaaaccatgattctctgggctccagatgaagagtcaggagtttggctagaacaggttcgagtaggtgaagtaggtgggaatactttgggattttatgattgccagttcaatgaagatggctccatgatcattgctcatgctttccacggagcgttgcacctttggaaacagaatacagttaacccaagagagtggactccagagattgtcatttcaggacactttgatggtgtccaagacctagtctgggatccagaaggagaatttattatcactgttggtactgatcagacaactagactttttgctccatggaagagaaaagaccaatcacaggtgacttggcatgaaattgcaaggcctcagatacatgggtatgacctgaaatgtttggcaatgattaatcggtttcagtttgtatctggagcagatgaaaaagttcttcgggttttttctgcacctcggaattttgtggaaaatttttgtgccattacaggacaatcactgaatcatgtgctctgtaatcaagatagtgatcttccagaaggagccactgtccctgcattgggattatcaaataaagctgtctttcagggagatatagcttctcagccttctgatgaagaggagctgttaactagtactggttttgagtatcagcaggtggcctttcagccctccatacttactgagcctcccactgaggatcatcttctgcagaatactttgtggcctgaagttcaaaaactatatgggcacggttatgaaatattttgtgttacttgtaacagttcaaagactctgcttgcctcagcttgtaaggcagctaagaaagagcatgcagctatcattctttggaacactacatcttggaaacaggtgcagaatttagttttccacagtttgacagtcacgcagatggccttctcacctaatgagaagttcttactagctgtttccagagatcgaacctggtcattgtggaaaaagcaggatacaatctcacctgagttcgagccagtttttagtctttttgccttcaccaacaaaattacttctgtgcacagtagaattatttggtcttgtgattggagtcctgacagcaagtatttcttcactgggagtcgagacaaaaagatacgtggttgcagtaggattggagtgtggaaagatttgcttatatacctggaaaaagactgatcaagttccagaaataaatgactggacccactgtgtagaaacaagtcaaagccaaagtcatacactggctatcagaaaattatgctggaagaattgcagtggaaaaactgaacagaaggaagcagaaggtgctgagtggttacactttgcaagctgtggtgaagatcacactgtgaagatacacagagtcaataaatgtgcactgtaatggacttaataactacatgcttgcagtcactggtatcttaaaatattatcatgtaaacaggtcatctttaccttcataactgaattgagtttctgggttt

SEQ ID NO: 439200 - DNA, 2388 bp, Homo sapiens
gcgcgtctcttgtttgtgcggctgaccagttggcgacatggtggcacccgtgctggagacttctcacgtgttttgctgcccaaaccgggtgcggggagtcctgaactggagctctgggcccagaggacttctggcctttggcacgtcctgctccgtggtgctctatgaccccctgaaaagggttgttgttaccaacttgaatggtcacaccgcccgagtcaattgcatacagtggatttgtaaacaggatggctccccttctactgaattagtttctggaggatctgataatcaagtgattcactgggaaatagaggataatcagcttttaaaagcagtgcatcttcaaggccatgaaggacctgtttatgcggtgcatgctgtttaccagaggaggacatcagatcctgcattatgtacactgatcgtttctgcagctgcagattctgctgttcgactctggtctaaaaagggtccagaagtaatgtgccttcagactttaaactttggaaatggatttgctttggctctctgcttatcttttttgccaaatactgatgtaccaatattagcatgtggcaatgatgattgcagaattcacatatttgctcaacaaaatgatcagtttcagaaagtgctttctctctgtggacatgaggattggattagaggagtggaatgggcagcctttggtagagatcttttcctagcaagctgttcacaagattgcctgataagaatatggaagctgtatataaagtcaacatctttagaaactcaggatgacgataacataagactgaaagaaaatacttttaccatagaaaatgaaagtgttaaaatagcatttgctgttactctggagacagtgctagccggtcatgaaaactgggtaaatgcagttcactggcaacctgtgttttacaaagatggtgtcctacagcagccagtgagattattatctgcttccatggataaaaccatgattctctgggctccagatgaagagtcaggagtttggctagaacaggttcgagtaggtgaagtaggtgggaatactttgggattttatgattgccagttcaatgaagatggctccatgatcattgctcatgctttccacggagcgttgcacctttggaaacagaatacagttaacccaagagagtggactccagagattgtcatttcaggacactttgatggtgtccaagacctagtctgggatccagaaggagaatttattatcactgttggtactgatcagacaactagactttttgctccatggaagagaaaagaccaatcacaggtgacttggcatgaaattgcaaggcctcagatacatgggtatgacctgaaatgtttggcaatgattaatcggtttcagtttgtatctggagcagatgaaaaagttcttcgggttttttctgcacctcggaattttgtggaaaatttttgtgccattacaggacaatcactgaatcatgtgctctgtaatcaagatagtgatcttccagaaggagccactgtccctgcattgggattatcaaataaagctgtctttcagggagatatagcttctcagccttctgatgaagaggagctgttaactagtactggttttgagtatcagcaggtggcctttcagccctccatacttactgagcctcccactgaggatcatcttctgcagaatactttgtggcctgaagttcaaaaactatatgggcacggttatgaaatattttgtgttacttgtaacagttcaaagactctgcttgcctcagcttgtaaggcagctaagaaagagcatgcagctatcattctttggaacactacatcttggaaacaggtgcagaatttagttttccacagtttgacagtcacgcagatggccttctcacctaatgagaagttcttactagctgtttccagagatcgaacctggtcattgtggaaaaagcaggatacaatctcacctgagttcgagccagtttttagtctttttgccttcaccaacaaaattacttctgtgcacagtagaattatttggtcttgtgattggagtcctgacagcaagtatttcttcactgggagtcgagacaaaaagatacgtggttgcagtaggattggagtgtggaaagatttgcttatatacctggaaaaagactgatcaagttccagaaataaatgactggacccactgtgtagaaacaagtcaaagccaaagtcatacactggctatcagaaaattatgctggaagaattgcagtggaaaaactgaacagaaggaagcagaaggtgctgagtggttacactttgcaagctgtggtgaagatcacactgtgaagatacacagagtcaataaatgtgcactgtaatgga

SEQ ID NO: 439201 - DNA, 1183 bp, Homo sapiens
gtggcgacctagaggatcccttagctgtgtattacaggacaatcactgaatcatgtgctctgtaatcaagatagtgatcttccagaaggagccactgtccctgcattgggattatcaaataaagctgtctttcagggagatatagcttctcagccttctgatgaagaggagctgttaactagtactggttttgagtatcagcaggtggcctttcagccctccatacttactgagcctcccactgaggatcatcttctgcagaatactttgtggcctgaagttcaaaaactatatgggcacggttatgaaatattttgtgttacttgtaacagttcaaagactctgcttgcctcagcttgtaaggcagctaagaaagagcatgcagctatcattctttggaacactacatcttggaaacaggtgcagaatttagttttccacagtttgacagtcacgcagatggccttctcacctaatgagaagttcttactagctgtttccagagatcgaacctggtcattgtggaaaaagcaggatacaatctcacctgagttcgagccagtttttagtctttttgccttcaccaacaaaattacttctgtgcacagtagaattatttggtcttgtgattggagtcctgacagcaagtatttcttcactgggagtcgagacaaaaaggtggttgtctggggtgagtgcgactccactgatgactgtattgagcacaacattggcccctgctcctcagtcctggacgtgggtggggctgtgacagctgtcagcgtctgcccagtgctccacccttctcaacgatacgtggttgcagtaggattggagtgtggaaagatttgcttatatacctggaaaaagactgatcaagttccagaaataaatgactggacccactgtgtagaaacaagtcaaagccaaagtcatacactggctatcagaaaattatgctggaagaattgcagtggaaaaactgaacagaaggaagcagaaggtgctgagtggttacactttgcaagctgtggtgaagatcacactgtgaagatacacagagtcaataaatgtgcactgtaatggacttaataactacatgcttgcagtcactggtatcttaaaatattatcatgtaaacaggtcatctttaccttcataactgaattgagtttctgggttt

SEQ ID NO: 439202 - DNA, 1218 bp, Homo sapiens
gcgcgtctcttgtttgtgcggctgaccagttggcgacatggtggcacccgtgctggagacttctcacgtgttttgctgcccaaaccgggtgcggggagtcctgaactggagctctgggcccagaggacttctggcctttggcacgtcctgctccgtggtgctctatgaccccctgaaaagggttgttgttaccaacttgaatggtcacaccgcccgagtcaattgcatacagtggatttgtaaacaggatggctccccttctactgaattagtttctggaggatctgataatcaagtgattcactgggaaatagaggataatcagatatgggcacggttatgaaatattttgtgttacttgtaacagttcaaagactctgcttgcctcagcttgtaaggcagctaagaaagagcatgcagctatcattctttggaacactacatcttggaaacaggtgcagaatttagttttccacagtttgacagtcacgcagatggccttctcacctaatgagaagttcttactagctgtttccagagatcgaacctggtcattgtggaaaaagcaggatacaatctcacctgagttcgagccagtttttagtctttttgccttcaccaacaaaattacttctgtgcacagtagaattatttggtcttgtgattggagtcctgacagcaagtatttcttcactgggagtcgagacaaaaaggtggttgtctggggtgagtgcgactccactgatgactgtattgagcacaacattggcccctgctcctcagtcctggacgtgggtggggctgtgacagctgtcagcgtctgcccagtgctccacccttctcaacgatacgtggttgcagtaggattggagtgtggaaagatttgcttatatacctggaaaaagactgatcaagttccagaaataaatgactggacccactgtgtagaaacaagtcaaagccaaagtcatacactggctatcagaaaattatgctggaagaattgcagtggaaaaactgaacagaaggaagcagaaggtgctgagtggttacactttgcaagctgtggtgaagatcacactgtgaagatacacagagtcaataaatgtgcactgtaatggacttaataactacatgcttgcagtcactggtatcttaaaatattatcatgtaaacaggtcatctttaccttcataactgaattgagtttctgggttt

SEQ ID NO: 439203 - DNA, 1903 bp, Homo sapiens
agagcttactctggctttgccgagatggggctgccccagccagggctgtggctgaagaggctctgggtgctcttggaggtggctgtgcatgtggtcgtgggtaaagtgcttctgatattgtttccagacagagtcaagcggaacatcctggccatgggcgagaagacgggtatgaccaggaacccccatttcagccacgacaactggataccaacctttttcagcacccagtatttctggttcgtcttgaaggtccgttggcagcgactagaggacacgactgagctagggggtctggccccaaactgcccggtggtccgcctctcaggacagaggtgcaacatttgggagtttatgcaaggtaataggccactggtgctgaattttggaagttgtacctgaccttcatttatgttcaaatttgaccagttcaagaggcttattgaagactttagttccatagcagattttcttgtcatttacattgaagaagcacatgcatcagatggctgggcttttaagaacaacatggacatcagaaatcaccagaaccttcaggatcgcctgcaggcagcccatctactgctggccaggagcccccagtgccctgtggtggtggacaccatgcagaaccagagcagccagctctacgcagcactgcctgagaggctctacataatccaggagggcaggatcctctacaagggtaaatctggcccttggaactacaacccagaggaagttcgtgctgttctggaaaagctccacagttaatctggacagatacctcaattctaggtgaccaacgggagggcttctcaaggcttagctctccctgagacccagctggcttttacccttgacctgtgtccctagctgaatcactagctcagatttttctgatctaagcaaacaactcccagctgaggaatgcaggccacagcacccaatcaagacaaattgttattatcagaaaatgaagcaacacttgagctgttcaggccagttccctgttgaagaaacagttccctgttgaagaaagtagagcctgacactgctcccactttggagaccacattccctgcacacggtctttgagagagcagttgcactctacaggcacacttctgaggtacggtatctctctccagccactctgataccaagtaattcaagctggcattccttctattagggaaattcattttacccaatttgcatttatggaattgatcatttaagacactaaattagtttttagaaccaattatgggaagaattccagttgttaggaagagatgaggagttggaagaggagggattagaaacaggaggaggcagtcatcctctccttgccaaaagatttaaacctgtccacattggtggtgatgatgggtgagtttccatggtaacacatccctaattttaccagggaagaggagagtactcactttaccatctttgaatatatttcatagaaatctagctctctgtaccctgaaatcttccactagcctcacttttcaacagagtcatctagaagggagggttggcttcccaaaagcataaccttgaccaaaccaaacaataggcaccagcaatgctgtcattcagttatgcagaagctcatttgtgaaattctgtttctctgatttcttcgcaagtctcttaatggtcatttgtgttagattacatcaaactgatggatagccattggtattcatctattttaactctgtgtctttacatatttgtttatgatggccacagcctaaagtacacacggctgtgacttgattcaaaagaaaatgttataagatgcagtaaactaataacagaattattaaaatatatcaggctaaaaaaaaaagtcgacgcggcccgaaatttttttagttatgta

SEQ ID NO: 439204 - DNA, 2049 bp, Homo sapiens
aggtagaagataaggtgctgagttatctagtggctgtggcacaggaacattaagaggacaatgacagagtcaagcggaacatcctggccatgggcgagaagacgggtatgaccaggaacccccatttcagccacgacaactggataccaacctttttcagcacccagtatttctggttcgtcttgaaggtccgttggcagcgactagaggacacgactgagctagggggtctggccccaaactgcccggtggtccgcctctcaggacagaggtgcaacatttgggagtttatgcaaggtgctccttcctgcttccacccagtgactgctgccatctcctgaccccagagtgggcctggatacagacatgaggaaggtgggggtcaggtgtcacgtcccccagtgttgcatggcagctgtccccatcccgggctcgcagtgccatagtgcaattcgccaagtgactgagggtgggggaagcctcttgcccaccctttcccccatcaaggtaataggccactggtgctgaattttggaagttgtacctgaccttcatttatgttcaaatttgaccagttcaagaggcttattgaagactttagttccatagcagattttcttgtcatttacattgaagaagcacatgcatcagatggctgggcttttaagaacaacatggacatcagaaatcaccagaaccttcaggatcgcctgcaggcagcccatctactgctggccaggagcccccagtgccctgtggtggtggacaccatgcagaaccagagcagccagctctacgcagcactgcctgagaggctctacataatccaggagggcaggatcctctacaagggtaaatctggcccttggaactacaacccagaggaagttcgtgctgttctggaaaagctccacagttaatctggacagatacctcaattctaggtgaccaacgggagggcttctcaaggcttagctctccctgagacccagctggcttttacccttgacctgtgtccctagctgaatcactagctcagatttttctgatctaagcaaacaactcccagctgaggaatgcaggccacagcacccaatcaagacaaattgttattatcagaaaatgaagcaacacttgagctgttcaggccagttccctgttgaagaaacagttccctgttgaagaaagtagagcctgacactgctcccactttggagaccacattccctgcacacggtctttgagagagcagttgcactctacaggcacacttctgaggtacggtatctctctccagccactctgataccaagtaattcaagctggcattccttctattagggaaattcattttacccaatttgcatttatggaattgatcatttaagacactaaattagtttttagaaccaattatgggaagaattccagttgttaggaagagatgaggagttggaagaggagggattagaaacaggaggaggcagtcatcctctccttgccaaaagatttaaacctgtccacattggtggtgatgatgggtgagtttccatggtaacacatccctaattttaccagggaagaggagagtactcactttaccatctttgaatatatttcatagaaatctagctctctgtaccctgaaatcttccactagcctcacttttcaacagagtcatctagaagggagggttggcttcccaaaagcataaccttgaccaaaccaaacaataggcaccagcaatgctgtcattcagttatgcagaagctcatttgtgaaattctgtttctctgatttcttcgcaagtctcttaatggtcatttgtgttagattacatcaaactgatggatagccattggtattcatctattttaactctgtgtctttacatatttgtttatgatggccacagcctaaagtacacacggctgtgacttgattcaaaagaaaatgttataagatgcagtaaactaataacagaattattaaaatatatcaggctaaaaaaaaaagtcgacgcggcccgaaatttttttagttatgta

SEQ ID NO: 439205 - DNA, 1703 bp, Homo sapiens
agagcttactctggctttgccgagatggggctgccccagccagggctgtggctgaagaggctctgggtgctcttggaggtggctgtgcatgtggtcgtgggtaaagtgcttctgatattgtttccagacagagtcaagcggaacatcctggccatgggcgagaagacgggtatgaccaggaacccccatttcagccacgacaactggataccaacctttttcagcacccagtatttctggttcgtcttgaaggtccgttggcagcgactagaggacacgactgagctagggggtctggccccaaactgcccggtggtccgcctctcaggacagaggtgcaacatttgggagtttatgcaaggtaataggccactggtgctgaattttggaagttgtacctgaccttcatttatgttcaaatttgaccagttcaagaggcttattgaagactttagttccatagcagattttcttgtcatttacattgaagaagcacatgcatcagggtaaatctggcccttggaactacaacccagaggaagttcgtgctgttctggaaaagctccacagttaatctggacagatacctcaattctaggtgaccaacgggagggcttctcaaggcttagctctccctgagacccagctggcttttacccttgacctgtgtccctagctgaatcactagctcagatttttctgatctaagcaaacaactcccagctgaggaatgcaggccacagcacccaatcaagacaaattgttattatcagaaaatgaagcaacacttgagctgttcaggccagttccctgttgaagaaacagttccctgttgaagaaagtagagcctgacactgctcccactttggagaccacattccctgcacacggtctttgagagagcagttgcactctacaggcacacttctgaggtacggtatctctctccagccactctgataccaagtaattcaagctggcattccttctattagggaaattcattttacccaatttgcatttatggaattgatcatttaagacactaaattagtttttagaaccaattatgggaagaattccagttgttaggaagagatgaggagttggaagaggagggattagaaacaggaggaggcagtcatcctctccttgccaaaagatttaaacctgtccacattggtggtgatgatgggtgagtttccatggtaacacatccctaattttaccagggaagaggagagtactcactttaccatctttgaatatatttcatagaaatctagctctctgtaccctgaaatcttccactagcctcacttttcaacagagtcatctagaagggagggttggcttcccaaaagcataaccttgaccaaaccaaacaataggcaccagcaatgctgtcattcagttatgcagaagctcatttgtgaaattctgtttctctgatttcttcgcaagtctcttaatggtcatttgtgttagattacatcaaactgatggatagccattggtattcatctattttaactctgtgtctttacatatttgtttatgatggccacagcctaaagtacacacggctgtgacttgattcaaaagaaaatgttataagatgcagtaaactaataacagaattattaaaatatatcaggctaaaaaaaaaagtcgacgcggcccgaaatttttttagttatgta

SEQ ID NO: 439206 - DNA, 1897 bp, Homo sapiens
ggtcccagggaagcagggaaggcggagagagaacacttccattccagttacagttccactgaattggaagctgtaactaccacttaggcatttttggcttctcataccactgcaccagcagacagagtcaagcggaacatcctggccatgggcgagaagacgggtatgaccaggaacccccatttcagccacgacaactggataccaacctttttcagcacccagtatttctggttcgtcttgaaggtccgttggcagcgactagaggacacgactgagctagggggtctggccccaaactgcccggtggtccgcctctcaggacagaggtgcaacatttgggagtttatgcaaggtaataggccactggtgctgaattttggaagttgtacctgaccttcatttatgttcaaatttgaccagttcaagaggcttattgaagactttagttccatagcagattttcttgtcatttacattgaagaagcacatgcatcagatggctgggcttttaagaacaacatggacatcagaaatcaccagaaccttcaggatcgcctgcaggcagcccatctactgctggccaggagcccccagtgccctgtggtggtggacaccatgcagaaccagagcagccagctctacgcagcactgcctgagaggctctacataatccaggagggcaggatcctctacaagggtaaatctggcccttggaactacaacccagaggaagttcgtgctgttctggaaaagctccacagttaatctggacagatacctcaattctaggtgaccaacgggagggcttctcaaggcttagctctccctgagacccagctggcttttacccttgacctgtgtccctagctgaatcactagctcagatttttctgatctaagcaaacaactcccagctgaggaatgcaggccacagcacccaatcaagacaaattgttattatcagaaaatgaagcaacacttgagctgttcaggccagttccctgttgaagaaacagttccctgttgaagaaagtagagcctgacactgctcccactttggagaccacattccctgcacacggtctttgagagagcagttgcactctacaggcacacttctgaggtacggtatctctctccagccactctgataccaagtaattcaagctggcattccttctattagggaaattcattttacccaatttgcatttatggaattgatcatttaagacactaaattagtttttagaaccaattatgggaagaattccagttgttaggaagagatgaggagttggaagaggagggattagaaacaggaggaggcagtcatcctctccttgccaaaagatttaaacctgtccacattggtggtgatgatgggtgagtttccatggtaacacatccctaattttaccagggaagaggagagtactcactttaccatctttgaatatatttcatagaaatctagctctctgtaccctgaaatcttccactagcctcacttttcaacagagtcatctagaagggagggttggcttcccaaaagcataaccttgaccaaaccaaacaataggcaccagcaatgctgtcattcagttatgcagaagctcatttgtgaaattctgtttctctgatttcttcgcaagtctcttaatggtcatttgtgttagattacatcaaactgatggatagccattggtattcatctattttaactctgtgtctttacatatttgtttatgatggccacagcctaaagtacacacggctgtgacttgattcaaaagaaaatgttataagatgcagtaaactaataacagaattattaaaatatatcaggctaaaaaaaaaagtcgacgcggcccgaaatttttttagttatgta

SEQ ID NO: 439207 - DNA, 1995 bp, Homo sapiens
aggtagaagataaggtgctgagttatctagtggctgtggcacaggaacattaagaggacaatgacagagtcaagcggaacatcctggccatgggcgagaagacgggtatgaccaggaacccccatttcagccacgacaactggataccaacctttttcagcacccagtatttctggttcgtcttgaaggtccgttggcagcgactagaggacacgactgagctagggggtctggccccaaactgcccggtggtccgcctctcaggacagaggtgcaacatttgggagtttatgcaaggtgctccttcctgcttccacccagtgactgctgccatctcctgaccccagagtgggcctggatacagacatgaggaaggtgggggtcaggtgtcacgtcccccagtgttgcatggcagctgtccccatcccgggctcgcagtgccatagtgcaattcgccaagtgactgagggtgggggaagcctcttgcccaccctttcccccatcaaggtaataggccactggtgctgaattttggaagttgtacctgaccttcatttatgttcaaatttgaccagttcaagaggcttattgaagactttagttccatagcagattttcttgtcatttacattgaagaagcacatgcatcagatggctgggcttttaagaacaacatggacatcagaaatcaccagaaccttcaggatcgcctgcaggcagcccatctactgctggccaggagcccccagtgccctgtggtggtggacaccatgcagaaccagagcagccagctctacgcagcactgcctgagaggctctacataatccaggagggcaggatcctctacaagggtaaatctggcccttggaactacaacccagaggaagttcgtgctgttctggaggcttctcaaggcttagctctccctgagacccagctggcttttacccttgacctgtgtccctagctgaatcactagctcagatttttctgatctaagcaaacaactcccagctgaggaatgcaggccacagcacccaatcaagacaaattgttattatcagaaaatgaagcaacacttgagctgttcaggccagttccctgttgaagaaacagttccctgttgaagaaagtagagcctgacactgctcccactttggagaccacattccctgcacacggtctttgagagagcagttgcactctacaggcacacttctgaggtacggtatctctctccagccactctgataccaagtaattcaagctggcattccttctattagggaaattcattttacccaatttgcatttatggaattgatcatttaagacactaaattagtttttagaaccaattatgggaagaattccagttgttaggaagagatgaggagttggaagaggagggattagaaacaggaggaggcagtcatcctctccttgccaaaagatttaaacctgtccacattggtggtgatgatgggtgagtttccatggtaacacatccctaattttaccagggaagaggagagtactcactttaccatctttgaatatatttcatagaaatctagctctctgtaccctgaaatcttccactagcctcacttttcaacagagtcatctagaagggagggttggcttcccaaaagcataaccttgaccaaaccaaacaataggcaccagcaatgctgtcattcagttatgcagaagctcatttgtgaaattctgtttctctgatttcttcgcaagtctcttaatggtcatttgtgttagattacatcaaactgatggatagccattggtattcatctattttaactctgtgtctttacatatttgtttatgatggccacagcctaaagtacacacggctgtgacttgattcaaaagaaaatgttataagatgcagtaaactaataacagaattattaaaatatatcaggctaaaaaaaaaagtcgacgcggcccgaaatttttttagttatgta

SEQ ID NO: 439208 - DNA, 1176 bp, Homo sapiens
agcgggagtcctactcagccccagcggaggtgaaggacgtccttccccaggagccgactggccaatcacaggcaggaagatgaaggttctgtgggctgcgttgctggtcacattcctggcaggatgccaggccaaggtggagcaagcggtggagacagagccggagcccgagctgcgccagcagaccgagtggcagagcggccagcgctgggaactggcactgggtcgcttttgggattacctgcgctgggtgcagacactgtctgagcaggtgcaggaggagctgctcagctcccaggtcacccaggaactgagggcgctgatggacgagaccatgaaggagttgaaggcctacaaatcggaactggaggaacaactgaccccggtggcggaggagacgcgggcacggctgtccaaggagctgcaggcggcgcaggcccggctgggcgcggacatggaggacgtgtgcggccgcctggtgcagtaccgcggcgaggtgcaggccatgctcggccagagcaccgaggagctgcgggtgcgcctcgcctcccacctgcgcaagctgcgtaagcggctcctccgcgatgccgatgacctgcagaagcgcctggcagtgtaccaggccggggcccgcgagggcgccgagcgcggcctcagcgccatccgcgagcgcctggggcccctggtggaacagggccgcgtgcgggccgccactgtgggctccctggccggccagccgctacaggagcgggcccaggcctggggcgagcggctgcgcgcgcggatggaggagatgggcagccggacccgcgaccgcctggacgaggtgaaggagcaggtggcggaggtgcgcgccaagctggaggagcaggcccagcagatacgcctgcaggccgaggccttccaggcccgcctcaagagctggttcgagcccctggtggaagacatgcagcgccagtgggccgggctggtggagaaggtgcaggctgccgtgggcaccagcgccgcccctgtgcccagcgacaatcactgaacgccgaagcctgcagccatgcgaccccacgccaccccgtgcctcctgcctccgcgcagcctgcagcgggagaccctgtccccgccccagccgtcctcctggggtggaccctagtttaataaagattcaccaagtttcacgca

SEQ ID NO: 439209 - DNA, 154 bp, Homo sapiens
aattcaagcttctaacgatgtacggggacatgcgaccccacgccaccccgtgcctcctgcctccgcgcagcctgcagcgggagaccctgtccccgccccagccgtcctcctggggtggaccctagtttaataaagattcaccaagtttcacgca

SEQ ID NO: 439210 - DNA, 616 bp, Homo sapiens
  misc_feature (48)..(48): n is a, c, g, or t
  misc_feature (59)..(59): n is a, c, g, or t
  misc_feature (63)..(63): n is a, c, g, or t
  misc_feature (82)..(82): n is a, c, g, or t
  misc_feature (87)..(87): n is a, c, g, or t
  misc_feature (93)..(93): n is a, c, g, or t
cccgtgcgtaagcggctcctccgcgatgccgatgacctgcagaagagncctcgggtttntttnataatggcggggagacggnggggngggggngggggttttcctttatcacaccgtcggcgatttccggggaaagagcgcgtgcgggccgccactgtgggctccctggccggccagccgctacaggagcgggcccaggcctggggcgagcggctgcgcgcgcggatggaggagatgggcagccggacccgcgaccgcctggacgaggtgaaggagcaggtggcggaggtgcgcgccaagctggaggagcaggcccagcagatacgcctgcaggccgaggccttccaggcccgcctcaagagctggttcgagcccctggtggaagacatgcagcgccagtgggccgggctggtggagaaggtgcaggctgccgtgggcaccagcgccgcccctgtgcccagcgacaatcactgaacgccgaagcctgcagccatgcgaccccacgccaccccgtgcctcctgcctccgcgcagcctgcagcgggagaccctgtccccgccccagccgtcctcctggggtggaccctagtttaataaagattcaccaagtttcacgc

SEQ ID NO: 439211 - DNA, 689 bp, Homo sapiens
  misc_feature (8)..(8): n is a, c, g, or t
agcggctnctcagccccagcggaggtgaaggacgtccttccccaggagccgactggccaatcacaggcaggaagatgaaggttctgtgggctgcgttgctggtcacattcctggcaggatgccaggccaaggtggagcaagcggtggagacagagccggagcccgagctgcgccagcagaccgagtggcagagcggccagcgctgggaactggcactgggtcgcttttgggattacctgcgctgggtgcagacactgtctgagcaggtgcaggaggagctgctcagctcccaggtcacccaggaactgagggagggcgctgatggacgagaccatgaaggagttgaaggcctacaaatcggaactggaggaacaactgaccccggtggcggaggagacgcgggcacggctgtccaaggagctgcaggcggcgcaggcccggctgggcgcggacatggaggacgtgtgcggccgcctggtgcagtaccgcggcgaggtgcaggccatgctcggccagagcaccgaggagctgcgggtgcgcctcgcctcccacctgcgcaagctgcgtaagcggctcctccgcgatgccgatgacctgcagcgcctggcacggaccatgaccgttaccgcgaggtcatcgagcgcgagctagcggcatgcccgagcgcctggggcccctgatgcagggcc

SEQ ID NO: 439212 - DNA, 464 bp, Homo sapiens
  misc_feature (74)..(74): n is a, c, g, or t
  misc_feature (76)..(76): n is a, c, g, or t
agcagcggagtccctacgtcaggccccaccggtatcgtgacatgagacgtgcttcctcaggagactcgactggncnggactacccacaggcaggaagatgaaggttctgtgggctgcgttgctggtcacattcctggcaggatgccaggccaaggtggagcaagcggtggagacagagccggagcccgagctgcgccagcagaccgagtggcagagcggccagcgctgggaactggcactgggtcgcttttgggattacctgcgctgggtgcagacactgtctgagcaggtgcaggaggagctgctcagctcccaggtcacccaggaactgagggagggcgctgatggacgagaccatgaaggagttgaaggcctacaaatcggaactggaggaacaactttggactttgggccctgtttggactttgggccctgtttggactctgggccctgtttggactctg

SEQ ID NO: 439213 - DNA, 799 bp, Homo sapiens
tcgatggagagcggatccacagccccagcggaggtgaaggacgtccttccccaggagccgactggccaatcacaggcaggaagatgaaggttctgtgggctgcgttgctggtcacattcctggcaggatgccaggccaaggtggagcaagcggtggagacagagccggagcccgagctgcgccagcagaccgagtggcagagcggccagcgctgggaactggcactgggtcgcttttgggattacctgcgctgggtgcagacactgtctgagcaggtgcaggaggagctgctcagctcccaggtcacccaggaactgagggagggcgctgatggacgagaccatgaaggagttgaaggcctacaaatcggaactggaggaacaactgaccccggtggcggaggagacgcgggcacggctgtccaaggagctgcaggcggcgcaggcccggctgggcgcggacatggaggacgtgtgcggccgcctggtgcagtaccgcggcgaggtgcaggccatgctcggccagagcaccgaggagctgcgggtgcgcctcgcctcccacctgcgcaagctgcgtaagcggctcctccgcgatgccgatgacctgcagaagcgcctggcagtgtaccaggccggggcccgcgagggcgccgagcgcggcctcagcgccatccgcgagcgcctggggcccctggtggaacagggccgcggcgcagcctgcagcgggagaccctgtccccgccccagccgtcctcctggggtggaccctagtttaataaagattcaccaagtttcacgca

SEQ ID NO: 439214 - DNA, 651 bp, Homo sapiens
  misc_feature (74)..(74): n is a, c, g, or t
  misc_feature (76)..(76): n is a, c, g, or t
agcagcggagtccctacgtcaggccccaccggtatcgtgacatgagacgtgcttcctcaggagactcgactggncnggactacccacaggcaggaagatgaaggttctgtgggctgcgttgctggtcacattcctggcaggatgccaggccaaggtggagcaagcggtggagacagagccggagcccgagctgcgccagcagaccgagtggcagagcggccagcgctgggaactggcactgggtcgcttttgggattaccttgggattacctgcgctgggtgcagacactgtctgagcaggtgcaggaggagctgctcagctcccaggtcacccaggaactgagggagggcgctgatggacgagaccatgaaggagttgaaggcctacaaatcggaactggaggaacaactgaccccggtggcggcgttggatgcagtcaacgagggaaggaggcggggttggatgcagtcgactgcatccaaagccgcgtgactgcatccaacgccgcaggtgtcctaaggcgagctcagggaggacagaaacctcccgtggagcagaagggcaaaagctcggttgatcttgattttcagtacgaatacagaccgtgaaagcggggctcacgatccttctgagcttttgggttttaagca

SEQ ID NO: 439215 - DNA, 291 bp, Homo sapiens
ggagcgacaggaagagcctcatggcgaggccggaggggcactctgaatccttgctggagggcttggttgggaactcatcagccgcatcaaacagagtgaactttctgccaagatgcgggagtggttttcagagacatttcagaaagtgaaggagaaactcaagattgactcatgaggacctgaagggtgacatcccaggaggggcctctgaaatttcccacaccccagcgcctgtgctgaggactccctccatgtggccccaggtgccaccaataaaaatcctacagaaaa

SEQ ID NO: 439216 - DNA, 422 bp, Homo sapiens
cccgcagctcagccacggcacagatcagcaccagagtgcccctccggcctcgccatgaggctcttcctgtcgctcccggtcctggtggtggttctgtcgatcgtcttggaaggcccagccccagcccaggggaccccagacgtctccagtgccttggataagctgaaggagtttggaaacacactggaggacaaggctcgggaactcatcagccgcatcaaacagagtgaactttctgccaagatgcgggagtggttttcagagacatttcagaaagtgaaggagaaactcaagattgactcatgaggacctgaagggtgacatcccaggaggggcctctgaaatttcccacaccccagcgcctgtgctgaggactccctccatgtggccccaggtgccaccaataaaaatcctacagaaaa

SEQ ID NO: 439217 - DNA, 6695 bp, Homo sapiens
  misc_feature (2098)..(2098): n is a, c, g, or t
  misc_feature (2955)..(2955): n is a, c, g, or t
  misc_feature (3993)..(3993): n is a, c, g, or t
  misc_feature (4215)..(4215): n is a, c, g, or t
  misc_feature (4436)..(4436): n is a, c, g, or t
  misc_feature (4679)..(4679): n is a, c, g, or t
  misc_feature (4979)..(4979): n is a, c, g, or t
  misc_feature (5010)..(5010): n is a, c, g, or t
  misc_feature (5295)..(5295): n is a, c, g, or t
  misc_feature (5343)..(5343): n is a, c, g, or t
  misc_feature (5350)..(5350): n is a, c, g, or t
  misc_feature (5696)..(5696): n is a, c, g, or t
agcgggagtcctactcagccccagcggaggtgaaggacgtccttccccaggagccgactggccaatcacaggcaggaagatgaaggttctgtgggctgcgttgctggtcacattcctggcaggatgccaggccaaggtggagcaagcggtggagacagagccggagcccgagctgcgccagcagaccgagtggcagagcggccagcgctgggaactggcactgggtcgcttttgggattacctgcgctgggtgcagacactgtctgagcaggtgcaggaggagctgctcagctcccaggtcacccaggaactgagggcgctgatggacgagaccatgaaggagttgaaggcctacaaatcggaactggaggaacaactgaccccggtggcggaggagacgcgggcacggctgtccaaggagctgcaggcggcgcaggcccggctgggcgcggacatggaggacgtgtgcggccgcctggtgcagtaccgcggcgaggtgcaggccatgctcggccagagcaccgaggagctgcgggtgcgcctcgcctcccacctgcgcaagctgcgtaagcggctcctccgcgatgccgatgacctgcagaagcgcctggcagtgtaccaggccggggcccgcgagggcgccgagcgcggcctcagcgccatccgcgagcgcctggggcccctggtggaacagggccgcgtgcgggccgccactgtgggctccctggccggccagccgctacaggagcgggcccaggcctggggcgagcggctgcgcgcgcggatggaggagatgggcagccggacccgcgaccgcctggacgaggtgaaggagcaggtggcggaggtgcgcgccaagctggaggagcaggcccagcagatacgcctgcaggccgaggccttccaggcccgcctcaagagctggttcgagcccctggtggaagacatgcagcgccagtgggccgggctggtggagaaggtgcaggctgccgtgggcaccagcgccgcccctgtgcccagcgacaatcactgaacgccgaagcctgcagccatgcgaccccacgccaccccgtgcctcctgcctccgcgcagcctgcagcgggagaccctgtccccgccccagccgtcctcctggggtggaccctagtttaataaagattcaccaagtttcacgcatctgctggcctccccctgtatttcctctaagccccagcctcagtttctctttctgcccacatactggccacacaattctcagccccctcctctccatctgtgtctgtgtgtatctttctctctgccctttttttttttttagacggagtctggctctgtcacccaggctagagtgcagtggcacgatcttggctcactgcaacctctgcctcttgggttcaagcgattctgctgcctcagtagctgggattacaggctcacaccaccacacccggctaatttttgtatttttagtagagacgagctttcaccatgttggccaggcaggtctcaaactcctgaccaagtgatccacccgccggcctcccaaagtgctgagattacaggcctgagccaccatgcccggcctctgcccctctttcttttttagggggcagggaaaggtctcaccctgtcacccgccatcacagctcactgcagcctccacctcctggactcaagtgataagtgatcctcccgcctcagcctttccagtagctgagactacaggcgcataccactaggattaatttgggggggggtggtgtgtgtggagatggggtctggctttgttggccaggctgatgtggaattcctgggctcaagcgatactcccaccttggcctcctgagtagctgagactactggctagcaccaccacacccagctttttattattatttgtagagacaaggtctcaatatgttgcccaggctagtctcaaacccctgggctcaagagatcctccgccatcggcctcccaaagtgctgggattccaggcatggggctccgagcccggcctgcccaacttaataatacttgttcctcagagttgcaactccaaatgacctgagattggtgcctttattctaagctattttnattttttttctgctgtcattattctcccccttctctcctccagtcttatctgatatctgcctccttcccacccaccctgcaccccatcccacccctctgtctctccctgttctcctcaggagactctggcttcctgttttcctccacttctatcttttatctctccctcctacggtttcttttctttctccccggcctgcttgtttctcccccaacccccttcatctggatttcttcttctgccattcagtttggtttgagctctctgcttctccggttccctctgagctagctgtcccttcacccactgtgaactgggtttccctgcccaaccctcattctctttctttctttctttttttttttttgagacagagtcttgctctgttgcccagcctggagtgcagtggtgcaatcttggttcactgcaacctccacttcccagattcaagcaattctcctgcctcagcctccagagtagctgggattacaggcgtgtcccaccacacccgactaatttttgtatttttggtagagacaaggcttcggcattgttggccaggcaggtctcgaactcctgacctcaagtaatctgcctgcctcaccctcccaaagtgctgggattacaggcatgagccacctcacccggaccatccctcattctccatcctttcctccagttgtgatgtctacccctcatgtttcccaacaagcctactgggtgctgaatccaggctgggaagagaagggagcggctcttctgtcggagtctgcaccaggcccatgctgagacgagagctggcgctcagagaggggaagcttggatggaagcccaggagccgccggcactctcttcncctcccaccccctcagttctcagagacggggaggagggttcccaccaacgggggacaggctgagacttgagcttgtatctcctgggccagctgcaacatctgcttgtccctctgcccatcttggctcctgcacaccctgaacttggtgctttccctggcactgctctgatcacccacgtggaggcagcacccctcccctggagatgactcaccagggctgagtgaggaggggaagggtcagtgtgctcacaggcagggggcctggtctgctgggcctgctgctgattcaccgtatgtccaggagctggagcagcaccctctcagagcctcagtttccccagatgtcaatgagagaatcagcatcagccacatctcccacctgaagaatcgaaccttgagttctcacctttaagaattttttttttttttgagacagtgccttgctcagtcgaccacgctggagtgcagtagcacgatcatcaatcactgcagcctccaactcaagcaaccctcctgcctcaacctcctgagtagctggggccacaggcacccaccaccatgcctggctaattctttcttttttgagatggagtctcactctgtcgcccaggctggagtgcagtggcaccatcttggctcaccgcaaccctgccccccgggttcaagcaattctcctgcctcagcctcctgagtagctagaattacaggcgcacaccaccacaccaggctaatttttgtatttttagtagaaacgaggtttcaccacggtggtcaggttggtctcaaactcctgacatcaggtgatccacccgcctcggcctcccaaagcactgggattacaggagtgagccaccatgcctggccatattttaaacttttttgtagagatggggtcttactatgttgcccaggctgatctcaaactcttgggctcaagcagatcctcctgccaaagcttcccaaagtagttggattacaggtgtgagccaccacgccccaccaacctatgaagatgtctaagcagacagggtgccctanctcaccacatccccagtcagatccagaggtgggacaaggatgggaaggaggttccagaacaaaggctggcagggagtcgtatgggacaggagctgacccagcaaccatccacagagacatcctggagcctgggaaggagaaggacaaagagcccccttttttaaattttttttatgtttttgagacggagtctcactctgtcacccaagctggagtgcagtngcacaatcttggctcactgcaacctccacctcatgggttcaaacgactctcctgcctcagcctcctgagtagctgggaccacaggtgcacaccaccatgcctggataatttttgaatttttggtagagacggagtttcaccatgttggccaggcaggtctcgaactcctgacctcaagtgtccgcccaccttggcctcccaaagttctgggaatacaggcntgagccactgcaaccagccagtagcccccatctttgcccctcgctgagccctactggatgttcttggttatgcgacagtttccccatctattaaagagaaacccctatagcagaggggaggatgaggttggaaaagcaggagcattgttatgctattcttgtggggtctgggaagcagacatctgggtggatgtttggggggtgctgggcttagttggggaagtaggggggcccctggggctnacagggactggaagctctgagctggccagagggatgttgcaatcctgccagggtcttgtctatgctgtccttttcacaaccatccccctactgccaggctgacacgtggttgcgggggcacaaggccagccaacctagagtctgaggctaggcggaggacaccctccccaccagctgccagggtcactggcggtcaaaggcagctggtggggaaggcattggactccagccttgggggacggatgtagtgatggtgggaagcaggcttggtgccaggaggggcgtcagagggtgaataanagcagatagagtgtttgggggaggtagccanccaaagggggtgaggcccggtggaagggaagaagggacatacacgcagagctttgcagctgagggttttaattttttgagatggggtctctgtcccaccaggctggagtgcagtggcacaatcacagctcactgcagcctcgaactcctgggctcaagcaatcttcctacctcagcctcttgagtagctgggactacagcatgcgccaccacgctcggctaatttttgaattttttgtagagatgaggtctccctatattgcccaggctggtctcgaactcccangctcaagtgatcctccctcttcagcttcccaaagtgctgggattacangcatganccaccatgcctggctaatgcaggtgaggtttttgcagtgtcatccagctaaggcgacccgttcccctcccaaaaaagggagactgagaaccatgaagttaagagcccagagaatatcacggtggtctggggtgcttcaagggctggtctggaataaattggaggtggcacgcagggtaggagcgccgggccaactgggagacccagcaacataaaggaaaagttgttggggctgaggaggcttgctgagagaggggaagtgagggaaagaggtgatctagggacacggtgtgaatgagggggggatgagatcacagggttattactgggagacccctgagggaagntggccacagggacaggacaaggctgtcttcttaagggaggagaccacccctcatattgtcttatgcccaatttctgcctccaaagaaagaaaaagtaaaaactaaaaggcagaaatgaaatccacaagcagacagcccgcgccacaccctgggcctggtggttaaagattgacccctgacctaatccgttaggttatctatagattacagacattgtatagaaaagcactgtgaaaatccctattctgttttgttccgatctaattaccggtgcatgcagcccccagtcacgcatcccctgcttgttcaatcgatcacgaccctctcacgtgcacccacttagagttgtgagcccttaaaaggaacagggattgctcactcggggagctcggctcttgagacaggaatcttgcccattccccgaacgaataaaccccttccttaactcagcgtctgaggaattttgtctgcggctcctcctgctacattctgagtggggaaagggactaaggtggtctgaggaccccacagagtcaggaagattgagagcctgataaaggtcctgcgggcaggacaggacctcccaaccaagccctccagcaaggattcagagtgcccctccggcctcgccatgaggctcttcctgtcgctcccggtcctggtggtggttctgtcgatcgtcttggaaggcccagccccagcccaggggaccccagacgtctccagtgccttggataagctgaaggagtttggaaacacactggaggacaaggctcgggaactcatcagccgcatcaaacagagtgaactttctgccaagatgcgggagtggttttcagagacatttcagaaagtgaaggagaaactcaagattgactcatgaggacctgaagggtgacatcccaggaggggcctctgaaatttcccacaccccagcgcctgtgctgaggactccctccatgtggccccaggtgccaccaataaaaatcctacagaaaa

SEQ ID NO: 439218 - DNA, 7247 bp, Homo sapiens
  misc_feature (2098)..(2098): n is a, c, g, or t
  misc_feature (2955)..(2955): n is a, c, g, or t
  misc_feature (3993)..(3993): n is a, c, g, or t
  misc_feature (4215)..(4215): n is a, c, g, or t
  misc_feature (4436)..(4436): n is a, c, g, or t
  misc_feature (4679)..(4679): n is a, c, g, or t
  misc_feature (4979)..(4979): n is a, c, g, or t
  misc_feature (5010)..(5010): n is a, c, g, or t
  misc_feature (5295)..(5295): n is a, c, g, or t
  misc_feature (5343)..(5343): n is a, c, g, or t
  misc_feature (5350)..(5350): n is a, c, g, or t
  misc_feature (5696)..(5696): n is a, c, g, or t
  misc_feature (6573)..(6573): n is a, c, g, or t
agcgggagtcctactcagccccagcggaggtgaaggacgtccttccccaggagccgactggccaatcacaggcaggaagatgaaggttctgtgggctgcgttgctggtcacattcctggcaggatgccaggccaaggtggagcaagcggtggagacagagccggagcccgagctgcgccagcagaccgagtggcagagcggccagcgctgggaactggcactgggtcgcttttgggattacctgcgctgggtgcagacactgtctgagcaggtgcaggaggagctgctcagctcccaggtcacccaggaactgagggcgctgatggacgagaccatgaaggagttgaaggcctacaaatcggaactggaggaacaactgaccccggtggcggaggagacgcgggcacggctgtccaaggagctgcaggcggcgcaggcccggctgggcgcggacatggaggacgtgtgcggccgcctggtgcagtaccgcggcgaggtgcaggccatgctcggccagagcaccgaggagctgcgggtgcgcctcgcctcccacctgcgcaagctgcgtaagcggctcctccgcgatgccgatgacctgcagaagcgcctggcagtgtaccaggccggggcccgcgagggcgccgagcgcggcctcagcgccatccgcgagcgcctggggcccctggtggaacagggccgcgtgcgggccgccactgtgggctccctggccggccagccgctacaggagcgggcccaggcctggggcgagcggctgcgcgcgcggatggaggagatgggcagccggacccgcgaccgcctggacgaggtgaaggagcaggtggcggaggtgcgcgccaagctggaggagcaggcccagcagatacgcctgcaggccgaggccttccaggcccgcctcaagagctggttcgagcccctggtggaagacatgcagcgccagtgggccgggctggtggagaaggtgcaggctgccgtgggcaccagcgccgcccctgtgcccagcgacaatcactgaacgccgaagcctgcagccatgcgaccccacgccaccccgtgcctcctgcctccgcgcagcctgcagcgggagaccctgtccccgccccagccgtcctcctggggtggaccctagtttaataaagattcaccaagtttcacgcatctgctggcctccccctgtatttcctctaagccccagcctcagtttctctttctgcccacatactggccacacaattctcagccccctcctctccatctgtgtctgtgtgtatctttctctctgccctttttttttttttagacggagtctggctctgtcacccaggctagagtgcagtggcacgatcttggctcactgcaacctctgcctcttgggttcaagcgattctgctgcctcagtagctgggattacaggctcacaccaccacacccggctaatttttgtatttttagtagagacgagctttcaccatgttggccaggcaggtctcaaactcctgaccaagtgatccacccgccggcctcccaaagtgctgagattacaggcctgagccaccatgcccggcctctgcccctctttcttttttagggggcagggaaaggtctcaccctgtcacccgccatcacagctcactgcagcctccacctcctggactcaagtgataagtgatcctcccgcctcagcctttccagtagctgagactacaggcgcataccactaggattaatttgggggggggtggtgtgtgtggagatggggtctggctttgttggccaggctgatgtggaattcctgggctcaagcgatactcccaccttggcctcctgagtagctgagactactggctagcaccaccacacccagctttttattattatttgtagagacaaggtctcaatatgttgcccaggctagtctcaaacccctgggctcaagagatcctccgccatcggcctcccaaagtgctgggattccaggcatggggctccgagcccggcctgcccaacttaataatacttgttcctcagagttgcaactccaaatgacctgagattggtgcctttattctaagctattttnattttttttctgctgtcattattctcccccttctctcctccagtcttatctgatatctgcctccttcccacccaccctgcaccccatcccacccctctgtctctccctgttctcctcaggagactctggcttcctgttttcctccacttctatcttttatctctccctcctacggtttcttttctttctccccggcctgcttgtttctcccccaacccccttcatctggatttcttcttctgccattcagtttggtttgagctctctgcttctccggttccctctgagctagctgtcccttcacccactgtgaactgggtttccctgcccaaccctcattctctttctttctttctttttttttttttgagacagagtcttgctctgttgcccagcctggagtgcagtggtgcaatcttggttcactgcaacctccacttcccagattcaagcaattctcctgcctcagcctccagagtagctgggattacaggcgtgtcccaccacacccgactaatttttgtatttttggtagagacaaggcttcggcattgttggccaggcaggtctcgaactcctgacctcaagtaatctgcctgcctcaccctcccaaagtgctgggattacaggcatgagccacctcacccggaccatccctcattctccatcctttcctccagttgtgatgtctacccctcatgtttcccaacaagcctactgggtgctgaatccaggctgggaagagaagggagcggctcttctgtcggagtctgcaccaggcccatgctgagacgagagctggcgctcagagaggggaagcttggatggaagcccaggagccgccggcactctcttcncctcccaccccctcagttctcagagacggggaggagggttcccaccaacgggggacaggctgagacttgagcttgtatctcctgggccagctgcaacatctgcttgtccctctgcccatcttggctcctgcacaccctgaacttggtgctttccctggcactgctctgatcacccacgtggaggcagcacccctcccctggagatgactcaccagggctgagtgaggaggggaagggtcagtgtgctcacaggcagggggcctggtctgctgggcctgctgctgattcaccgtatgtccaggagctggagcagcaccctctcagagcctcagtttccccagatgtcaatgagagaatcagcatcagccacatctcccacctgaagaatcgaaccttgagttctcacctttaagaattttttttttttttgagacagtgccttgctcagtcgaccacgctggagtgcagtagcacgatcatcaatcactgcagcctccaactcaagcaaccctcctgcctcaacctcctgagtagctggggccacaggcacccaccaccatgcctggctaattctttcttttttgagatggagtctcactctgtcgcccaggctggagtgcagtggcaccatcttggctcaccgcaaccctgccccccgggttcaagcaattctcctgcctcagcctcctgagtagctagaattacaggcgcacaccaccacaccaggctaatttttgtatttttagtagaaacgaggtttcaccacggtggtcaggttggtctcaaactcctgacatcaggtgatccacccgcctcggcctcccaaagcactgggattacaggagtgagccaccatgcctggccatattttaaacttttttgtagagatggggtcttactatgttgcccaggctgatctcaaactcttgggctcaagcagatcctcctgccaaagcttcccaaagtagttggattacaggtgtgagccaccacgccccaccaacctatgaagatgtctaagcagacagggtgccctanctcaccacatccccagtcagatccagaggtgggacaaggatgggaaggaggttccagaacaaaggctggcagggagtcgtatgggacaggagctgacccagcaaccatccacagagacatcctggagcctgggaaggagaaggacaaagagcccccttttttaaattttttttatgtttttgagacggagtctcactctgtcacccaagctggagtgcagtngcacaatcttggctcactgcaacctccacctcatgggttcaaacgactctcctgcctcagcctcctgagtagctgggaccacaggtgcacaccaccatgcctggataatttttgaatttttggtagagacggagtttcaccatgttggccaggcaggtctcgaactcctgacctcaagtgtccgcccaccttggcctcccaaagttctgggaatacaggcntgagccactgcaaccagccagtagcccccatctttgcccctcgctgagccctactggatgttcttggttatgcgacagtttccccatctattaaagagaaacccctatagcagaggggaggatgaggttggaaaagcaggagcattgttatgctattcttgtggggtctgggaagcagacatctgggtggatgtttggggggtgctgggcttagttggggaagtaggggggcccctggggctnacagggactggaagctctgagctggccagagggatgttgcaatcctgccagggtcttgtctatgctgtccttttcacaaccatccccctactgccaggctgacacgtggttgcgggggcacaaggccagccaacctagagtctgaggctaggcggaggacaccctccccaccagctgccagggtcactggcggtcaaaggcagctggtggggaaggcattggactccagccttgggggacggatgtagtgatggtgggaagcaggcttggtgccaggaggggcgtcagagggtgaataanagcagatagagtgtttgggggaggtagccanccaaagggggtgaggcccggtggaagggaagaagggacatacacgcagagctttgcagctgagggttttaattttttgagatggggtctctgtcccaccaggctggagtgcagtggcacaatcacagctcactgcagcctcgaactcctgggctcaagcaatcttcctacctcagcctcttgagtagctgggactacagcatgcgccaccacgctcggctaatttttgaattttttgtagagatgaggtctccctatattgcccaggctggtctcgaactcccangctcaagtgatcctccctcttcagcttcccaaagtgctgggattacangcatganccaccatgcctggctaatgcaggtgaggtttttgcagtgtcatccagctaaggcgacccgttcccctcccaaaaaagggagactgagaaccatgaagttaagagcccagagaatatcacggtggtctggggtgcttcaagggctggtctggaataaattggaggtggcacgcagggtaggagcgccgggccaactgggagacccagcaacataaaggaaaagttgttggggctgaggaggcttgctgagagaggggaagtgagggaaagaggtgatctagggacacggtgtgaatgagggggggatgagatcacagggttattactgggagacccctgagggaagntggccacagggacaggacaaggctgtcttcttaagggaggagaccacccctcatattgtcttatgcccaatttctgcctccaaagaaagaaaaagtaaaaactaaaaggcagaaatgaaatccacaagcagacagcccgcgccacaccctgggcctggtggttaaagattgacccctgacctaatccgttaggttatctatagattacagacattgtatagaaaagcactgtgaaaatccctattctgttttgttccgatctaattaccggtgcatgcagcccccagtcacgcatcccctgcttgttcaatcgatcacgaccctctcacgtgcacccacttagagttgtgagcccttaaaaggaacagggattgctcactcggggagctcggctcttgagacaggaatcttgcccattccccgaacgaataaaccccttccttaactcagcgtctgaggaattttgtctgcggctcctcctgctacattctgagtggggaaagggactaaggtggtctgaggaccccacagagtcaggaagattgagaggtgagagtgctgaacggggaggggctttggggctaagggaagtgcccgggaccccacctgaccccaacgctcacgggacaggggcagaggagaaaaacgtgggtggacagagggaggcaggcggtcaggggaaggctcaggaggagggagatcaacatcaacctgccccgccccctccccagcctgataaaggtcctgcgggcaggacaggacctcccaaccaagccctccagcaaggattcaggttggtgctgagtgcctgggagggacacccgcctacactctgcaagaaactcaaaaagggagatgaggggatcgtgggagggangtagggagggaggagggtgccactgatcccctgaacccctgcctctgcctcagagtgcccctccggcctcgccatgaggctcttcctgtcgctcccggtcctggtggtggttctgtcgatcgtcttggaaggcccagccccagcccaggggaccccagacgtctccagtgccttggataagctgaaggagtttggaaacacactggaggacaaggctcgggaactcatcagccgcatcaaacagagtgaactttctgccaagatgcgggagtggttttcagagacatttcagaaagtgaaggagaaactcaagattgactcatgaggacctgaagggtgacatcccaggaggggcctctgaaatttcccacaccccagcgcctgtgctgaggactccctccatgtggccccaggtgccaccaataaaaatcctacagaaaaaaaaaaaaaaaaaaaaaaaaaaaaaaacaaaaaaaaaaaaaaaaaaaaaaaaaaaaaaaaaaaaatacaaaaataaaaaaaaagaaagagccaaatagaaaaaaaacagatcacccaaacacatggaccgacaaacagataacaaaactgctggggggggcccacacccacatacccctttacggagccagataaaaaatcaaagaccggtggtttaaaccctgaagaagggt

SEQ ID NO: 439219 - DNA, 6957 bp, Homo sapiens
  misc_feature (2098)..(2098): n is a, c, g, or t
  misc_feature (2955)..(2955): n is a, c, g, or t
  misc_feature (3993)..(3993): n is a, c, g, or t
  misc_feature (4215)..(4215): n is a, c, g, or t
  misc_feature (4436)..(4436): n is a, c, g, or t
  misc_feature (4679)..(4679): n is a, c, g, or t
  misc_feature (4979)..(4979): n is a, c, g, or t
  misc_feature (5010)..(5010): n is a, c, g, or t
  misc_feature (5295)..(5295): n is a, c, g, or t
  misc_feature (5343)..(5343): n is a, c, g, or t
  misc_feature (5350)..(5350): n is a, c, g, or t
  misc_feature (5696)..(5696): n is a, c, g, or t
  misc_feature (6731)..(6732): n is a, c, g, or t
  misc_feature (6750)..(6750): n is a, c, g, or t
  misc_feature (6754)..(6754): n is a, c, g, or t
  misc_feature (6765)..(6765): n is a, c, g, or t
  misc_feature (6769)..(6769): n is a, c, g, or t
  misc_feature (6772)..(6773): n is a, c, g, or t
  misc_feature (6775)..(6775): n is a, c, g, or t
agcgggagtcctactcagccccagcggaggtgaaggacgtccttccccaggagccgactggccaatcacaggcaggaagatgaaggttctgtgggctgcgttgctggtcacattcctggcaggatgccaggccaaggtggagcaagcggtggagacagagccggagcccgagctgcgccagcagaccgagtggcagagcggccagcgctgggaactggcactgggtcgcttttgggattacctgcgctgggtgcagacactgtctgagcaggtgcaggaggagctgctcagctcccaggtcacccaggaactgagggcgctgatggacgagaccatgaaggagttgaaggcctacaaatcggaactggaggaacaactgaccccggtggcggaggagacgcgggcacggctgtccaaggagctgcaggcggcgcaggcccggctgggcgcggacatggaggacgtgtgcggccgcctggtgcagtaccgcggcgaggtgcaggccatgctcggccagagcaccgaggagctgcgggtgcgcctcgcctcccacctgcgcaagctgcgtaagcggctcctccgcgatgccgatgacctgcagaagcgcctggcagtgtaccaggccggggcccgcgagggcgccgagcgcggcctcagcgccatccgcgagcgcctggggcccctggtggaacagggccgcgtgcgggccgccactgtgggctccctggccggccagccgctacaggagcgggcccaggcctggggcgagcggctgcgcgcgcggatggaggagatgggcagccggacccgcgaccgcctggacgaggtgaaggagcaggtggcggaggtgcgcgccaagctggaggagcaggcccagcagatacgcctgcaggccgaggccttccaggcccgcctcaagagctggttcgagcccctggtggaagacatgcagcgccagtgggccgggctggtggagaaggtgcaggctgccgtgggcaccagcgccgcccctgtgcccagcgacaatcactgaacgccgaagcctgcagccatgcgaccccacgccaccccgtgcctcctgcctccgcgcagcctgcagcgggagaccctgtccccgccccagccgtcctcctggggtggaccctagtttaataaagattcaccaagtttcacgcatctgctggcctccccctgtatttcctctaagccccagcctcagtttctctttctgcccacatactggccacacaattctcagccccctcctctccatctgtgtctgtgtgtatctttctctctgccctttttttttttttagacggagtctggctctgtcacccaggctagagtgcagtggcacgatcttggctcactgcaacctctgcctcttgggttcaagcgattctgctgcctcagtagctgggattacaggctcacaccaccacacccggctaatttttgtatttttagtagagacgagctttcaccatgttggccaggcaggtctcaaactcctgaccaagtgatccacccgccggcctcccaaagtgctgagattacaggcctgagccaccatgcccggcctctgcccctctttcttttttagggggcagggaaaggtctcaccctgtcacccgccatcacagctcactgcagcctccacctcctggactcaagtgataagtgatcctcccgcctcagcctttccagtagctgagactacaggcgcataccactaggattaatttgggggggggtggtgtgtgtggagatggggtctggctttgttggccaggctgatgtggaattcctgggctcaagcgatactcccaccttggcctcctgagtagctgagactactggctagcaccaccacacccagctttttattattatttgtagagacaaggtctcaatatgttgcccaggctagtctcaaacccctgggctcaagagatcctccgccatcggcctcccaaagtgctgggattccaggcatggggctccgagcccggcctgcccaacttaataatacttgttcctcagagttgcaactccaaatgacctgagattggtgcctttattctaagctattttnattttttttctgctgtcattattctcccccttctctcctccagtcttatctgatatctgcctccttcccacccaccctgcaccccatcccacccctctgtctctccctgttctcctcaggagactctggcttcctgttttcctccacttctatcttttatctctccctcctacggtttcttttctttctccccggcctgcttgtttctcccccaacccccttcatctggatttcttcttctgccattcagtttggtttgagctctctgcttctccggttccctctgagctagctgtcccttcacccactgtgaactgggtttccctgcccaaccctcattctctttctttctttctttttttttttttgagacagagtcttgctctgttgcccagcctggagtgcagtggtgcaatcttggttcactgcaacctccacttcccagattcaagcaattctcctgcctcagcctccagagtagctgggattacaggcgtgtcccaccacacccgactaatttttgtatttttggtagagacaaggcttcggcattgttggccaggcaggtctcgaactcctgacctcaagtaatctgcctgcctcaccctcccaaagtgctgggattacaggcatgagccacctcacccggaccatccctcattctccatcctttcctccagttgtgatgtctacccctcatgtttcccaacaagcctactgggtgctgaatccaggctgggaagagaagggagcggctcttctgtcggagtctgcaccaggcccatgctgagacgagagctggcgctcagagaggggaagcttggatggaagcccaggagccgccggcactctcttcncctcccaccccctcagttctcagagacggggaggagggttcccaccaacgggggacaggctgagacttgagcttgtatctcctgggccagctgcaacatctgcttgtccctctgcccatcttggctcctgcacaccctgaacttggtgctttccctggcactgctctgatcacccacgtggaggcagcacccctcccctggagatgactcaccagggctgagtgaggaggggaagggtcagtgtgctcacaggcagggggcctggtctgctgggcctgctgctgattcaccgtatgtccaggagctggagcagcaccctctcagagcctcagtttccccagatgtcaatgagagaatcagcatcagccacatctcccacctgaagaatcgaaccttgagttctcacctttaagaattttttttttttttgagacagtgccttgctcagtcgaccacgctggagtgcagtagcacgatcatcaatcactgcagcctccaactcaagcaaccctcctgcctcaacctcctgagtagctggggccacaggcacccaccaccatgcctggctaattctttcttttttgagatggagtctcactctgtcgcccaggctggagtgcagtggcaccatcttggctcaccgcaaccctgccccccgggttcaagcaattctcctgcctcagcctcctgagtagctagaattacaggcgcacaccaccacaccaggctaatttttgtatttttagtagaaacgaggtttcaccacggtggtcaggttggtctcaaactcctgacatcaggtgatccacccgcctcggcctcccaaagcactgggattacaggagtgagccaccatgcctggccatattttaaacttttttgtagagatggggtcttactatgttgcccaggctgatctcaaactcttgggctcaagcagatcctcctgccaaagcttcccaaagtagttggattacaggtgtgagccaccacgccccaccaacctatgaagatgtctaagcagacagggtgccctanctcaccacatccccagtcagatccagaggtgggacaaggatgggaaggaggttccagaacaaaggctggcagggagtcgtatgggacaggagctgacccagcaaccatccacagagacatcctggagcctgggaaggagaaggacaaagagcccccttttttaaattttttttatgtttttgagacggagtctcactctgtcacccaagctggagtgcagtngcacaatcttggctcactgcaacctccacctcatgggttcaaacgactctcctgcctcagcctcctgagtagctgggaccacaggtgcacaccaccatgcctggataatttttgaatttttggtagagacggagtttcaccatgttggccaggcaggtctcgaactcctgacctcaagtgtccgcccaccttggcctcccaaagttctgggaatacaggcntgagccactgcaaccagccagtagcccccatctttgcccctcgctgagccctactggatgttcttggttatgcgacagtttccccatctattaaagagaaacccctatagcagaggggaggatgaggttggaaaagcaggagcattgttatgctattcttgtggggtctgggaagcagacatctgggtggatgtttggggggtgctgggcttagttggggaagtaggggggcccctggggctnacagggactggaagctctgagctggccagagggatgttgcaatcctgccagggtcttgtctatgctgtccttttcacaaccatccccctactgccaggctgacacgtggttgcgggggcacaaggccagccaacctagagtctgaggctaggcggaggacaccctccccaccagctgccagggtcactggcggtcaaaggcagctggtggggaaggcattggactccagccttgggggacggatgtagtgatggtgggaagcaggcttggtgccaggaggggcgtcagagggtgaataanagcagatagagtgtttgggggaggtagccanccaaagggggtgaggcccggtggaagggaagaagggacatacacgcagagctttgcagctgagggttttaattttttgagatggggtctctgtcccaccaggctggagtgcagtggcacaatcacagctcactgcagcctcgaactcctgggctcaagcaatcttcctacctcagcctcttgagtagctgggactacagcatgcgccaccacgctcggctaatttttgaattttttgtagagatgaggtctccctatattgcccaggctggtctcgaactcccangctcaagtgatcctccctcttcagcttcccaaagtgctgggattacangcatganccaccatgcctggctaatgcaggtgaggtttttgcagtgtcatccagctaaggcgacccgttcccctcccaaaaaagggagactgagaaccatgaagttaagagcccagagaatatcacggtggtctggggtgcttcaagggctggtctggaataaattggaggtggcacgcagggtaggagcgccgggccaactgggagacccagcaacataaaggaaaagttgttggggctgaggaggcttgctgagagaggggaagtgagggaaagaggtgatctagggacacggtgtgaatgagggggggatgagatcacagggttattactgggagacccctgagggaagntggccacagggacaggacaaggctgtcttcttaagggaggagaccacccctcatattgtcttatgcccaatttctgcctccaaagaaagaaaaagtaaaaactaaaaggcagaaatgaaatccacaagcagacagcccgcgccacaccctgggcctggtggttaaagattgacccctgacctaatccgttaggttatctatagattacagacattgtatagaaaagcactgtgaaaatccctattctgttttgttccgatctaattaccggtgcatgcagcccccagtcacgcatcccctgcttgttcaatcgatcacgaccctctcacgtgcacccacttagagttgtgagcccttaaaaggaacagggattgctcactcggggagctcggctcttgagacaggaatcttgcccattccccgaacgaataaaccccttccttaactcagcgtctgaggaattttgtctgcggctcctcctgctacattctgagtggggaaagggactaaggtggtctgaggaccccacagagtcaggaagattgagagcctgataaaggtcctgcgggcaggacaggacctcccaaccaagccctccagcaaggattcagagtgcccctccggcctcgccatgaggctcttcctgtcgctcccggtcctggtggtggttctgtcgatcgtcttggaaggcccagccccagcccaggggaccccagacgtctccagtgccttggataagctgaaggagtttggaaacacactggaggacaaggctcgggaactcatcagccgcatcaaacagagtgaactttctgccaagatgcgggagtggttttcagagacatttcagaaagtgaaggagaaactcaagattgactcatgaggacctgaagggtgacatcccaggaggggcctctgaaatttcccacaccccagcgcctgtgctgaggactccctccatgtggccccaggtgccaccaataaaaatcctacagaaaaaaaaaaaaaaaaaaaaaaaaaaaaaaacaaaaaaanntgtgtgtggggcgcgccngggnccctggaaaanagtnttnnanaaacccttcgcgtgttggggcgcgcgggggccccaggagggggatacggtgcgaccctggggggccaacagccgggggtccacaagggagaacccgggcgcacagagagaaaaagcgggcggggagattccccacccaagttaaaaaacgcgccggggggggacccccggaggcgtctcagg

SEQ ID NO: 439220 - DNA, 1318 bp, Homo sapiens
agcgggagtcctactcagccccagcggaggtgaaggacgtccttccccaggagccgactggccaatcacaggcaggaagatgaaggttctgtgggctgcgttgctggtcacattcctggcaggatgccaggccaaggtggagcaagcggtggagacagagccggagcccgagctgcgccagcagaccgagtggcagagcggccagcgctgggaactggcactgggtcgcttttgggattacctgcgctgggtgcagacactgtctgagcaggtgcaggaggagctgctcagctcccaggtcacccaggaactgagggcgctgatggacgagaccatgaaggagttgaaggcctacaaatcggaactggaggaacaactgaccccggtggcggaggagacgcgggcacggctgtccaaggagctgcaggcggcgcaggcccggctgggcgcggacatggaggacgtgtgcggccgcctggtgcagtaccgcggcgaggtgcaggccatgctcggccagagcaccgaggagctgcgggtgcgcctcgcctcccacctgcgcaagctgcgtaagcggctcctccgcgatgccgatgacctgcagaagcgcctggcagtgtaccaggccggggcccgcgagggcgccgagcgcggcctcagcgccatccgcgagcgcctggggcccctggtggaacagggccgcgtgcgggccgccactgtgggctccctggccggccagccgctacaggagcgggcccaggcctggggcgagcggctgcgcgcgcggatggaggagatgggcagccggacccgcgaccgcctggacgaggtgaaggagcaggtggcggaggtgcgcgccaagctggaggagcaggcccagcagatacgcctgcaggccgaggccttccaggcccgcctcaagagctggttcgagcccctggtggaagacatgcagcgccagtgggccgggctggtggagaaggtgcaggctgccgtgggcaccagcgccgcccctgtgcccagcgacaatcactgaacgccgaagcctgcagccatgcgaccccacgccaccccgtgcctcctgcctccgcgcagcctgcagcgggagaccctgtccccgccccagccgtcctcctggggtggaccctagtttaataaagattcaccaagtttcacgcaaaaaaaaaaaaaaaaaaaaaaaacttcgcgggcctcatatgccgggggcgggaaagcgtttttaatggcctgggcatagggtttcctgaccattttttttcagggggactggcgccccaagggggggataatgaagcggtcg

SEQ ID NO: 439221 - DNA, 6559 bp, Homo sapiens
  misc_feature (2098)..(2098): n is a, c, g, or t
  misc_feature (2955)..(2955): n is a, c, g, or t
  misc_feature (3993)..(3993): n is a, c, g, or t
  misc_feature (4215)..(4215): n is a, c, g, or t
  misc_feature (4436)..(4436): n is a, c, g, or t
  misc_feature (4679)..(4679): n is a, c, g, or t
  misc_feature (4979)..(4979): n is a, c, g, or t
  misc_feature (5010)..(5010): n is a, c, g, or t
  misc_feature (5295)..(5295): n is a, c, g, or t
  misc_feature (5343)..(5343): n is a, c, g, or t
  misc_feature (5350)..(5350): n is a, c, g, or t
  misc_feature (5696)..(5696): n is a, c, g, or t
agcgggagtcctactcagccccagcggaggtgaaggacgtccttccccaggagccgactggccaatcacaggcaggaagatgaaggttctgtgggctgcgttgctggtcacattcctggcaggatgccaggccaaggtggagcaagcggtggagacagagccggagcccgagctgcgccagcagaccgagtggcagagcggccagcgctgggaactggcactgggtcgcttttgggattacctgcgctgggtgcagacactgtctgagcaggtgcaggaggagctgctcagctcccaggtcacccaggaactgagggcgctgatggacgagaccatgaaggagttgaaggcctacaaatcggaactggaggaacaactgaccccggtggcggaggagacgcgggcacggctgtccaaggagctgcaggcggcgcaggcccggctgggcgcggacatggaggacgtgtgcggccgcctggtgcagtaccgcggcgaggtgcaggccatgctcggccagagcaccgaggagctgcgggtgcgcctcgcctcccacctgcgcaagctgcgtaagcggctcctccgcgatgccgatgacctgcagaagcgcctggcagtgtaccaggccggggcccgcgagggcgccgagcgcggcctcagcgccatccgcgagcgcctggggcccctggtggaacagggccgcgtgcgggccgccactgtgggctccctggccggccagccgctacaggagcgggcccaggcctggggcgagcggctgcgcgcgcggatggaggagatgggcagccggacccgcgaccgcctggacgaggtgaaggagcaggtggcggaggtgcgcgccaagctggaggagcaggcccagcagatacgcctgcaggccgaggccttccaggcccgcctcaagagctggttcgagcccctggtggaagacatgcagcgccagtgggccgggctggtggagaaggtgcaggctgccgtgggcaccagcgccgcccctgtgcccagcgacaatcactgaacgccgaagcctgcagccatgcgaccccacgccaccccgtgcctcctgcctccgcgcagcctgcagcgggagaccctgtccccgccccagccgtcctcctggggtggaccctagtttaataaagattcaccaagtttcacgcatctgctggcctccccctgtatttcctctaagccccagcctcagtttctctttctgcccacatactggccacacaattctcagccccctcctctccatctgtgtctgtgtgtatctttctctctgccctttttttttttttagacggagtctggctctgtcacccaggctagagtgcagtggcacgatcttggctcactgcaacctctgcctcttgggttcaagcgattctgctgcctcagtagctgggattacaggctcacaccaccacacccggctaatttttgtatttttagtagagacgagctttcaccatgttggccaggcaggtctcaaactcctgaccaagtgatccacccgccggcctcccaaagtgctgagattacaggcctgagccaccatgcccggcctctgcccctctttcttttttagggggcagggaaaggtctcaccctgtcacccgccatcacagctcactgcagcctccacctcctggactcaagtgataagtgatcctcccgcctcagcctttccagtagctgagactacaggcgcataccactaggattaatttgggggggggtggtgtgtgtggagatggggtctggctttgttggccaggctgatgtggaattcctgggctcaagcgatactcccaccttggcctcctgagtagctgagactactggctagcaccaccacacccagctttttattattatttgtagagacaaggtctcaatatgttgcccaggctagtctcaaacccctgggctcaagagatcctccgccatcggcctcccaaagtgctgggattccaggcatggggctccgagcccggcctgcccaacttaataatacttgttcctcagagttgcaactccaaatgacctgagattggtgcctttattctaagctattttnattttttttctgctgtcattattctcccccttctctcctccagtcttatctgatatctgcctccttcccacccaccctgcaccccatcccacccctctgtctctccctgttctcctcaggagactctggcttcctgttttcctccacttctatcttttatctctccctcctacggtttcttttctttctccccggcctgcttgtttctcccccaacccccttcatctggatttcttcttctgccattcagtttggtttgagctctctgcttctccggttccctctgagctagctgtcccttcacccactgtgaactgggtttccctgcccaaccctcattctctttctttctttctttttttttttttgagacagagtcttgctctgttgcccagcctggagtgcagtggtgcaatcttggttcactgcaacctccacttcccagattcaagcaattctcctgcctcagcctccagagtagctgggattacaggcgtgtcccaccacacccgactaatttttgtatttttggtagagacaaggcttcggcattgttggccaggcaggtctcgaactcctgacctcaagtaatctgcctgcctcaccctcccaaagtgctgggattacaggcatgagccacctcacccggaccatccctcattctccatcctttcctccagttgtgatgtctacccctcatgtttcccaacaagcctactgggtgctgaatccaggctgggaagagaagggagcggctcttctgtcggagtctgcaccaggcccatgctgagacgagagctggcgctcagagaggggaagcttggatggaagcccaggagccgccggcactctcttcncctcccaccccctcagttctcagagacggggaggagggttcccaccaacgggggacaggctgagacttgagcttgtatctcctgggccagctgcaacatctgcttgtccctctgcccatcttggctcctgcacaccctgaacttggtgctttccctggcactgctctgatcacccacgtggaggcagcacccctcccctggagatgactcaccagggctgagtgaggaggggaagggtcagtgtgctcacaggcagggggcctggtctgctgggcctgctgctgattcaccgtatgtccaggagctggagcagcaccctctcagagcctcagtttccccagatgtcaatgagagaatcagcatcagccacatctcccacctgaagaatcgaaccttgagttctcacctttaagaattttttttttttttgagacagtgccttgctcagtcgaccacgctggagtgcagtagcacgatcatcaatcactgcagcctccaactcaagcaaccctcctgcctcaacctcctgagtagctggggccacaggcacccaccaccatgcctggctaattctttcttttttgagatggagtctcactctgtcgcccaggctggagtgcagtggcaccatcttggctcaccgcaaccctgccccccgggttcaagcaattctcctgcctcagcctcctgagtagctagaattacaggcgcacaccaccacaccaggctaatttttgtatttttagtagaaacgaggtttcaccacggtggtcaggttggtctcaaactcctgacatcaggtgatccacccgcctcggcctcccaaagcactgggattacaggagtgagccaccatgcctggccatattttaaacttttttgtagagatggggtcttactatgttgcccaggctgatctcaaactcttgggctcaagcagatcctcctgccaaagcttcccaaagtagttggattacaggtgtgagccaccacgccccaccaacctatgaagatgtctaagcagacagggtgccctanctcaccacatccccagtcagatccagaggtgggacaaggatgggaaggaggttccagaacaaaggctggcagggagtcgtatgggacaggagctgacccagcaaccatccacagagacatcctggagcctgggaaggagaaggacaaagagcccccttttttaaattttttttatgtttttgagacggagtctcactctgtcacccaagctggagtgcagtngcacaatcttggctcactgcaacctccacctcatgggttcaaacgactctcctgcctcagcctcctgagtagctgggaccacaggtgcacaccaccatgcctggataatttttgaatttttggtagagacggagtttcaccatgttggccaggcaggtctcgaactcctgacctcaagtgtccgcccaccttggcctcccaaagttctgggaatacaggcntgagccactgcaaccagccagtagcccccatctttgcccctcgctgagccctactggatgttcttggttatgcgacagtttccccatctattaaagagaaacccctatagcagaggggaggatgaggttggaaaagcaggagcattgttatgctattcttgtggggtctgggaagcagacatctgggtggatgtttggggggtgctgggcttagttggggaagtaggggggcccctggggctnacagggactggaagctctgagctggccagagggatgttgcaatcctgccagggtcttgtctatgctgtccttttcacaaccatccccctactgccaggctgacacgtggttgcgggggcacaaggccagccaacctagagtctgaggctaggcggaggacaccctccccaccagctgccagggtcactggcggtcaaaggcagctggtggggaaggcattggactccagccttgggggacggatgtagtgatggtgggaagcaggcttggtgccaggaggggcgtcagagggtgaataanagcagatagagtgtttgggggaggtagccanccaaagggggtgaggcccggtggaagggaagaagggacatacacgcagagctttgcagctgagggttttaattttttgagatggggtctctgtcccaccaggctggagtgcagtggcacaatcacagctcactgcagcctcgaactcctgggctcaagcaatcttcctacctcagcctcttgagtagctgggactacagcatgcgccaccacgctcggctaatttttgaattttttgtagagatgaggtctccctatattgcccaggctggtctcgaactcccangctcaagtgatcctccctcttcagcttcccaaagtgctgggattacangcatganccaccatgcctggctaatgcaggtgaggtttttgcagtgtcatccagctaaggcgacccgttcccctcccaaaaaagggagactgagaaccatgaagttaagagcccagagaatatcacggtggtctggggtgcttcaagggctggtctggaataaattggaggtggcacgcagggtaggagcgccgggccaactgggagacccagcaacataaaggaaaagttgttggggctgaggaggcttgctgagagaggggaagtgagggaaagaggtgatctagggacacggtgtgaatgagggggggatgagatcacagggttattactgggagacccctgagggaagntggccacagggacaggacaaggctgtcttcttaagggaggagaccacccctcatattgtcttatgcccaatttctgcctccaaagaaagaaaaagtaaaaactaaaaggcagaaatgaaatccacaagcagacagcccgcgccacaccctgggcctggtggttaaagattgacccctgacctaatccgttaggttatctatagattacagacattgtatagaaaagcactgtgaaaatccctattctgttttgttccgatctaattaccggtgcatgcagcccccagtcacgcatcccctgcttgttcaatcgatcacgaccctctcacgtgcacccacttagagttgtgagcccttaaaaggaacagggattgctcactcggggagctcggctcttgagacaggaatcttgcccattccccgaacgaataaaccccttccttaactcagcgtctgaggaattttgtctgcggctcctcctgctacattctgagtggggaaagggactaaggtggtctgaggaccccacagagtcaggaagattgagagcctgataaaggtcctgcgggcaggacaggacctcccaaccaagccctccagcaaggattcagagtgcccctccggcctcgccatgaggctcttcctgtcgctcccggtcctggtggtggttctgtcgatcgtcttggaagggagtggttttcagagacatttcagaaagtgaaggagaaactcaagattgactcatgaggacctgaagggtgacatcccaggaggggcctctgaaatttcccacaccccagcgcctgtgctgaggactccctccatgtggccccaggtgccaccaataaaaatcctacagaaaa

SEQ ID NO: 439222 - DNA, 6571 bp, Homo sapiens
  misc_feature (2098)..(2098): n is a, c, g, or t
  misc_feature (2955)..(2955): n is a, c, g, or t
  misc_feature (3993)..(3993): n is a, c, g, or t
  misc_feature (4215)..(4215): n is a, c, g, or t
  misc_feature (4436)..(4436): n is a, c, g, or t
  misc_feature (4679)..(4679): n is a, c, g, or t
  misc_feature (4979)..(4979): n is a, c, g, or t
  misc_feature (5010)..(5010): n is a, c, g, or t
  misc_feature (5295)..(5295): n is a, c, g, or t
  misc_feature (5343)..(5343): n is a, c, g, or t
  misc_feature (5350)..(5350): n is a, c, g, or t
  misc_feature (5696)..(5696): n is a, c, g, or t
agcgggagtcctactcagccccagcggaggtgaaggacgtccttccccaggagccgactggccaatcacaggcaggaagatgaaggttctgtgggctgcgttgctggtcacattcctggcaggatgccaggccaaggtggagcaagcggtggagacagagccggagcccgagctgcgccagcagaccgagtggcagagcggccagcgctgggaactggcactgggtcgcttttgggattacctgcgctgggtgcagacactgtctgagcaggtgcaggaggagctgctcagctcccaggtcacccaggaactgagggcgctgatggacgagaccatgaaggagttgaaggcctacaaatcggaactggaggaacaactgaccccggtggcggaggagacgcgggcacggctgtccaaggagctgcaggcggcgcaggcccggctgggcgcggacatggaggacgtgtgcggccgcctggtgcagtaccgcggcgaggtgcaggccatgctcggccagagcaccgaggagctgcgggtgcgcctcgcctcccacctgcgcaagctgcgtaagcggctcctccgcgatgccgatgacctgcagaagcgcctggcagtgtaccaggccggggcccgcgagggcgccgagcgcggcctcagcgccatccgcgagcgcctggggcccctggtggaacagggccgcgtgcgggccgccactgtgggctccctggccggccagccgctacaggagcgggcccaggcctggggcgagcggctgcgcgcgcggatggaggagatgggcagccggacccgcgaccgcctggacgaggtgaaggagcaggtggcggaggtgcgcgccaagctggaggagcaggcccagcagatacgcctgcaggccgaggccttccaggcccgcctcaagagctggttcgagcccctggtggaagacatgcagcgccagtgggccgggctggtggagaaggtgcaggctgccgtgggcaccagcgccgcccctgtgcccagcgacaatcactgaacgccgaagcctgcagccatgcgaccccacgccaccccgtgcctcctgcctccgcgcagcctgcagcgggagaccctgtccccgccccagccgtcctcctggggtggaccctagtttaataaagattcaccaagtttcacgcatctgctggcctccccctgtatttcctctaagccccagcctcagtttctctttctgcccacatactggccacacaattctcagccccctcctctccatctgtgtctgtgtgtatctttctctctgccctttttttttttttagacggagtctggctctgtcacccaggctagagtgcagtggcacgatcttggctcactgcaacctctgcctcttgggttcaagcgattctgctgcctcagtagctgggattacaggctcacaccaccacacccggctaatttttgtatttttagtagagacgagctttcaccatgttggccaggcaggtctcaaactcctgaccaagtgatccacccgccggcctcccaaagtgctgagattacaggcctgagccaccatgcccggcctctgcccctctttcttttttagggggcagggaaaggtctcaccctgtcacccgccatcacagctcactgcagcctccacctcctggactcaagtgataagtgatcctcccgcctcagcctttccagtagctgagactacaggcgcataccactaggattaatttgggggggggtggtgtgtgtggagatggggtctggctttgttggccaggctgatgtggaattcctgggctcaagcgatactcccaccttggcctcctgagtagctgagactactggctagcaccaccacacccagctttttattattatttgtagagacaaggtctcaatatgttgcccaggctagtctcaaacccctgggctcaagagatcctccgccatcggcctcccaaagtgctgggattccaggcatggggctccgagcccggcctgcccaacttaataatacttgttcctcagagttgcaactccaaatgacctgagattggtgcctttattctaagctattttnattttttttctgctgtcattattctcccccttctctcctccagtcttatctgatatctgcctccttcccacccaccctgcaccccatcccacccctctgtctctccctgttctcctcaggagactctggcttcctgttttcctccacttctatcttttatctctccctcctacggtttcttttctttctccccggcctgcttgtttctcccccaacccccttcatctggatttcttcttctgccattcagtttggtttgagctctctgcttctccggttccctctgagctagctgtcccttcacccactgtgaactgggtttccctgcccaaccctcattctctttctttctttctttttttttttttgagacagagtcttgctctgttgcccagcctggagtgcagtggtgcaatcttggttcactgcaacctccacttcccagattcaagcaattctcctgcctcagcctccagagtagctgggattacaggcgtgtcccaccacacccgactaatttttgtatttttggtagagacaaggcttcggcattgttggccaggcaggtctcgaactcctgacctcaagtaatctgcctgcctcaccctcccaaagtgctgggattacaggcatgagccacctcacccggaccatccctcattctccatcctttcctccagttgtgatgtctacccctcatgtttcccaacaagcctactgggtgctgaatccaggctgggaagagaagggagcggctcttctgtcggagtctgcaccaggcccatgctgagacgagagctggcgctcagagaggggaagcttggatggaagcccaggagccgccggcactctcttcncctcccaccccctcagttctcagagacggggaggagggttcccaccaacgggggacaggctgagacttgagcttgtatctcctgggccagctgcaacatctgcttgtccctctgcccatcttggctcctgcacaccctgaacttggtgctttccctggcactgctctgatcacccacgtggaggcagcacccctcccctggagatgactcaccagggctgagtgaggaggggaagggtcagtgtgctcacaggcagggggcctggtctgctgggcctgctgctgattcaccgtatgtccaggagctggagcagcaccctctcagagcctcagtttccccagatgtcaatgagagaatcagcatcagccacatctcccacctgaagaatcgaaccttgagttctcacctttaagaattttttttttttttgagacagtgccttgctcagtcgaccacgctggagtgcagtagcacgatcatcaatcactgcagcctccaactcaagcaaccctcctgcctcaacctcctgagtagctggggccacaggcacccaccaccatgcctggctaattctttcttttttgagatggagtctcactctgtcgcccaggctggagtgcagtggcaccatcttggctcaccgcaaccctgccccccgggttcaagcaattctcctgcctcagcctcctgagtagctagaattacaggcgcacaccaccacaccaggctaatttttgtatttttagtagaaacgaggtttcaccacggtggtcaggttggtctcaaactcctgacatcaggtgatccacccgcctcggcctcccaaagcactgggattacaggagtgagccaccatgcctggccatattttaaacttttttgtagagatggggtcttactatgttgcccaggctgatctcaaactcttgggctcaagcagatcctcctgccaaagcttcccaaagtagttggattacaggtgtgagccaccacgccccaccaacctatgaagatgtctaagcagacagggtgccctanctcaccacatccccagtcagatccagaggtgggacaaggatgggaaggaggttccagaacaaaggctggcagggagtcgtatgggacaggagctgacccagcaaccatccacagagacatcctggagcctgggaaggagaaggacaaagagcccccttttttaaattttttttatgtttttgagacggagtctcactctgtcacccaagctggagtgcagtngcacaatcttggctcactgcaacctccacctcatgggttcaaacgactctcctgcctcagcctcctgagtagctgggaccacaggtgcacaccaccatgcctggataatttttgaatttttggtagagacggagtttcaccatgttggccaggcaggtctcgaactcctgacctcaagtgtccgcccaccttggcctcccaaagttctgggaatacaggcntgagccactgcaaccagccagtagcccccatctttgcccctcgctgagccctactggatgttcttggttatgcgacagtttccccatctattaaagagaaacccctatagcagaggggaggatgaggttggaaaagcaggagcattgttatgctattcttgtggggtctgggaagcagacatctgggtggatgtttggggggtgctgggcttagttggggaagtaggggggcccctggggctnacagggactggaagctctgagctggccagagggatgttgcaatcctgccagggtcttgtctatgctgtccttttcacaaccatccccctactgccaggctgacacgtggttgcgggggcacaaggccagccaacctagagtctgaggctaggcggaggacaccctccccaccagctgccagggtcactggcggtcaaaggcagctggtggggaaggcattggactccagccttgggggacggatgtagtgatggtgggaagcaggcttggtgccaggaggggcgtcagagggtgaataanagcagatagagtgtttgggggaggtagccanccaaagggggtgaggcccggtggaagggaagaagggacatacacgcagagctttgcagctgagggttttaattttttgagatggggtctctgtcccaccaggctggagtgcagtggcacaatcacagctcactgcagcctcgaactcctgggctcaagcaatcttcctacctcagcctcttgagtagctgggactacagcatgcgccaccacgctcggctaatttttgaattttttgtagagatgaggtctccctatattgcccaggctggtctcgaactcccangctcaagtgatcctccctcttcagcttcccaaagtgctgggattacangcatganccaccatgcctggctaatgcaggtgaggtttttgcagtgtcatccagctaaggcgacccgttcccctcccaaaaaagggagactgagaaccatgaagttaagagcccagagaatatcacggtggtctggggtgcttcaagggctggtctggaataaattggaggtggcacgcagggtaggagcgccgggccaactgggagacccagcaacataaaggaaaagttgttggggctgaggaggcttgctgagagaggggaagtgagggaaagaggtgatctagggacacggtgtgaatgagggggggatgagatcacagggttattactgggagacccctgagggaagntggccacagggacaggacaaggctgtcttcttaagggaggagaccacccctcatattgtcttatgcccaatttctgcctccaaagaaagaaaaagtaaaaactaaaaggcagaaatgaaatccacaagcagacagcccgcgccacaccctgggcctggtggttaaagattgacccctgacctaatccgttaggttatctatagattacagacattgtatagaaaagcactgtgaaaatccctattctgttttgttccgatctaattaccggtgcatgcagcccccagtcacgcatcccctgcttgttcaatcgatcacgaccctctcacgtgcacccacttagagttgtgagcccttaaaaggaacagggattgctcactcggggagctcggctcttgagacaggaatcttgcccattccccgaacgaataaaccccttccttaactcagcgtctgaggaattttgtctgcggctcctcctgctacattctgagtggggaaagggactaaggtggtctgaggaccccacagagtcaggaagattgagaggtgagagtgctgaacggggaggggctttggggctaagggaagtgcccgggaccccacctgaccccaacgctcacgggacaggggcagaggagaaaaacgtgggtggacagagggaggcaggcggtcaggggaaggctcaggaggagggagatcaacatcaacctgccccgccccctccccagcctgataaaggtcctgcgggcaggacaggacctcccaaccaagccctccagcaaggatttctgaaatttcccacaccccagcgcctgtgctgaggactccctccatgtggccccaggtgccaccaataaaaatcctacagaaaa

SEQ ID NO: 439223 - DNA, 1288 bp, Homo sapiens
agcgggagccctataattggacaagtctgggagcggagtcctactcagccccagcggaggtgaaggacgtccttccccaggagccggtgagaagcgcagtcgggggcacggggatgagctcaggggcctctagaaagagctgggaccctgggaagccctggcctccagactggccaatcacaggcaggaagatgaaggttctgtgggctgcgttgctggtcacattcctggcaggatgccaggccaaggtggagcaagcggtggagacagagccggagcccgagctgcgccagcagaccgagtggcagagcggccagcgctgggaactggcactgggtcgcttttgggattacctgcgctgggtgcagacactgtctgagcaggtgcaggaggagctgctcagctcccaggtcacccaggaactgagggcgctgatggacgagaccatgaaggagttgaaggcctacaaatcggaactggaggaacaactgaccccggtggcggaggagacgcgggcacggctgtccaaggagctgcaggcggcgcaggcccggctgggcgcggacatggaggacgtgtgcggccgcctggtgcagtaccgcggcgaggtgcaggccatgctcggccagagcaccgaggagctgcgggtgcgcctcgcctcccacctgcgcaagctgcgtaagcggctcctccgcgatgccgatgacctgcagaagcgcctggcagtgtaccaggccggggcccgcgagggcgccgagcgcggcctcagcgccatccgcgagcgcctggggcccctggtggaacagggccgcgtgcgggccgccactgtgggctccctggccggccagccgctacaggagcgggcccaggcctggggcgagcggctgcgcgcgcggatggaggagatgggcagccggacccgcgaccgcctggacgaggtgaaggagcaggtggcggaggtgcgcgccaagctggaggagcaggcccagcagatacgcctgcaggccgaggccttccaggcccgcctcaagagctggttcgagcccctggtggaagacatgcagcgccagtgggccgggctggtggagaaggtgcaggctgccgtgggcaccagcgccgcccctgtgcccagcgacaatcactgaacgccgaagcctgcagccatgcgaccccacgccaccccgtgcctcctgcctccgcgcagcctgcagcgggagaccctgtccccgccccagccgtcctcctggggtggaccctagtttaataaagattcaccaagtttcacgca

SEQ ID NO: 439224 - DNA, 7042 bp, Homo sapiens
  misc_feature (2126)..(2126): n is a, c, g, or t
  misc_feature (2983)..(2983): n is a, c, g, or t
  misc_feature (4021)..(4021): n is a, c, g, or t
  misc_feature (4243)..(4243): n is a, c, g, or t
  misc_feature (4464)..(4464): n is a, c, g, or t
  misc_feature (4707)..(4707): n is a, c, g, or t
  misc_feature (5007)..(5007): n is a, c, g, or t
  misc_feature (5038)..(5038): n is a, c, g, or t
  misc_feature (5323)..(5323): n is a, c, g, or t
  misc_feature (5371)..(5371): n is a, c, g, or t
  misc_feature (5378)..(5378): n is a, c, g, or t
  misc_feature (5724)..(5724): n is a, c, g, or t
  misc_feature (6601)..(6601): n is a, c, g, or t
agcgggagtcctactcagccccagcggaggtgaaggacgtccttccccaggagccgactggccaatcacaggcaggaagatgaaggttctgtgggctgcgttgctggtcacattcctggcaggatgccaggccaaggtggagcaagcggtggagacagagccggagcccgagctgcgccagcagaccgagtggcagagcggccagcgctgggaactggcactgggtcgcttttgggattacctgcgctgggtgcagacactgtctgagcaggtgcaggaggagctgctcagctcccaggtcacccaggaactgagggcgctgatggacgagaccatgaaggagttgaaggcctacaaatcggaactggaggaacaactgaccccggtggcggaggagacgcgggcacggctgtccaaggagctgcaggcggcgcaggcccggctgggcgcggacatggaggacgtgtgcggccgcctggtgcagtaccgcggcgaggtgcaggccatgctcggccagagcaccgaggagctgcgggtgcgcctcgcctcccacctgcgcaagctgcgtaagcggctcctccgcgatgccgatgacctgcagaagcgcctggcagtgtaccaggccggggcccgcgagggcgccgagcgcggcctcagcgccatccgcgagcgcctggggcccctggtggaacagggccgcgtgcgggccgccactgtgggctccctggccggccagccgctacaggagcgggcccaggcctggggcgagcggctgcgcgcgcggatggaggagatgggcagccggacccgcgaccgcctggacgaggtgaaggagcaggtggcggaggtgcgcgccaagctggagcccggccccccccaaaaaaagggctggagagcaggcccagcagatacgcctgcaggccgaggccttccaggcccgcctcaagagctggttcgagcccctggtggaagacatgcagcgccagtgggccgggctggtggagaaggtgcaggctgccgtgggcaccagcgccgcccctgtgcccagcgacaatcactgaacgccgaagcctgcagccatgcgaccccacgccaccccgtgcctcctgcctccgcgcagcctgcagcgggagaccctgtccccgccccagccgtcctcctggggtggaccctagtttaataaagattcaccaagtttcacgcatctgctggcctccccctgtatttcctctaagccccagcctcagtttctctttctgcccacatactggccacacaattctcagccccctcctctccatctgtgtctgtgtgtatctttctctctgccctttttttttttttagacggagtctggctctgtcacccaggctagagtgcagtggcacgatcttggctcactgcaacctctgcctcttgggttcaagcgattctgctgcctcagtagctgggattacaggctcacaccaccacacccggctaatttttgtatttttagtagagacgagctttcaccatgttggccaggcaggtctcaaactcctgaccaagtgatccacccgccggcctcccaaagtgctgagattacaggcctgagccaccatgcccggcctctgcccctctttcttttttagggggcagggaaaggtctcaccctgtcacccgccatcacagctcactgcagcctccacctcctggactcaagtgataagtgatcctcccgcctcagcctttccagtagctgagactacaggcgcataccactaggattaatttgggggggggtggtgtgtgtggagatggggtctggctttgttggccaggctgatgtggaattcctgggctcaagcgatactcccaccttggcctcctgagtagctgagactactggctagcaccaccacacccagctttttattattatttgtagagacaaggtctcaatatgttgcccaggctagtctcaaacccctgggctcaagagatcctccgccatcggcctcccaaagtgctgggattccaggcatggggctccgagcccggcctgcccaacttaataatacttgttcctcagagttgcaactccaaatgacctgagattggtgcctttattctaagctattttnattttttttctgctgtcattattctcccccttctctcctccagtcttatctgatatctgcctccttcccacccaccctgcaccccatcccacccctctgtctctccctgttctcctcaggagactctggcttcctgttttcctccacttctatcttttatctctccctcctacggtttcttttctttctccccggcctgcttgtttctcccccaacccccttcatctggatttcttcttctgccattcagtttggtttgagctctctgcttctccggttccctctgagctagctgtcccttcacccactgtgaactgggtttccctgcccaaccctcattctctttctttctttctttttttttttttgagacagagtcttgctctgttgcccagcctggagtgcagtggtgcaatcttggttcactgcaacctccacttcccagattcaagcaattctcctgcctcagcctccagagtagctgggattacaggcgtgtcccaccacacccgactaatttttgtatttttggtagagacaaggcttcggcattgttggccaggcaggtctcgaactcctgacctcaagtaatctgcctgcctcaccctcccaaagtgctgggattacaggcatgagccacctcacccggaccatccctcattctccatcctttcctccagttgtgatgtctacccctcatgtttcccaacaagcctactgggtgctgaatccaggctgggaagagaagggagcggctcttctgtcggagtctgcaccaggcccatgctgagacgagagctggcgctcagagaggggaagcttggatggaagcccaggagccgccggcactctcttcncctcccaccccctcagttctcagagacggggaggagggttcccaccaacgggggacaggctgagacttgagcttgtatctcctgggccagctgcaacatctgcttgtccctctgcccatcttggctcctgcacaccctgaacttggtgctttccctggcactgctctgatcacccacgtggaggcagcacccctcccctggagatgactcaccagggctgagtgaggaggggaagggtcagtgtgctcacaggcagggggcctggtctgctgggcctgctgctgattcaccgtatgtccaggagctggagcagcaccctctcagagcctcagtttccccagatgtcaatgagagaatcagcatcagccacatctcccacctgaagaatcgaaccttgagttctcacctttaagaattttttttttttttgagacagtgccttgctcagtcgaccacgctggagtgcagtagcacgatcatcaatcactgcagcctccaactcaagcaaccctcctgcctcaacctcctgagtagctggggccacaggcacccaccaccatgcctggctaattctttcttttttgagatggagtctcactctgtcgcccaggctggagtgcagtggcaccatcttggctcaccgcaaccctgccccccgggttcaagcaattctcctgcctcagcctcctgagtagctagaattacaggcgcacaccaccacaccaggctaatttttgtatttttagtagaaacgaggtttcaccacggtggtcaggttggtctcaaactcctgacatcaggtgatccacccgcctcggcctcccaaagcactgggattacaggagtgagccaccatgcctggccatattttaaacttttttgtagagatggggtcttactatgttgcccaggctgatctcaaactcttgggctcaagcagatcctcctgccaaagcttcccaaagtagttggattacaggtgtgagccaccacgccccaccaacctatgaagatgtctaagcagacagggtgccctanctcaccacatccccagtcagatccagaggtgggacaaggatgggaaggaggttccagaacaaaggctggcagggagtcgtatgggacaggagctgacccagcaaccatccacagagacatcctggagcctgggaaggagaaggacaaagagcccccttttttaaattttttttatgtttttgagacggagtctcactctgtcacccaagctggagtgcagtngcacaatcttggctcactgcaacctccacctcatgggttcaaacgactctcctgcctcagcctcctgagtagctgggaccacaggtgcacaccaccatgcctggataatttttgaatttttggtagagacggagtttcaccatgttggccaggcaggtctcgaactcctgacctcaagtgtccgcccaccttggcctcccaaagttctgggaatacaggcntgagccactgcaaccagccagtagcccccatctttgcccctcgctgagccctactggatgttcttggttatgcgacagtttccccatctattaaagagaaacccctatagcagaggggaggatgaggttggaaaagcaggagcattgttatgctattcttgtggggtctgggaagcagacatctgggtggatgtttggggggtgctgggcttagttggggaagtaggggggcccctggggctnacagggactggaagctctgagctggccagagggatgttgcaatcctgccagggtcttgtctatgctgtccttttcacaaccatccccctactgccaggctgacacgtggttgcgggggcacaaggccagccaacctagagtctgaggctaggcggaggacaccctccccaccagctgccagggtcactggcggtcaaaggcagctggtggggaaggcattggactccagccttgggggacggatgtagtgatggtgggaagcaggcttggtgccaggaggggcgtcagagggtgaataanagcagatagagtgtttgggggaggtagccanccaaagggggtgaggcccggtggaagggaagaagggacatacacgcagagctttgcagctgagggttttaattttttgagatggggtctctgtcccaccaggctggagtgcagtggcacaatcacagctcactgcagcctcgaactcctgggctcaagcaatcttcctacctcagcctcttgagtagctgggactacagcatgcgccaccacgctcggctaatttttgaattttttgtagagatgaggtctccctatattgcccaggctggtctcgaactcccangctcaagtgatcctccctcttcagcttcccaaagtgctgggattacangcatganccaccatgcctggctaatgcaggtgaggtttttgcagtgtcatccagctaaggcgacccgttcccctcccaaaaaagggagactgagaaccatgaagttaagagcccagagaatatcacggtggtctggggtgcttcaagggctggtctggaataaattggaggtggcacgcagggtaggagcgccgggccaactgggagacccagcaacataaaggaaaagttgttggggctgaggaggcttgctgagagaggggaagtgagggaaagaggtgatctagggacacggtgtgaatgagggggggatgagatcacagggttattactgggagacccctgagggaagntggccacagggacaggacaaggctgtcttcttaagggaggagaccacccctcatattgtcttatgcccaatttctgcctccaaagaaagaaaaagtaaaaactaaaaggcagaaatgaaatccacaagcagacagcccgcgccacaccctgggcctggtggttaaagattgacccctgacctaatccgttaggttatctatagattacagacattgtatagaaaagcactgtgaaaatccctattctgttttgttccgatctaattaccggtgcatgcagcccccagtcacgcatcccctgcttgttcaatcgatcacgaccctctcacgtgcacccacttagagttgtgagcccttaaaaggaacagggattgctcactcggggagctcggctcttgagacaggaatcttgcccattccccgaacgaataaaccccttccttaactcagcgtctgaggaattttgtctgcggctcctcctgctacattctgagtggggaaagggactaaggtggtctgaggaccccacagagtcaggaagattgagaggtgagagtgctgaacggggaggggctttggggctaagggaagtgcccgggaccccacctgaccccaacgctcacgggacaggggcagaggagaaaaacgtgggtggacagagggaggcaggcggtcaggggaaggctcaggaggagggagatcaacatcaacctgccccgccccctccccagcctgataaaggtcctgcgggcaggacaggacctcccaaccaagccctccagcaaggattcaggttggtgctgagtgcctgggagggacacccgcctacactctgcaagaaactcaaaaagggagatgaggggatcgtgggagggangtagggagggaggagggtgccactgatcccctgaacccctgcctctgcctcagagtgcccctccggcctcgccatgaggctcttcctgtcgctcccggtcctggtggtggttctgtcgatcgtcttggaaggcccagccccagcccaggggaccccagacgtctccagtgccttggataagctgaaggagtttggaaacacactggaggacaaggctcgggaactcatcagccgcatcaaacagagtgaactttctgccaagatgcgggagtggttttcagagacatttcagaaagtgaaggagaaactcaagattgactcatgaggacctgaagggtgacatcccaggaggggcctctgaaatttcccacaccccagcgcctgtgctgaggactccctccatgtggccccaggtgccaccaataaaaatcctacagaaaa

SEQ ID NO: 439225 - DNA, 6981 bp, Homo sapiens
  misc_feature (2065)..(2065): n is a, c, g, or t
  misc_feature (2922)..(2922): n is a, c, g, or t
  misc_feature (3960)..(3960): n is a, c, g, or t
  misc_feature (4182)..(4182): n is a, c, g, or t
  misc_feature (4403)..(4403): n is a, c, g, or t
  misc_feature (4646)..(4646): n is a, c, g, or t
  misc_feature (4946)..(4946): n is a, c, g, or t
  misc_feature (4977)..(4977): n is a, c, g, or t
  misc_feature (5262)..(5262): n is a, c, g, or t
  misc_feature (5310)..(5310): n is a, c, g, or t
  misc_feature (5317)..(5317): n is a, c, g, or t
  misc_feature (5663)..(5663): n is a, c, g, or t
  misc_feature (6540)..(6540): n is a, c, g, or t
agcgggagtcctactcagccccagcggaggtgaaggacgtccttccccaggagccgactggccaatcacaggcaggaagatgaaggttctgtgggctgcgttgctggtcacattcctggcaggatgccaggccaaggtggagcaagcggtggagacagagccggagcccgagctgcgccagcagaccgagtggcagagcggccagcgctgggaactggcactgggtcgcttttgggattacctgcgctgggtgcagacactgtctgagcaggtgcaggaggagctgctcagctcccaggtcacccaggaactgagggcgctgatggacgagaccatgaaggagttgaaggcctacaaatcggaactggaggaacaactgaccccggtggcggaggagacgcgggcacggctgtccaaggagctgcaggcggcgcaggcccggctgggcgcggacatggaggacgtgtgcggccgcctggtgcagtaccgcggcgaggtgcaggccatgctcggccagagcaccgaggagctgcgggtgcgcctcgcctcccacctgcgcaagctgcgtaagcggctcctccgcgatgccgatgacctgcagaagcgcctggcagtgtaccaggccggggcccgcgagggcgccgagcgcggcctcagcgccatccgcgtgcgggccgccactgtgggctccctggccggccagccgctacaggagcgggcccaggcctggggcgagcggctgcgcgcgcggatggaggagatgggcagccggacccgcgaccgcctggacgaggtgaaggagcaggtggcggaggtgcgcgccaagctggaggagcaggcccagcagatacgcctgcaggccgaggccttccaggcccgcctcaagagctggttcgagcccctggtggaagacatgcagcgccagtgggccgggctggtggagaaggtgcaggctgccgtgggcaccagcgccgcccctgtgcccagcgacaatcactgaacgccgaagcctgcagccatgcgaccccacgccaccccgtgcctcctgcctccgcgcagcctgcagcgggagaccctgtccccgccccagccgtcctcctggggtggaccctagtttaataaagattcaccaagtttcacgcatctgctggcctccccctgtatttcctctaagccccagcctcagtttctctttctgcccacatactggccacacaattctcagccccctcctctccatctgtgtctgtgtgtatctttctctctgccctttttttttttttagacggagtctggctctgtcacccaggctagagtgcagtggcacgatcttggctcactgcaacctctgcctcttgggttcaagcgattctgctgcctcagtagctgggattacaggctcacaccaccacacccggctaatttttgtatttttagtagagacgagctttcaccatgttggccaggcaggtctcaaactcctgaccaagtgatccacccgccggcctcccaaagtgctgagattacaggcctgagccaccatgcccggcctctgcccctctttcttttttagggggcagggaaaggtctcaccctgtcacccgccatcacagctcactgcagcctccacctcctggactcaagtgataagtgatcctcccgcctcagcctttccagtagctgagactacaggcgcataccactaggattaatttgggggggggtggtgtgtgtggagatggggtctggctttgttggccaggctgatgtggaattcctgggctcaagcgatactcccaccttggcctcctgagtagctgagactactggctagcaccaccacacccagctttttattattatttgtagagacaaggtctcaatatgttgcccaggctagtctcaaacccctgggctcaagagatcctccgccatcggcctcccaaagtgctgggattccaggcatggggctccgagcccggcctgcccaacttaataatacttgttcctcagagttgcaactccaaatgacctgagattggtgcctttattctaagctattttnattttttttctgctgtcattattctcccccttctctcctccagtcttatctgatatctgcctccttcccacccaccctgcaccccatcccacccctctgtctctccctgttctcctcaggagactctggcttcctgttttcctccacttctatcttttatctctccctcctacggtttcttttctttctccccggcctgcttgtttctcccccaacccccttcatctggatttcttcttctgccattcagtttggtttgagctctctgcttctccggttccctctgagctagctgtcccttcacccactgtgaactgggtttccctgcccaaccctcattctctttctttctttctttttttttttttgagacagagtcttgctctgttgcccagcctggagtgcagtggtgcaatcttggttcactgcaacctccacttcccagattcaagcaattctcctgcctcagcctccagagtagctgggattacaggcgtgtcccaccacacccgactaatttttgtatttttggtagagacaaggcttcggcattgttggccaggcaggtctcgaactcctgacctcaagtaatctgcctgcctcaccctcccaaagtgctgggattacaggcatgagccacctcacccggaccatccctcattctccatcctttcctccagttgtgatgtctacccctcatgtttcccaacaagcctactgggtgctgaatccaggctgggaagagaagggagcggctcttctgtcggagtctgcaccaggcccatgctgagacgagagctggcgctcagagaggggaagcttggatggaagcccaggagccgccggcactctcttcncctcccaccccctcagttctcagagacggggaggagggttcccaccaacgggggacaggctgagacttgagcttgtatctcctgggccagctgcaacatctgcttgtccctctgcccatcttggctcctgcacaccctgaacttggtgctttccctggcactgctctgatcacccacgtggaggcagcacccctcccctggagatgactcaccagggctgagtgaggaggggaagggtcagtgtgctcacaggcagggggcctggtctgctgggcctgctgctgattcaccgtatgtccaggagctggagcagcaccctctcagagcctcagtttccccagatgtcaatgagagaatcagcatcagccacatctcccacctgaagaatcgaaccttgagttctcacctttaagaattttttttttttttgagacagtgccttgctcagtcgaccacgctggagtgcagtagcacgatcatcaatcactgcagcctccaactcaagcaaccctcctgcctcaacctcctgagtagctggggccacaggcacccaccaccatgcctggctaattctttcttttttgagatggagtctcactctgtcgcccaggctggagtgcagtggcaccatcttggctcaccgcaaccctgccccccgggttcaagcaattctcctgcctcagcctcctgagtagctagaattacaggcgcacaccaccacaccaggctaatttttgtatttttagtagaaacgaggtttcaccacggtggtcaggttggtctcaaactcctgacatcaggtgatccacccgcctcggcctcccaaagcactgggattacaggagtgagccaccatgcctggccatattttaaacttttttgtagagatggggtcttactatgttgcccaggctgatctcaaactcttgggctcaagcagatcctcctgccaaagcttcccaaagtagttggattacaggtgtgagccaccacgccccaccaacctatgaagatgtctaagcagacagggtgccctanctcaccacatccccagtcagatccagaggtgggacaaggatgggaaggaggttccagaacaaaggctggcagggagtcgtatgggacaggagctgacccagcaaccatccacagagacatcctggagcctgggaaggagaaggacaaagagcccccttttttaaattttttttatgtttttgagacggagtctcactctgtcacccaagctggagtgcagtngcacaatcttggctcactgcaacctccacctcatgggttcaaacgactctcctgcctcagcctcctgagtagctgggaccacaggtgcacaccaccatgcctggataatttttgaatttttggtagagacggagtttcaccatgttggccaggcaggtctcgaactcctgacctcaagtgtccgcccaccttggcctcccaaagttctgggaatacaggcntgagccactgcaaccagccagtagcccccatctttgcccctcgctgagccctactggatgttcttggttatgcgacagtttccccatctattaaagagaaacccctatagcagaggggaggatgaggttggaaaagcaggagcattgttatgctattcttgtggggtctgggaagcagacatctgggtggatgtttggggggtgctgggcttagttggggaagtaggggggcccctggggctnacagggactggaagctctgagctggccagagggatgttgcaatcctgccagggtcttgtctatgctgtccttttcacaaccatccccctactgccaggctgacacgtggttgcgggggcacaaggccagccaacctagagtctgaggctaggcggaggacaccctccccaccagctgccagggtcactggcggtcaaaggcagctggtggggaaggcattggactccagccttgggggacggatgtagtgatggtgggaagcaggcttggtgccaggaggggcgtcagagggtgaataanagcagatagagtgtttgggggaggtagccanccaaagggggtgaggcccggtggaagggaagaagggacatacacgcagagctttgcagctgagggttttaattttttgagatggggtctctgtcccaccaggctggagtgcagtggcacaatcacagctcactgcagcctcgaactcctgggctcaagcaatcttcctacctcagcctcttgagtagctgggactacagcatgcgccaccacgctcggctaatttttgaattttttgtagagatgaggtctccctatattgcccaggctggtctcgaactcccangctcaagtgatcctccctcttcagcttcccaaagtgctgggattacangcatganccaccatgcctggctaatgcaggtgaggtttttgcagtgtcatccagctaaggcgacccgttcccctcccaaaaaagggagactgagaaccatgaagttaagagcccagagaatatcacggtggtctggggtgcttcaagggctggtctggaataaattggaggtggcacgcagggtaggagcgccgggccaactgggagacccagcaacataaaggaaaagttgttggggctgaggaggcttgctgagagaggggaagtgagggaaagaggtgatctagggacacggtgtgaatgagggggggatgagatcacagggttattactgggagacccctgagggaagntggccacagggacaggacaaggctgtcttcttaagggaggagaccacccctcatattgtcttatgcccaatttctgcctccaaagaaagaaaaagtaaaaactaaaaggcagaaatgaaatccacaagcagacagcccgcgccacaccctgggcctggtggttaaagattgacccctgacctaatccgttaggttatctatagattacagacattgtatagaaaagcactgtgaaaatccctattctgttttgttccgatctaattaccggtgcatgcagcccccagtcacgcatcccctgcttgttcaatcgatcacgaccctctcacgtgcacccacttagagttgtgagcccttaaaaggaacagggattgctcactcggggagctcggctcttgagacaggaatcttgcccattccccgaacgaataaaccccttccttaactcagcgtctgaggaattttgtctgcggctcctcctgctacattctgagtggggaaagggactaaggtggtctgaggaccccacagagtcaggaagattgagaggtgagagtgctgaacggggaggggctttggggctaagggaagtgcccgggaccccacctgaccccaacgctcacgggacaggggcagaggagaaaaacgtgggtggacagagggaggcaggcggtcaggggaaggctcaggaggagggagatcaacatcaacctgccccgccccctccccagcctgataaaggtcctgcgggcaggacaggacctcccaaccaagccctccagcaaggattcaggttggtgctgagtgcctgggagggacacccgcctacactctgcaagaaactcaaaaagggagatgaggggatcgtgggagggangtagggagggaggagggtgccactgatcccctgaacccctgcctctgcctcagagtgcccctccggcctcgccatgaggctcttcctgtcgctcccggtcctggtggtggttctgtcgatcgtcttggaaggcccagccccagcccaggggaccccagacgtctccagtgccttggataagctgaaggagtttggaaacacactggaggacaaggctcgggaactcatcagccgcatcaaacagagtgaactttctgccaagatgcgggagtggttttcagagacatttcagaaagtgaaggagaaactcaagattgactcatgaggacctgaagggtgacatcccaggaggggcctctgaaatttcccacaccccagcgcctgtgctgaggactccctccatgtggccccaggtgccaccaataaaaatcctacagaaaa

SEQ ID NO: 439226 - DNA, 1143 bp, Homo sapiens
agcgggagtcctactcagccccagcggaggtgaaggacgtccttccccaggagccgactggccaatcacaggcaggaagatgaaggttctgtgggctgcgttgctggtcacattcctggcaggatgccaggccaaggtggagcaagcggtggagacagagccggagcccgagctgcgccagcagaccgagtggcagagcggccagcgctgggaactggcactgggtcgcttttgggattacctgcgctgggtgcagacactgtctgagcaggtgcaggaggagctgctcagctcccaggtcacccaggaactgagggcgctgatggacgagaccatgaaggagttgaaggcctacaaatcggaactggaggaacaactgaccccggtggcggaggagacgcgggcacggctgtccaaggagctgcaggcggcgcaggcccggctgggcgcggacatggaggacgtgtgcggccgcctggtgcagtaccgcggcgaggtgcaggccatgctcggccagagcaccgaggagctgcgggtgcgcctcgcctcccacctgcgcaagctgcgtaagcggctcctccgcgatgccgatgacctgcagaagcgcctggcagtgtaccaggccggggcccgcgagggcgccgagcgcggcctcagcgccatccgcgtgcgggccgccactgtgggctccctggccggccagccgctacaggagcgggcccaggcctggggcgagcggctgcgcgcgcggatggaggagatgggcagccggacccgcgaccgcctggacgaggtgaaggagcaggtggcggaggtgcgcgccaagctggaggagcaggcccagcagatacgcctgcaggccgaggccttccaggcccgcctcaagagctggttcgagcccctggtggaagacatgcagcgccagtgggccgggctggtggagaaggtgcaggctgccgtgggcaccagcgccgcccctgtgcccagcgacaatcactgaacgccgaagcctgcagccatgcgaccccacgccaccccgtgcctcctgcctccgcgcagcctgcagcgggagaccctgtccccgccccagccgtcctcctggggtggaccctagtttaataaagattcaccaagtttcacgca

SEQ ID NO: 439227 - DNA, 1042 bp, Homo sapiens
agcgggagtcctactcagccccagcggaggtgaaggacgtccttccccaggagccgactggccaatcacaggcaggaagatgaaggttctgtgggctgcgttgctggtcacattcctggcaggatgccaggccaaggtggagcaagcggtggagacagagccggagcccgagctgcgccagcagaccgagtggcagagcggccagcgctgggaactggcactgggtcgcttttgggattacctgcgctgggtgcagacactgtctgagcaggtgcaggaggagctgctcagctcccaggtcacccaggaactgagggcgctgatggacgagaccatgaaggagttgaaggcctacaaatcggaactggaggaacaactgaccccggtggcggaggagacgcgggcacggctgtccaaggagctgcaggcggcgcaggcccggctgggcgcggacatggaggacgtgtgcggccgcctggtgcagtaccgcggcgaggtgcaggccatgctcggccagagcaccgaggagctgcgggtgcgcctcgcctcccacctgcgcaagctgcgtgcgggccgccactgtgggctccctggccggccagccgctacaggagcgggcccaggcctggggcgagcggctgcgcgcgcggatggaggagatgggcagccggacccgcgaccgcctggacgaggtgaaggagcaggtggcggaggtgcgcgccaagctggaggagcaggcccagcagatacgcctgcaggccgaggccttccaggcccgcctcaagagctggttcgagcccctggtggaagacatgcagcgccagtgggccgggctggtggagaaggtgcaggctgccgtgggcaccagcgccgcccctgtgcccagcgacaatcactgaacgccgaagcctgcagccatgcgaccccacgccaccccgtgcctcctgcctccgcgcagcctgcagcgggagaccctgtccccgccccagccgtcctcctggggtggaccctagtttaataaagattcaccaagtttcacgca

SEQ ID NO: 439228 - DNA, 7011 bp, Homo sapiens
  misc_feature (2095)..(2095): n is a, c, g, or t
  misc_feature (2952)..(2952): n is a, c, g, or t
  misc_feature (3990)..(3990): n is a, c, g, or t
  misc_feature (4212)..(4212): n is a, c, g, or t
  misc_feature (4433)..(4433): n is a, c, g, or t
  misc_feature (4676)..(4676): n is a, c, g, or t
  misc_feature (4976)..(4976): n is a, c, g, or t
  misc_feature (5007)..(5007): n is a, c, g, or t
  misc_feature (5292)..(5292): n is a, c, g, or t
  misc_feature (5340)..(5340): n is a, c, g, or t
  misc_feature (5347)..(5347): n is a, c, g, or t
  misc_feature (5693)..(5693): n is a, c, g, or t
  misc_feature (6570)..(6570): n is a, c, g, or t
agcgggagccctataattggacaagtctgggagcggagtcctactcagccccagcggaggtgaaggacgtccttccccaggagccgactggccaatcacaggcaggaagatgaaggttctgtgggctgcgttgctggtcacattcctggcaggatgccaggccaaggtggagcaagcggtggagacagagccggagcccgagctgcgccagcagaccgagtggcagagcggccagcgctgggaactggcactgggtcgcttttgggattacctgcgctgggtgcagacactgtctgagcaggtgcaggaggagctgctcagctcccaggtcacccaggaactgagggcgctgatggacgagaccatgaaggagttgaaggcctacaaatcggaactggaggaacaactgaccccggtggcggaggagacgcgggcacggctgtccaaggagctgcaggcggcgcaggcccggctgggcgcggacatggaggacgtgtgcggccgcctggtgcagtaccgcggcgaggtgcaggccatgctcggccagagcaccgaggagctgcgggtgcgcctcgcctcccacctgcgcaagctgcgtaagcggctcctccgcgatgccgatgacctgcagaagcgcctggcagtgtaccaggccggggcccgcgagggcgccgagcgcggcctcagcgccatccgcgtgcgggccgccactgtgggctccctggccggccagccgctacaggagcgggcccaggcctggggcgagcggctgcgcgcgcggatggaggagatgggcagccggacccgcgaccgcctggacgaggtgaaggagcaggtggcggaggtgcgcgccaagctggaggagcaggcccagcagatacgcctgcaggccgaggccttccaggcccgcctcaagagctggttcgagcccctggtggaagacatgcagcgccagtgggccgggctggtggagaaggtgcaggctgccgtgggcaccagcgccgcccctgtgcccagcgacaatcactgaacgccgaagcctgcagccatgcgaccccacgccaccccgtgcctcctgcctccgcgcagcctgcagcgggagaccctgtccccgccccagccgtcctcctggggtggaccctagtttaataaagattcaccaagtttcacgcatctgctggcctccccctgtatttcctctaagccccagcctcagtttctctttctgcccacatactggccacacaattctcagccccctcctctccatctgtgtctgtgtgtatctttctctctgccctttttttttttttagacggagtctggctctgtcacccaggctagagtgcagtggcacgatcttggctcactgcaacctctgcctcttgggttcaagcgattctgctgcctcagtagctgggattacaggctcacaccaccacacccggctaatttttgtatttttagtagagacgagctttcaccatgttggccaggcaggtctcaaactcctgaccaagtgatccacccgccggcctcccaaagtgctgagattacaggcctgagccaccatgcccggcctctgcccctctttcttttttagggggcagggaaaggtctcaccctgtcacccgccatcacagctcactgcagcctccacctcctggactcaagtgataagtgatcctcccgcctcagcctttccagtagctgagactacaggcgcataccactaggattaatttgggggggggtggtgtgtgtggagatggggtctggctttgttggccaggctgatgtggaattcctgggctcaagcgatactcccaccttggcctcctgagtagctgagactactggctagcaccaccacacccagctttttattattatttgtagagacaaggtctcaatatgttgcccaggctagtctcaaacccctgggctcaagagatcctccgccatcggcctcccaaagtgctgggattccaggcatggggctccgagcccggcctgcccaacttaataatacttgttcctcagagttgcaactccaaatgacctgagattggtgcctttattctaagctattttnattttttttctgctgtcattattctcccccttctctcctccagtcttatctgatatctgcctccttcccacccaccctgcaccccatcccacccctctgtctctccctgttctcctcaggagactctggcttcctgttttcctccacttctatcttttatctctccctcctacggtttcttttctttctccccggcctgcttgtttctcccccaacccccttcatctggatttcttcttctgccattcagtttggtttgagctctctgcttctccggttccctctgagctagctgtcccttcacccactgtgaactgggtttccctgcccaaccctcattctctttctttctttctttttttttttttgagacagagtcttgctctgttgcccagcctggagtgcagtggtgcaatcttggttcactgcaacctccacttcccagattcaagcaattctcctgcctcagcctccagagtagctgggattacaggcgtgtcccaccacacccgactaatttttgtatttttggtagagacaaggcttcggcattgttggccaggcaggtctcgaactcctgacctcaagtaatctgcctgcctcaccctcccaaagtgctgggattacaggcatgagccacctcacccggaccatccctcattctccatcctttcctccagttgtgatgtctacccctcatgtttcccaacaagcctactgggtgctgaatccaggctgggaagagaagggagcggctcttctgtcggagtctgcaccaggcccatgctgagacgagagctggcgctcagagaggggaagcttggatggaagcccaggagccgccggcactctcttcncctcccaccccctcagttctcagagacggggaggagggttcccaccaacgggggacaggctgagacttgagcttgtatctcctgggccagctgcaacatctgcttgtccctctgcccatcttggctcctgcacaccctgaacttggtgctttccctggcactgctctgatcacccacgtggaggcagcacccctcccctggagatgactcaccagggctgagtgaggaggggaagggtcagtgtgctcacaggcagggggcctggtctgctgggcctgctgctgattcaccgtatgtccaggagctggagcagcaccctctcagagcctcagtttccccagatgtcaatgagagaatcagcatcagccacatctcccacctgaagaatcgaaccttgagttctcacctttaagaattttttttttttttgagacagtgccttgctcagtcgaccacgctggagtgcagtagcacgatcatcaatcactgcagcctccaactcaagcaaccctcctgcctcaacctcctgagtagctggggccacaggcacccaccaccatgcctggctaattctttcttttttgagatggagtctcactctgtcgcccaggctggagtgcagtggcaccatcttggctcaccgcaaccctgccccccgggttcaagcaattctcctgcctcagcctcctgagtagctagaattacaggcgcacaccaccacaccaggctaatttttgtatttttagtagaaacgaggtttcaccacggtggtcaggttggtctcaaactcctgacatcaggtgatccacccgcctcggcctcccaaagcactgggattacaggagtgagccaccatgcctggccatattttaaacttttttgtagagatggggtcttactatgttgcccaggctgatctcaaactcttgggctcaagcagatcctcctgccaaagcttcccaaagtagttggattacaggtgtgagccaccacgccccaccaacctatgaagatgtctaagcagacagggtgccctanctcaccacatccccagtcagatccagaggtgggacaaggatgggaaggaggttccagaacaaaggctggcagggagtcgtatgggacaggagctgacccagcaaccatccacagagacatcctggagcctgggaaggagaaggacaaagagcccccttttttaaattttttttatgtttttgagacggagtctcactctgtcacccaagctggagtgcagtngcacaatcttggctcactgcaacctccacctcatgggttcaaacgactctcctgcctcagcctcctgagtagctgggaccacaggtgcacaccaccatgcctggataatttttgaatttttggtagagacggagtttcaccatgttggccaggcaggtctcgaactcctgacctcaagtgtccgcccaccttggcctcccaaagttctgggaatacaggcntgagccactgcaaccagccagtagcccccatctttgcccctcgctgagccctactggatgttcttggttatgcgacagtttccccatctattaaagagaaacccctatagcagaggggaggatgaggttggaaaagcaggagcattgttatgctattcttgtggggtctgggaagcagacatctgggtggatgtttggggggtgctgggcttagttggggaagtaggggggcccctggggctnacagggactggaagctctgagctggccagagggatgttgcaatcctgccagggtcttgtctatgctgtccttttcacaaccatccccctactgccaggctgacacgtggttgcgggggcacaaggccagccaacctagagtctgaggctaggcggaggacaccctccccaccagctgccagggtcactggcggtcaaaggcagctggtggggaaggcattggactccagccttgggggacggatgtagtgatggtgggaagcaggcttggtgccaggaggggcgtcagagggtgaataanagcagatagagtgtttgggggaggtagccanccaaagggggtgaggcccggtggaagggaagaagggacatacacgcagagctttgcagctgagggttttaattttttgagatggggtctctgtcccaccaggctggagtgcagtggcacaatcacagctcactgcagcctcgaactcctgggctcaagcaatcttcctacctcagcctcttgagtagctgggactacagcatgcgccaccacgctcggctaatttttgaattttttgtagagatgaggtctccctatattgcccaggctggtctcgaactcccangctcaagtgatcctccctcttcagcttcccaaagtgctgggattacangcatganccaccatgcctggctaatgcaggtgaggtttttgcagtgtcatccagctaaggcgacccgttcccctcccaaaaaagggagactgagaaccatgaagttaagagcccagagaatatcacggtggtctggggtgcttcaagggctggtctggaataaattggaggtggcacgcagggtaggagcgccgggccaactgggagacccagcaacataaaggaaaagttgttggggctgaggaggcttgctgagagaggggaagtgagggaaagaggtgatctagggacacggtgtgaatgagggggggatgagatcacagggttattactgggagacccctgagggaagntggccacagggacaggacaaggctgtcttcttaagggaggagaccacccctcatattgtcttatgcccaatttctgcctccaaagaaagaaaaagtaaaaactaaaaggcagaaatgaaatccacaagcagacagcccgcgccacaccctgggcctggtggttaaagattgacccctgacctaatccgttaggttatctatagattacagacattgtatagaaaagcactgtgaaaatccctattctgttttgttccgatctaattaccggtgcatgcagcccccagtcacgcatcccctgcttgttcaatcgatcacgaccctctcacgtgcacccacttagagttgtgagcccttaaaaggaacagggattgctcactcggggagctcggctcttgagacaggaatcttgcccattccccgaacgaataaaccccttccttaactcagcgtctgaggaattttgtctgcggctcctcctgctacattctgagtggggaaagggactaaggtggtctgaggaccccacagagtcaggaagattgagaggtgagagtgctgaacggggaggggctttggggctaagggaagtgcccgggaccccacctgaccccaacgctcacgggacaggggcagaggagaaaaacgtgggtggacagagggaggcaggcggtcaggggaaggctcaggaggagggagatcaacatcaacctgccccgccccctccccagcctgataaaggtcctgcgggcaggacaggacctcccaaccaagccctccagcaaggattcaggttggtgctgagtgcctgggagggacacccgcctacactctgcaagaaactcaaaaagggagatgaggggatcgtgggagggangtagggagggaggagggtgccactgatcccctgaacccctgcctctgcctcagagtgcccctccggcctcgccatgaggctcttcctgtcgctcccggtcctggtggtggttctgtcgatcgtcttggaaggcccagccccagcccaggggaccccagacgtctccagtgccttggataagctgaaggagtttggaaacacactggaggacaaggctcgggaactcatcagccgcatcaaacagagtgaactttctgccaagatgcgggagtggttttcagagacatttcagaaagtgaaggagaaactcaagattgactcatgaggacctgaagggtgacatcccaggaggggcctctgaaatttcccacaccccagcgcctgtgctgaggactccctccatgtggccccaggtgccaccaataaaaatcctacagaaaa

SEQ ID NO: 439229 - DNA, 6811 bp, Homo sapiens
  misc_feature (1895)..(1895): n is a, c, g, or t
  misc_feature (2752)..(2752): n is a, c, g, or t
  misc_feature (3790)..(3790): n is a, c, g, or t
  misc_feature (4012)..(4012): n is a, c, g, or t
  misc_feature (4233)..(4233): n is a, c, g, or t
  misc_feature (4476)..(4476): n is a, c, g, or t
  misc_feature (4776)..(4776): n is a, c, g, or t
  misc_feature (4807)..(4807): n is a, c, g, or t
  misc_feature (5092)..(5092): n is a, c, g, or t
  misc_feature (5140)..(5140): n is a, c, g, or t
  misc_feature (5147)..(5147): n is a, c, g, or t
  misc_feature (5493)..(5493): n is a, c, g, or t
  misc_feature (6370)..(6370): n is a, c, g, or t
agcggacacagcccctccggatcgtcctagacgtccttccccatgagagccgactggccaatcacaggcaggaagatgaaggttctgtgggctgcgttgctggtcacattcctggcaggatgccaggccaaggtggagcaagcggtggagacagagccggagcccgagctgcgccagcagaccgagtggcagagcggccagcgctgggaactggcactgggtcgcttttgggattacctgcgctgggtgcagacactgtctgagcaggtgcaggaggagctgctcagctcccaggtcacccaggaactgagggcgctgatggacgagaccatgaaggagttgaaggcctacaaatcggaactggaggaacaactgaccccggtggcggaggagacgcgggcacggctgtccaaggagctgcaggcggcgcaggcccggctgggcgcggacatggaggacgtgtgcggccgcctggtgcagtaccgcggcgaggtgcaggccatgctcggccagagcaccgaggagctgcgggtgcgcctcgcctcccacctgcgcaagctgcgtaagcggctcctccgcgatgccgatgacctggcagccggacccgcgaccgcctggacgaggtgaaggagcaggtggcggaggtgcgcgccaagctggaggagcaggcccagcagatacgcctgcaggccgaggccttccaggcccgcctcaagagctggttcgagcccctggtggaagacatgcagcgccagtgggccgggctggtggagaaggtgcaggctgccgtgggcaccagcgccgcccctgtgcccagcgacaatcactgaacgccgaagcctgcagccatgcgaccccacgccaccccgtgcctcctgcctccgcgcagcctgcagcgggagaccctgtccccgccccagccgtcctcctggggtggaccctagtttaataaagattcaccaagtttcacgcatctgctggcctccccctgtatttcctctaagccccagcctcagtttctctttctgcccacatactggccacacaattctcagccccctcctctccatctgtgtctgtgtgtatctttctctctgccctttttttttttttagacggagtctggctctgtcacccaggctagagtgcagtggcacgatcttggctcactgcaacctctgcctcttgggttcaagcgattctgctgcctcagtagctgggattacaggctcacaccaccacacccggctaatttttgtatttttagtagagacgagctttcaccatgttggccaggcaggtctcaaactcctgaccaagtgatccacccgccggcctcccaaagtgctgagattacaggcctgagccaccatgcccggcctctgcccctctttcttttttagggggcagggaaaggtctcaccctgtcacccgccatcacagctcactgcagcctccacctcctggactcaagtgataagtgatcctcccgcctcagcctttccagtagctgagactacaggcgcataccactaggattaatttgggggggggtggtgtgtgtggagatggggtctggctttgttggccaggctgatgtggaattcctgggctcaagcgatactcccaccttggcctcctgagtagctgagactactggctagcaccaccacacccagctttttattattatttgtagagacaaggtctcaatatgttgcccaggctagtctcaaacccctgggctcaagagatcctccgccatcggcctcccaaagtgctgggattccaggcatggggctccgagcccggcctgcccaacttaataatacttgttcctcagagttgcaactccaaatgacctgagattggtgcctttattctaagctattttnattttttttctgctgtcattattctcccccttctctcctccagtcttatctgatatctgcctccttcccacccaccctgcaccccatcccacccctctgtctctccctgttctcctcaggagactctggcttcctgttttcctccacttctatcttttatctctccctcctacggtttcttttctttctccccggcctgcttgtttctcccccaacccccttcatctggatttcttcttctgccattcagtttggtttgagctctctgcttctccggttccctctgagctagctgtcccttcacccactgtgaactgggtttccctgcccaaccctcattctctttctttctttctttttttttttttgagacagagtcttgctctgttgcccagcctggagtgcagtggtgcaatcttggttcactgcaacctccacttcccagattcaagcaattctcctgcctcagcctccagagtagctgggattacaggcgtgtcccaccacacccgactaatttttgtatttttggtagagacaaggcttcggcattgttggccaggcaggtctcgaactcctgacctcaagtaatctgcctgcctcaccctcccaaagtgctgggattacaggcatgagccacctcacccggaccatccctcattctccatcctttcctccagttgtgatgtctacccctcatgtttcccaacaagcctactgggtgctgaatccaggctgggaagagaagggagcggctcttctgtcggagtctgcaccaggcccatgctgagacgagagctggcgctcagagaggggaagcttggatggaagcccaggagccgccggcactctcttcncctcccaccccctcagttctcagagacggggaggagggttcccaccaacgggggacaggctgagacttgagcttgtatctcctgggccagctgcaacatctgcttgtccctctgcccatcttggctcctgcacaccctgaacttggtgctttccctggcactgctctgatcacccacgtggaggcagcacccctcccctggagatgactcaccagggctgagtgaggaggggaagggtcagtgtgctcacaggcagggggcctggtctgctgggcctgctgctgattcaccgtatgtccaggagctggagcagcaccctctcagagcctcagtttccccagatgtcaatgagagaatcagcatcagccacatctcccacctgaagaatcgaaccttgagttctcacctttaagaattttttttttttttgagacagtgccttgctcagtcgaccacgctggagtgcagtagcacgatcatcaatcactgcagcctccaactcaagcaaccctcctgcctcaacctcctgagtagctggggccacaggcacccaccaccatgcctggctaattctttcttttttgagatggagtctcactctgtcgcccaggctggagtgcagtggcaccatcttggctcaccgcaaccctgccccccgggttcaagcaattctcctgcctcagcctcctgagtagctagaattacaggcgcacaccaccacaccaggctaatttttgtatttttagtagaaacgaggtttcaccacggtggtcaggttggtctcaaactcctgacatcaggtgatccacccgcctcggcctcccaaagcactgggattacaggagtgagccaccatgcctggccatattttaaacttttttgtagagatggggtcttactatgttgcccaggctgatctcaaactcttgggctcaagcagatcctcctgccaaagcttcccaaagtagttggattacaggtgtgagccaccacgccccaccaacctatgaagatgtctaagcagacagggtgccctanctcaccacatccccagtcagatccagaggtgggacaaggatgggaaggaggttccagaacaaaggctggcagggagtcgtatgggacaggagctgacccagcaaccatccacagagacatcctggagcctgggaaggagaaggacaaagagcccccttttttaaattttttttatgtttttgagacggagtctcactctgtcacccaagctggagtgcagtngcacaatcttggctcactgcaacctccacctcatgggttcaaacgactctcctgcctcagcctcctgagtagctgggaccacaggtgcacaccaccatgcctggataatttttgaatttttggtagagacggagtttcaccatgttggccaggcaggtctcgaactcctgacctcaagtgtccgcccaccttggcctcccaaagttctgggaatacaggcntgagccactgcaaccagccagtagcccccatctttgcccctcgctgagccctactggatgttcttggttatgcgacagtttccccatctattaaagagaaacccctatagcagaggggaggatgaggttggaaaagcaggagcattgttatgctattcttgtggggtctgggaagcagacatctgggtggatgtttggggggtgctgggcttagttggggaagtaggggggcccctggggctnacagggactggaagctctgagctggccagagggatgttgcaatcctgccagggtcttgtctatgctgtccttttcacaaccatccccctactgccaggctgacacgtggttgcgggggcacaaggccagccaacctagagtctgaggctaggcggaggacaccctccccaccagctgccagggtcactggcggtcaaaggcagctggtggggaaggcattggactccagccttgggggacggatgtagtgatggtgggaagcaggcttggtgccaggaggggcgtcagagggtgaataanagcagatagagtgtttgggggaggtagccanccaaagggggtgaggcccggtggaagggaagaagggacatacacgcagagctttgcagctgagggttttaattttttgagatggggtctctgtcccaccaggctggagtgcagtggcacaatcacagctcactgcagcctcgaactcctgggctcaagcaatcttcctacctcagcctcttgagtagctgggactacagcatgcgccaccacgctcggctaatttttgaattttttgtagagatgaggtctccctatattgcccaggctggtctcgaactcccangctcaagtgatcctccctcttcagcttcccaaagtgctgggattacangcatganccaccatgcctggctaatgcaggtgaggtttttgcagtgtcatccagctaaggcgacccgttcccctcccaaaaaagggagactgagaaccatgaagttaagagcccagagaatatcacggtggtctggggtgcttcaagggctggtctggaataaattggaggtggcacgcagggtaggagcgccgggccaactgggagacccagcaacataaaggaaaagttgttggggctgaggaggcttgctgagagaggggaagtgagggaaagaggtgatctagggacacggtgtgaatgagggggggatgagatcacagggttattactgggagacccctgagggaagntggccacagggacaggacaaggctgtcttcttaagggaggagaccacccctcatattgtcttatgcccaatttctgcctccaaagaaagaaaaagtaaaaactaaaaggcagaaatgaaatccacaagcagacagcccgcgccacaccctgggcctggtggttaaagattgacccctgacctaatccgttaggttatctatagattacagacattgtatagaaaagcactgtgaaaatccctattctgttttgttccgatctaattaccggtgcatgcagcccccagtcacgcatcccctgcttgttcaatcgatcacgaccctctcacgtgcacccacttagagttgtgagcccttaaaaggaacagggattgctcactcggggagctcggctcttgagacaggaatcttgcccattccccgaacgaataaaccccttccttaactcagcgtctgaggaattttgtctgcggctcctcctgctacattctgagtggggaaagggactaaggtggtctgaggaccccacagagtcaggaagattgagaggtgagagtgctgaacggggaggggctttggggctaagggaagtgcccgggaccccacctgaccccaacgctcacgggacaggggcagaggagaaaaacgtgggtggacagagggaggcaggcggtcaggggaaggctcaggaggagggagatcaacatcaacctgccccgccccctccccagcctgataaaggtcctgcgggcaggacaggacctcccaaccaagccctccagcaaggattcaggttggtgctgagtgcctgggagggacacccgcctacactctgcaagaaactcaaaaagggagatgaggggatcgtgggagggangtagggagggaggagggtgccactgatcccctgaacccctgcctctgcctcagagtgcccctccggcctcgccatgaggctcttcctgtcgctcccggtcctggtggtggttctgtcgatcgtcttggaaggcccagccccagcccaggggaccccagacgtctccagtgccttggataagctgaaggagtttggaaacacactggaggacaaggctcgggaactcatcagccgcatcaaacagagtgaactttctgccaagatgcgggagtggttttcagagacatttcagaaagtgaaggagaaactcaagattgactcatgaggacctgaagggtgacatcccaggaggggcctctgaaatttcccacaccccagcgcctgtgctgaggactccctccatgtggccccaggtgccaccaataaaaatcctacagaaaa

SEQ ID NO: 439230 - DNA, 6399 bp, Homo sapiens
  misc_feature (1483)..(1483): n is a, c, g, or t
  misc_feature (2340)..(2340): n is a, c, g, or t
  misc_feature (3378)..(3378): n is a, c, g, or t
  misc_feature (3600)..(3600): n is a, c, g, or t
  misc_feature (3821)..(3821): n is a, c, g, or t
  misc_feature (4064)..(4064): n is a, c, g, or t
  misc_feature (4364)..(4364): n is a, c, g, or t
  misc_feature (4395)..(4395): n is a, c, g, or t
  misc_feature (4680)..(4680): n is a, c, g, or t
  misc_feature (4728)..(4728): n is a, c, g, or t
  misc_feature (4735)..(4735): n is a, c, g, or t
  misc_feature (5081)..(5081): n is a, c, g, or t
  misc_feature (5958)..(5958): n is a, c, g, or t
agcgggagtcctactcagccccagcggaggtgaaggacgtccttccccaggagccgactggccaatcacaggcaggaagatgaaggttctgtgggctgcgttgctggtcacattcctggcaggatgccaggccaaggtggagcaagcggtggagacagagccggagcccgagctgcgccagcagaccgagtggcagagcggccagcgctgggaactggcactgggtcgcttttgggattacctgcgctgggtgcagacactgtctgagcaggtgcaggaggagctgctcagctcccaggtcacccaggaactgagggccctggtggaagacatgcagcgccagtgggccgggctggtggagaaggtgcaggctgccgtgggcaccagcgccgcccctgtgcccagcgacaatcactgaacgccgaagcctgcagccatgcgaccccacgccaccccgtgcctcctgcctccgcgcagcctgcagcgggagaccctgtccccgccccagccgtcctcctggggtggaccctagtttaataaagattcaccaagtttcacgcatctgctggcctccccctgtatttcctctaagccccagcctcagtttctctttctgcccacatactggccacacaattctcagccccctcctctccatctgtgtctgtgtgtatctttctctctgccctttttttttttttagacggagtctggctctgtcacccaggctagagtgcagtggcacgatcttggctcactgcaacctctgcctcttgggttcaagcgattctgctgcctcagtagctgggattacaggctcacaccaccacacccggctaatttttgtatttttagtagagacgagctttcaccatgttggccaggcaggtctcaaactcctgaccaagtgatccacccgccggcctcccaaagtgctgagattacaggcctgagccaccatgcccggcctctgcccctctttcttttttagggggcagggaaaggtctcaccctgtcacccgccatcacagctcactgcagcctccacctcctggactcaagtgataagtgatcctcccgcctcagcctttccagtagctgagactacaggcgcataccactaggattaatttgggggggggtggtgtgtgtggagatggggtctggctttgttggccaggctgatgtggaattcctgggctcaagcgatactcccaccttggcctcctgagtagctgagactactggctagcaccaccacacccagctttttattattatttgtagagacaaggtctcaatatgttgcccaggctagtctcaaacccctgggctcaagagatcctccgccatcggcctcccaaagtgctgggattccaggcatggggctccgagcccggcctgcccaacttaataatacttgttcctcagagttgcaactccaaatgacctgagattggtgcctttattctaagctattttnattttttttctgctgtcattattctcccccttctctcctccagtcttatctgatatctgcctccttcccacccaccctgcaccccatcccacccctctgtctctccctgttctcctcaggagactctggcttcctgttttcctccacttctatcttttatctctccctcctacggtttcttttctttctccccggcctgcttgtttctcccccaacccccttcatctggatttcttcttctgccattcagtttggtttgagctctctgcttctccggttccctctgagctagctgtcccttcacccactgtgaactgggtttccctgcccaaccctcattctctttctttctttctttttttttttttgagacagagtcttgctctgttgcccagcctggagtgcagtggtgcaatcttggttcactgcaacctccacttcccagattcaagcaattctcctgcctcagcctccagagtagctgggattacaggcgtgtcccaccacacccgactaatttttgtatttttggtagagacaaggcttcggcattgttggccaggcaggtctcgaactcctgacctcaagtaatctgcctgcctcaccctcccaaagtgctgggattacaggcatgagccacctcacccggaccatccctcattctccatcctttcctccagttgtgatgtctacccctcatgtttcccaacaagcctactgggtgctgaatccaggctgggaagagaagggagcggctcttctgtcggagtctgcaccaggcccatgctgagacgagagctggcgctcagagaggggaagcttggatggaagcccaggagccgccggcactctcttcncctcccaccccctcagttctcagagacggggaggagggttcccaccaacgggggacaggctgagacttgagcttgtatctcctgggccagctgcaacatctgcttgtccctctgcccatcttggctcctgcacaccctgaacttggtgctttccctggcactgctctgatcacccacgtggaggcagcacccctcccctggagatgactcaccagggctgagtgaggaggggaagggtcagtgtgctcacaggcagggggcctggtctgctgggcctgctgctgattcaccgtatgtccaggagctggagcagcaccctctcagagcctcagtttccccagatgtcaatgagagaatcagcatcagccacatctcccacctgaagaatcgaaccttgagttctcacctttaagaattttttttttttttgagacagtgccttgctcagtcgaccacgctggagtgcagtagcacgatcatcaatcactgcagcctccaactcaagcaaccctcctgcctcaacctcctgagtagctggggccacaggcacccaccaccatgcctggctaattctttcttttttgagatggagtctcactctgtcgcccaggctggagtgcagtggcaccatcttggctcaccgcaaccctgccccccgggttcaagcaattctcctgcctcagcctcctgagtagctagaattacaggcgcacaccaccacaccaggctaatttttgtatttttagtagaaacgaggtttcaccacggtggtcaggttggtctcaaactcctgacatcaggtgatccacccgcctcggcctcccaaagcactgggattacaggagtgagccaccatgcctggccatattttaaacttttttgtagagatggggtcttactatgttgcccaggctgatctcaaactcttgggctcaagcagatcctcctgccaaagcttcccaaagtagttggattacaggtgtgagccaccacgccccaccaacctatgaagatgtctaagcagacagggtgccctanctcaccacatccccagtcagatccagaggtgggacaaggatgggaaggaggttccagaacaaaggctggcagggagtcgtatgggacaggagctgacccagcaaccatccacagagacatcctggagcctgggaaggagaaggacaaagagcccccttttttaaattttttttatgtttttgagacggagtctcactctgtcacccaagctggagtgcagtngcacaatcttggctcactgcaacctccacctcatgggttcaaacgactctcctgcctcagcctcctgagtagctgggaccacaggtgcacaccaccatgcctggataatttttgaatttttggtagagacggagtttcaccatgttggccaggcaggtctcgaactcctgacctcaagtgtccgcccaccttggcctcccaaagttctgggaatacaggcntgagccactgcaaccagccagtagcccccatctttgcccctcgctgagccctactggatgttcttggttatgcgacagtttccccatctattaaagagaaacccctatagcagaggggaggatgaggttggaaaagcaggagcattgttatgctattcttgtggggtctgggaagcagacatctgggtggatgtttggggggtgctgggcttagttggggaagtaggggggcccctggggctnacagggactggaagctctgagctggccagagggatgttgcaatcctgccagggtcttgtctatgctgtccttttcacaaccatccccctactgccaggctgacacgtggttgcgggggcacaaggccagccaacctagagtctgaggctaggcggaggacaccctccccaccagctgccagggtcactggcggtcaaaggcagctggtggggaaggcattggactccagccttgggggacggatgtagtgatggtgggaagcaggcttggtgccaggaggggcgtcagagggtgaataanagcagatagagtgtttgggggaggtagccanccaaagggggtgaggcccggtggaagggaagaagggacatacacgcagagctttgcagctgagggttttaattttttgagatggggtctctgtcccaccaggctggagtgcagtggcacaatcacagctcactgcagcctcgaactcctgggctcaagcaatcttcctacctcagcctcttgagtagctgggactacagcatgcgccaccacgctcggctaatttttgaattttttgtagagatgaggtctccctatattgcccaggctggtctcgaactcccangctcaagtgatcctccctcttcagcttcccaaagtgctgggattacangcatganccaccatgcctggctaatgcaggtgaggtttttgcagtgtcatccagctaaggcgacccgttcccctcccaaaaaagggagactgagaaccatgaagttaagagcccagagaatatcacggtggtctggggtgcttcaagggctggtctggaataaattggaggtggcacgcagggtaggagcgccgggccaactgggagacccagcaacataaaggaaaagttgttggggctgaggaggcttgctgagagaggggaagtgagggaaagaggtgatctagggacacggtgtgaatgagggggggatgagatcacagggttattactgggagacccctgagggaagntggccacagggacaggacaaggctgtcttcttaagggaggagaccacccctcatattgtcttatgcccaatttctgcctccaaagaaagaaaaagtaaaaactaaaaggcagaaatgaaatccacaagcagacagcccgcgccacaccctgggcctggtggttaaagattgacccctgacctaatccgttaggttatctatagattacagacattgtatagaaaagcactgtgaaaatccctattctgttttgttccgatctaattaccggtgcatgcagcccccagtcacgcatcccctgcttgttcaatcgatcacgaccctctcacgtgcacccacttagagttgtgagcccttaaaaggaacagggattgctcactcggggagctcggctcttgagacaggaatcttgcccattccccgaacgaataaaccccttccttaactcagcgtctgaggaattttgtctgcggctcctcctgctacattctgagtggggaaagggactaaggtggtctgaggaccccacagagtcaggaagattgagaggtgagagtgctgaacggggaggggctttggggctaagggaagtgcccgggaccccacctgaccccaacgctcacgggacaggggcagaggagaaaaacgtgggtggacagagggaggcaggcggtcaggggaaggctcaggaggagggagatcaacatcaacctgccccgccccctccccagcctgataaaggtcctgcgggcaggacaggacctcccaaccaagccctccagcaaggattcaggttggtgctgagtgcctgggagggacacccgcctacactctgcaagaaactcaaaaagggagatgaggggatcgtgggagggangtagggagggaggagggtgccactgatcccctgaacccctgcctctgcctcagagtgcccctccggcctcgccatgaggctcttcctgtcgctcccggtcctggtggtggttctgtcgatcgtcttggaaggcccagccccagcccaggggaccccagacgtctccagtgccttggataagctgaaggagtttggaaacacactggaggacaaggctcgggaactcatcagccgcatcaaacagagtgaactttctgccaagatgcgggagtggttttcagagacatttcagaaagtgaaggagaaactcaagattgactcatgaggacctgaagggtgacatcccaggaggggcctctgaaatttcccacaccccagcgcctgtgctgaggactccctccatgtggccccaggtgccaccaataaaaatcctacagaaaa

SEQ ID NO: 439231 - DNA, 591 bp, Homo sapiens
agttatacggggaccggcccaaaattgctattccccgagaaaaggggtggtggtgtttttcaagcacggagccccccgtggggggcgtagtgtggcctccagttgccacccttgaagggttcttgggcccctggttgttacaagggcgcgtgcgggccgccactgtgggctccctggccggccagccgctacaggagcgggcccaggcctggggcgagcggctgcgcgcgcggatggaggagatgggcagccggacccgcgaccgcctggacgaggtgaaggagcaggtggcggagggagcaggcccagcagatacgcctgcaggccgaggccttccaggcccgcctcaagagctggttcgagcccctggtggaagacatgcagcgccagtgggccgggctggtggagaaggtgcaggctgccgtgggcaccagcgccgcccctgtgcccagcgacaatcactgaacgccgaagcctgcagccatgcgaccccacgccaccccgtgcctcctgcctccgcgcagcctgcagcgggagaccctgtccccgccccagccgtcctcctggggtgggccctagtttaataaagat

SEQ ID NO: 439232 - DNA, 587 bp, Homo sapiens
  misc_feature (74)..(74): n is a, c, g, or t
  misc_feature (76)..(76): n is a, c, g, or t
agcagcggagtccctacgtcaggccccaccggtatcgtgacatgagacgtgcttcctcaggagactcgactggncnggactacccacaggcaggaagatgaaggttctgtgggctgcgttgctggtcacattcctggcaggatgccaggccaaggtggagcaagcggtggagacagagccggagcccgagctgcgccagcagaccgagtggcagagcggccagcgctgggaactggcactgggtcgcttttgggattacctgcgcgccaagctggaggagcaggcccagcagatacgcctgcaggccgaggccttccaggcccgcctcaagagctggttcgagcccctggtggaagacatgcagcgccagtgggccgggctggtggagaaggtgcaggctgccgtgggcaccagcgccgcccctgtgcccagcgacaatcactgaacgccgaagcctgcagccatgcgaccccacgccaccccgtgcctcctgcctccgcgcagcctgcagcgggagaccctgtccccgccccagccgtcctcctggggtggaccctagtttaataaagattcaccaagtttcacgc

SEQ ID NO: 439233 - DNA, 741 bp, Homo sapiens
  misc_feature (74)..(74): n is a, c, g, or t
  misc_feature (76)..(76): n is a, c, g, or t
  misc_feature (692)..(692): n is a, c, g, or t
agcagcggagtccctacgtcaggccccaccggtatcgtgacatgagacgtgcttcctcaggagactcgactggncnggactacccacaggcaggaagatgaaggttctgtgggctgcgttgctggtcacattcctggcaggatgccaggccaaggtggagcaagcggtggagacagagccggagcccgagctgcgccagcagaccgagtggcagagcggccagcgctgggaactggcactgggtcgcttttgggattacctgcgctgggtgcagacactgtctgagcaggtgcaggaggagctgctcagctcccaggtcacccaggaactgagggagggcgctgatggacgagaccatgaaggagttgaaggcctacaaatcggaactggaggaacaactgaccccggtggcggaggagacgcgggcacggctgtccaaggagctgcaggcggcgcaggcccggctgggcgcggacatggaggacgtgtgcggccgcctggtgcagtaccgcggcgaggtgcaggccatgctcggccagagcaccgaggagctgcgggtgcgcctcgcctcccacctgcgcaagctgcgtaagcggctcctccgcgatgccgatgacctgcagaagcgcctggcagtgtaccaggccggggcccgcgagggcgccgagcgcggcctcagcgccatccgcgangcgctggtcgccttgtgggcacggcccccttcggctccgccctgtgccc

SEQ ID NO: 439234 - DNA, 526 bp, Homo sapiens
  misc_feature (74)..(74): n is a, c, g, or t
  misc_feature (76)..(76): n is a, c, g, or t
agcagcggagtccctacgtcaggccccaccggtatcgtgacatgagacgtgcttcctcaggagactcgactggncnggactacccacaggcaggaagatgaaggttctgtgggctgcgttgctggtcacattcctggcaggatgccaggccaaggtggagcaagcggtggagacagagccggagcccgagctgcgccagcagaccgagtggcagagcggccagcgctgggaactggcactgggtcgcttttgggattaccttgggattacctgcgctgggtgcagacactgtctgagcaggtgcaggaggagctgctcagctcccaggtcacccaggaactgagggctagtcggggccccgactagcccgacagggctggtggggcctgaggaccagtgaggagtgtggatgtaggcgcccaggcatcgtgcagacagggcgacatcagctggggacgatgggcctgagctagggctggaaagaagggggagccaggcattcatcccggtcacttatgctacagac

SEQ ID NO: 439235 - DNA, 7014 bp, Homo sapiens
  misc_feature (2098)..(2098): n is a, c, g, or t
  misc_feature (2955)..(2955): n is a, c, g, or t
  misc_feature (3993)..(3993): n is a, c, g, or t
  misc_feature (4215)..(4215): n is a, c, g, or t
  misc_feature (4436)..(4436): n is a, c, g, or t
  misc_feature (4679)..(4679): n is a, c, g, or t
  misc_feature (4979)..(4979): n is a, c, g, or t
  misc_feature (5010)..(5010): n is a, c, g, or t
  misc_feature (5295)..(5295): n is a, c, g, or t
  misc_feature (5343)..(5343): n is a, c, g, or t
  misc_feature (5350)..(5350): n is a, c, g, or t
  misc_feature (5696)..(5696): n is a, c, g, or t
  misc_feature (6573)..(6573): n is a, c, g, or t
agcgggagtcctactcagccccagcggaggtgaaggacgtccttccccaggagccgactggccaatcacaggcaggaagatgaaggttctgtgggctgcgttgctggtcacattcctggcaggatgccaggccaaggtggagcaagcggtggagacagagccggagcccgagctgcgccagcagaccgagtggcagagcggccagcgctgggaactggcactgggtcgcttttgggattacctgcgctgggtgcagacactgtctgagcaggtgcaggaggagctgctcagctcccaggtcacccaggaactgagggcgctgatggacgagaccatgaaggagttgaaggcctacaaatcggaactggaggaacaactgaccccggtggcggaggagacgcgggcacggctgtccaaggagctgcaggcggcgcaggcccggctgggcgcggacatggaggacgtgtgcggccgcctggtgcagtaccgcggcgaggtgcaggccatgctcggccagagcaccgaggagctgcgggtgcgcctcgcctcccacctgcgcaagctgcgtaagcggctcctccgcgatgccgatgacctgcagaagcgcctggcagtgtaccaggccggggcccgcgagggcgccgagcgcggcctcagcgccatccgcgagcgcctggggcccctggtggaacagggccgcgtgcgggccgccactgtgggctccctggccggccagccgctacaggagcgggcccaggcctggggcgagcggctgcgcgcgcggatggaggagatgggcagccggacccgcgaccgcctggacgaggtgaaggagcaggtggcggaggtgcgcgccaagctggaggagcaggcccagcagatacgcctgcaggccgaggccttccaggcccgcctcaagagctggttcgagcccctggtggaagacatgcagcgccagtgggccgggctggtggagaaggtgcaggctgccgtgggcaccagcgccgcccctgtgcccagcgacaatcactgaacgccgaagcctgcagccatgcgaccccacgccaccccgtgcctcctgcctccgcgcagcctgcagcgggagaccctgtccccgccccagccgtcctcctggggtggaccctagtttaataaagattcaccaagtttcacgcatctgctggcctccccctgtatttcctctaagccccagcctcagtttctctttctgcccacatactggccacacaattctcagccccctcctctccatctgtgtctgtgtgtatctttctctctgccctttttttttttttagacggagtctggctctgtcacccaggctagagtgcagtggcacgatcttggctcactgcaacctctgcctcttgggttcaagcgattctgctgcctcagtagctgggattacaggctcacaccaccacacccggctaatttttgtatttttagtagagacgagctttcaccatgttggccaggcaggtctcaaactcctgaccaagtgatccacccgccggcctcccaaagtgctgagattacaggcctgagccaccatgcccggcctctgcccctctttcttttttagggggcagggaaaggtctcaccctgtcacccgccatcacagctcactgcagcctccacctcctggactcaagtgataagtgatcctcccgcctcagcctttccagtagctgagactacaggcgcataccactaggattaatttgggggggggtggtgtgtgtggagatggggtctggctttgttggccaggctgatgtggaattcctgggctcaagcgatactcccaccttggcctcctgagtagctgagactactggctagcaccaccacacccagctttttattattatttgtagagacaaggtctcaatatgttgcccaggctagtctcaaacccctgggctcaagagatcctccgccatcggcctcccaaagtgctgggattccaggcatggggctccgagcccggcctgcccaacttaataatacttgttcctcagagttgcaactccaaatgacctgagattggtgcctttattctaagctattttnattttttttctgctgtcattattctcccccttctctcctccagtcttatctgatatctgcctccttcccacccaccctgcaccccatcccacccctctgtctctccctgttctcctcaggagactctggcttcctgttttcctccacttctatcttttatctctccctcctacggtttcttttctttctccccggcctgcttgtttctcccccaacccccttcatctggatttcttcttctgccattcagtttggtttgagctctctgcttctccggttccctctgagctagctgtcccttcacccactgtgaactgggtttccctgcccaaccctcattctctttctttctttctttttttttttttgagacagagtcttgctctgttgcccagcctggagtgcagtggtgcaatcttggttcactgcaacctccacttcccagattcaagcaattctcctgcctcagcctccagagtagctgggattacaggcgtgtcccaccacacccgactaatttttgtatttttggtagagacaaggcttcggcattgttggccaggcaggtctcgaactcctgacctcaagtaatctgcctgcctcaccctcccaaagtgctgggattacaggcatgagccacctcacccggaccatccctcattctccatcctttcctccagttgtgatgtctacccctcatgtttcccaacaagcctactgggtgctgaatccaggctgggaagagaagggagcggctcttctgtcggagtctgcaccaggcccatgctgagacgagagctggcgctcagagaggggaagcttggatggaagcccaggagccgccggcactctcttcncctcccaccccctcagttctcagagacggggaggagggttcccaccaacgggggacaggctgagacttgagcttgtatctcctgggccagctgcaacatctgcttgtccctctgcccatcttggctcctgcacaccctgaacttggtgctttccctggcactgctctgatcacccacgtggaggcagcacccctcccctggagatgactcaccagggctgagtgaggaggggaagggtcagtgtgctcacaggcagggggcctggtctgctgggcctgctgctgattcaccgtatgtccaggagctggagcagcaccctctcagagcctcagtttccccagatgtcaatgagagaatcagcatcagccacatctcccacctgaagaatcgaaccttgagttctcacctttaagaattttttttttttttgagacagtgccttgctcagtcgaccacgctggagtgcagtagcacgatcatcaatcactgcagcctccaactcaagcaaccctcctgcctcaacctcctgagtagctggggccacaggcacccaccaccatgcctggctaattctttcttttttgagatggagtctcactctgtcgcccaggctggagtgcagtggcaccatcttggctcaccgcaaccctgccccccgggttcaagcaattctcctgcctcagcctcctgagtagctagaattacaggcgcacaccaccacaccaggctaatttttgtatttttagtagaaacgaggtttcaccacggtggtcaggttggtctcaaactcctgacatcaggtgatccacccgcctcggcctcccaaagcactgggattacaggagtgagccaccatgcctggccatattttaaacttttttgtagagatggggtcttactatgttgcccaggctgatctcaaactcttgggctcaagcagatcctcctgccaaagcttcccaaagtagttggattacaggtgtgagccaccacgccccaccaacctatgaagatgtctaagcagacagggtgccctanctcaccacatccccagtcagatccagaggtgggacaaggatgggaaggaggttccagaacaaaggctggcagggagtcgtatgggacaggagctgacccagcaaccatccacagagacatcctggagcctgggaaggagaaggacaaagagcccccttttttaaattttttttatgtttttgagacggagtctcactctgtcacccaagctggagtgcagtngcacaatcttggctcactgcaacctccacctcatgggttcaaacgactctcctgcctcagcctcctgagtagctgggaccacaggtgcacaccaccatgcctggataatttttgaatttttggtagagacggagtttcaccatgttggccaggcaggtctcgaactcctgacctcaagtgtccgcccaccttggcctcccaaagttctgggaatacaggcntgagccactgcaaccagccagtagcccccatctttgcccctcgctgagccctactggatgttcttggttatgcgacagtttccccatctattaaagagaaacccctatagcagaggggaggatgaggttggaaaagcaggagcattgttatgctattcttgtggggtctgggaagcagacatctgggtggatgtttggggggtgctgggcttagttggggaagtaggggggcccctggggctnacagggactggaagctctgagctggccagagggatgttgcaatcctgccagggtcttgtctatgctgtccttttcacaaccatccccctactgccaggctgacacgtggttgcgggggcacaaggccagccaacctagagtctgaggctaggcggaggacaccctccccaccagctgccagggtcactggcggtcaaaggcagctggtggggaaggcattggactccagccttgggggacggatgtagtgatggtgggaagcaggcttggtgccaggaggggcgtcagagggtgaataanagcagatagagtgtttgggggaggtagccanccaaagggggtgaggcccggtggaagggaagaagggacatacacgcagagctttgcagctgagggttttaattttttgagatggggtctctgtcccaccaggctggagtgcagtggcacaatcacagctcactgcagcctcgaactcctgggctcaagcaatcttcctacctcagcctcttgagtagctgggactacagcatgcgccaccacgctcggctaatttttgaattttttgtagagatgaggtctccctatattgcccaggctggtctcgaactcccangctcaagtgatcctccctcttcagcttcccaaagtgctgggattacangcatganccaccatgcctggctaatgcaggtgaggtttttgcagtgtcatccagctaaggcgacccgttcccctcccaaaaaagggagactgagaaccatgaagttaagagcccagagaatatcacggtggtctggggtgcttcaagggctggtctggaataaattggaggtggcacgcagggtaggagcgccgggccaactgggagacccagcaacataaaggaaaagttgttggggctgaggaggcttgctgagagaggggaagtgagggaaagaggtgatctagggacacggtgtgaatgagggggggatgagatcacagggttattactgggagacccctgagggaagntggccacagggacaggacaaggctgtcttcttaagggaggagaccacccctcatattgtcttatgcccaatttctgcctccaaagaaagaaaaagtaaaaactaaaaggcagaaatgaaatccacaagcagacagcccgcgccacaccctgggcctggtggttaaagattgacccctgacctaatccgttaggttatctatagattacagacattgtatagaaaagcactgtgaaaatccctattctgttttgttccgatctaattaccggtgcatgcagcccccagtcacgcatcccctgcttgttcaatcgatcacgaccctctcacgtgcacccacttagagttgtgagcccttaaaaggaacagggattgctcactcggggagctcggctcttgagacaggaatcttgcccattccccgaacgaataaaccccttccttaactcagcgtctgaggaattttgtctgcggctcctcctgctacattctgagtggggaaagggactaaggtggtctgaggaccccacagagtcaggaagattgagaggtgagagtgctgaacggggaggggctttggggctaagggaagtgcccgggaccccacctgaccccaacgctcacgggacaggggcagaggagaaaaacgtgggtggacagagggaggcaggcggtcaggggaaggctcaggaggagggagatcaacatcaacctgccccgccccctccccagcctgataaaggtcctgcgggcaggacaggacctcccaaccaagccctccagcaaggattcaggttggtgctgagtgcctgggagggacacccgcctacactctgcaagaaactcaaaaagggagatgaggggatcgtgggagggangtagggagggaggagggtgccactgatcccctgaacccctgcctctgcctcagagtgcccctccggcctcgccatgaggctcttcctgtcgctcccggtcctggtggtggttctgtcgatcgtcttggaaggcccagccccagcccaggggaccccagacgtctccagtgccttggataagctgaaggagtttggaaacacactggaggacaaggctcgggaactcatcagccgcatcaaacagagtgaactttctgccaagatgcgggagtggttttcagagacatttcagaaagtgaaggagaaactcaagattgactcatgaggacctgaagggtgacatcccaggaggggcctctgaaatttcccacaccccagcgcctgtgctgaggactccctccatgtggccccaggtgccaccaataaaaatcctacagaaaa

SEQ ID NO: 439236 - DNA, 7318 bp, Homo sapiens
  misc_feature (2098)..(2098): n is a, c, g, or t
  misc_feature (2955)..(2955): n is a, c, g, or t
  misc_feature (3993)..(3993): n is a, c, g, or t
  misc_feature (4215)..(4215): n is a, c, g, or t
  misc_feature (4436)..(4436): n is a, c, g, or t
  misc_feature (4679)..(4679): n is a, c, g, or t
  misc_feature (4979)..(4979): n is a, c, g, or t
  misc_feature (5010)..(5010): n is a, c, g, or t
  misc_feature (5295)..(5295): n is a, c, g, or t
  misc_feature (5343)..(5343): n is a, c, g, or t
  misc_feature (5350)..(5350): n is a, c, g, or t
  misc_feature (5696)..(5696): n is a, c, g, or t
  misc_feature (6573)..(6573): n is a, c, g, or t
agcgggagtcctactcagccccagcggaggtgaaggacgtccttccccaggagccgactggccaatcacaggcaggaagatgaaggttctgtgggctgcgttgctggtcacattcctggcaggatgccaggccaaggtggagcaagcggtggagacagagccggagcccgagctgcgccagcagaccgagtggcagagcggccagcgctgggaactggcactgggtcgcttttgggattacctgcgctgggtgcagacactgtctgagcaggtgcaggaggagctgctcagctcccaggtcacccaggaactgagggcgctgatggacgagaccatgaaggagttgaaggcctacaaatcggaactggaggaacaactgaccccggtggcggaggagacgcgggcacggctgtccaaggagctgcaggcggcgcaggcccggctgggcgcggacatggaggacgtgtgcggccgcctggtgcagtaccgcggcgaggtgcaggccatgctcggccagagcaccgaggagctgcgggtgcgcctcgcctcccacctgcgcaagctgcgtaagcggctcctccgcgatgccgatgacctgcagaagcgcctggcagtgtaccaggccggggcccgcgagggcgccgagcgcggcctcagcgccatccgcgagcgcctggggcccctggtggaacagggccgcgtgcgggccgccactgtgggctccctggccggccagccgctacaggagcgggcccaggcctggggcgagcggctgcgcgcgcggatggaggagatgggcagccggacccgcgaccgcctggacgaggtgaaggagcaggtggcggaggtgcgcgccaagctggaggagcaggcccagcagatacgcctgcaggccgaggccttccaggcccgcctcaagagctggttcgagcccctggtggaagacatgcagcgccagtgggccgggctggtggagaaggtgcaggctgccgtgggcaccagcgccgcccctgtgcccagcgacaatcactgaacgccgaagcctgcagccatgcgaccccacgccaccccgtgcctcctgcctccgcgcagcctgcagcgggagaccctgtccccgccccagccgtcctcctggggtggaccctagtttaataaagattcaccaagtttcacgcatctgctggcctccccctgtatttcctctaagccccagcctcagtttctctttctgcccacatactggccacacaattctcagccccctcctctccatctgtgtctgtgtgtatctttctctctgccctttttttttttttagacggagtctggctctgtcacccaggctagagtgcagtggcacgatcttggctcactgcaacctctgcctcttgggttcaagcgattctgctgcctcagtagctgggattacaggctcacaccaccacacccggctaatttttgtatttttagtagagacgagctttcaccatgttggccaggcaggtctcaaactcctgaccaagtgatccacccgccggcctcccaaagtgctgagattacaggcctgagccaccatgcccggcctctgcccctctttcttttttagggggcagggaaaggtctcaccctgtcacccgccatcacagctcactgcagcctccacctcctggactcaagtgataagtgatcctcccgcctcagcctttccagtagctgagactacaggcgcataccactaggattaatttgggggggggtggtgtgtgtggagatggggtctggctttgttggccaggctgatgtggaattcctgggctcaagcgatactcccaccttggcctcctgagtagctgagactactggctagcaccaccacacccagctttttattattatttgtagagacaaggtctcaatatgttgcccaggctagtctcaaacccctgggctcaagagatcctccgccatcggcctcccaaagtgctgggattccaggcatggggctccgagcccggcctgcccaacttaataatacttgttcctcagagttgcaactccaaatgacctgagattggtgcctttattctaagctattttnattttttttctgctgtcattattctcccccttctctcctccagtcttatctgatatctgcctccttcccacccaccctgcaccccatcccacccctctgtctctccctgttctcctcaggagactctggcttcctgttttcctccacttctatcttttatctctccctcctacggtttcttttctttctccccggcctgcttgtttctcccccaacccccttcatctggatttcttcttctgccattcagtttggtttgagctctctgcttctccggttccctctgagctagctgtcccttcacccactgtgaactgggtttccctgcccaaccctcattctctttctttctttctttttttttttttgagacagagtcttgctctgttgcccagcctggagtgcagtggtgcaatcttggttcactgcaacctccacttcccagattcaagcaattctcctgcctcagcctccagagtagctgggattacaggcgtgtcccaccacacccgactaatttttgtatttttggtagagacaaggcttcggcattgttggccaggcaggtctcgaactcctgacctcaagtaatctgcctgcctcaccctcccaaagtgctgggattacaggcatgagccacctcacccggaccatccctcattctccatcctttcctccagttgtgatgtctacccctcatgtttcccaacaagcctactgggtgctgaatccaggctgggaagagaagggagcggctcttctgtcggagtctgcaccaggcccatgctgagacgagagctggcgctcagagaggggaagcttggatggaagcccaggagccgccggcactctcttcncctcccaccccctcagttctcagagacggggaggagggttcccaccaacgggggacaggctgagacttgagcttgtatctcctgggccagctgcaacatctgcttgtccctctgcccatcttggctcctgcacaccctgaacttggtgctttccctggcactgctctgatcacccacgtggaggcagcacccctcccctggagatgactcaccagggctgagtgaggaggggaagggtcagtgtgctcacaggcagggggcctggtctgctgggcctgctgctgattcaccgtatgtccaggagctggagcagcaccctctcagagcctcagtttccccagatgtcaatgagagaatcagcatcagccacatctcccacctgaagaatcgaaccttgagttctcacctttaagaattttttttttttttgagacagtgccttgctcagtcgaccacgctggagtgcagtagcacgatcatcaatcactgcagcctccaactcaagcaaccctcctgcctcaacctcctgagtagctggggccacaggcacccaccaccatgcctggctaattctttcttttttgagatggagtctcactctgtcgcccaggctggagtgcagtggcaccatcttggctcaccgcaaccctgccccccgggttcaagcaattctcctgcctcagcctcctgagtagctagaattacaggcgcacaccaccacaccaggctaatttttgtatttttagtagaaacgaggtttcaccacggtggtcaggttggtctcaaactcctgacatcaggtgatccacccgcctcggcctcccaaagcactgggattacaggagtgagccaccatgcctggccatattttaaacttttttgtagagatggggtcttactatgttgcccaggctgatctcaaactcttgggctcaagcagatcctcctgccaaagcttcccaaagtagttggattacaggtgtgagccaccacgccccaccaacctatgaagatgtctaagcagacagggtgccctanctcaccacatccccagtcagatccagaggtgggacaaggatgggaaggaggttccagaacaaaggctggcagggagtcgtatgggacaggagctgacccagcaaccatccacagagacatcctggagcctgggaaggagaaggacaaagagcccccttttttaaattttttttatgtttttgagacggagtctcactctgtcacccaagctggagtgcagtngcacaatcttggctcactgcaacctccacctcatgggttcaaacgactctcctgcctcagcctcctgagtagctgggaccacaggtgcacaccaccatgcctggataatttttgaatttttggtagagacggagtttcaccatgttggccaggcaggtctcgaactcctgacctcaagtgtccgcccaccttggcctcccaaagttctgggaatacaggcntgagccactgcaaccagccagtagcccccatctttgcccctcgctgagccctactggatgttcttggttatgcgacagtttccccatctattaaagagaaacccctatagcagaggggaggatgaggttggaaaagcaggagcattgttatgctattcttgtggggtctgggaagcagacatctgggtggatgtttggggggtgctgggcttagttggggaagtaggggggcccctggggctnacagggactggaagctctgagctggccagagggatgttgcaatcctgccagggtcttgtctatgctgtccttttcacaaccatccccctactgccaggctgacacgtggttgcgggggcacaaggccagccaacctagagtctgaggctaggcggaggacaccctccccaccagctgccagggtcactggcggtcaaaggcagctggtggggaaggcattggactccagccttgggggacggatgtagtgatggtgggaagcaggcttggtgccaggaggggcgtcagagggtgaataanagcagatagagtgtttgggggaggtagccanccaaagggggtgaggcccggtggaagggaagaagggacatacacgcagagctttgcagctgagggttttaattttttgagatggggtctctgtcccaccaggctggagtgcagtggcacaatcacagctcactgcagcctcgaactcctgggctcaagcaatcttcctacctcagcctcttgagtagctgggactacagcatgcgccaccacgctcggctaatttttgaattttttgtagagatgaggtctccctatattgcccaggctggtctcgaactcccangctcaagtgatcctccctcttcagcttcccaaagtgctgggattacangcatganccaccatgcctggctaatgcaggtgaggtttttgcagtgtcatccagctaaggcgacccgttcccctcccaaaaaagggagactgagaaccatgaagttaagagcccagagaatatcacggtggtctggggtgcttcaagggctggtctggaataaattggaggtggcacgcagggtaggagcgccgggccaactgggagacccagcaacataaaggaaaagttgttggggctgaggaggcttgctgagagaggggaagtgagggaaagaggtgatctagggacacggtgtgaatgagggggggatgagatcacagggttattactgggagacccctgagggaagntggccacagggacaggacaaggctgtcttcttaagggaggagaccacccctcatattgtcttatgcccaatttctgcctccaaagaaagaaaaagtaaaaactaaaaggcagaaatgaaatccacaagcagacagcccgcgccacaccctgggcctggtggttaaagattgacccctgacctaatccgttaggttatctatagattacagacattgtatagaaaagcactgtgaaaatccctattctgttttgttccgatctaattaccggtgcatgcagcccccagtcacgcatcccctgcttgttcaatcgatcacgaccctctcacgtgcacccacttagagttgtgagcccttaaaaggaacagggattgctcactcggggagctcggctcttgagacaggaatcttgcccattccccgaacgaataaaccccttccttaactcagcgtctgaggaattttgtctgcggctcctcctgctacattctgagtggggaaagggactaaggtggtctgaggaccccacagagtcaggaagattgagaggtgagagtgctgaacggggaggggctttggggctaagggaagtgcccgggaccccacctgaccccaacgctcacgggacaggggcagaggagaaaaacgtgggtggacagagggaggcaggcggtcaggggaaggctcaggaggagggagatcaacatcaacctgccccgccccctccccagcctgataaaggtcctgcgggcaggacaggacctcccaaccaagccctccagcaaggattcaggttggtgctgagtgcctgggagggacacccgcctacactctgcaagaaactcaaaaagggagatgaggggatcgtgggagggangtagggagggaggagggtgccactgatcccctgaacccctgcctctgcctcagagtgcccctccggcctcgccatgaggctcttcctgtcgctcccggtcctggtggtggttctgtcgatcgtcttggaaggcccagccccagcccaggggaccccagacgtctccagtgccttggataagctgaaggagtttggaaacacactggaggacaaggctcgggaactcatcagccgcatcaaacagagtgaactttctgccaagatgcgggagtggttttcagagacatttcagaaagtgaaggagaaactcaagattgactcatgaggacctgaagggtgacatcccaggaggggcctctgaaatttcccacaccccagcgcctgtgctgaggactccctccatgtggccccaggtgccaccaataaaaatcctacagaaaaaaaaaaaaaaaaaaaaaaaaaaaaaaacaaaaaaaaaaaaaaaaaaaaaaaagaaaggggggggcgccgccaaaaaaatttcccccgggggggcccccagctataagcagcaccacgagatgcgtgggacacgcacgcgcccccagagtacaggagcgcgctaataatagccgcaaggacgggggccgatagtattaaacagggtgctgcaggcgggaaaaaccgggcacgcggggagcactggggggagaagaaccccataactgcggggggggagcgccactaagggggacaacctcccgag

SEQ ID NO: 439237 - DNA, 6634 bp, Homo sapiens
  misc_feature (2098)..(2098): n is a, c, g, or t
  misc_feature (2955)..(2955): n is a, c, g, or t
  misc_feature (3993)..(3993): n is a, c, g, or t
  misc_feature (4215)..(4215): n is a, c, g, or t
  misc_feature (4436)..(4436): n is a, c, g, or t
  misc_feature (4679)..(4679): n is a, c, g, or t
  misc_feature (4979)..(4979): n is a, c, g, or t
  misc_feature (5010)..(5010): n is a, c, g, or t
  misc_feature (5295)..(5295): n is a, c, g, or t
  misc_feature (5343)..(5343): n is a, c, g, or t
  misc_feature (5350)..(5350): n is a, c, g, or t
  misc_feature (5696)..(5696): n is a, c, g, or t
agcgggagtcctactcagccccagcggaggtgaaggacgtccttccccaggagccgactggccaatcacaggcaggaagatgaaggttctgtgggctgcgttgctggtcacattcctggcaggatgccaggccaaggtggagcaagcggtggagacagagccggagcccgagctgcgccagcagaccgagtggcagagcggccagcgctgggaactggcactgggtcgcttttgggattacctgcgctgggtgcagacactgtctgagcaggtgcaggaggagctgctcagctcccaggtcacccaggaactgagggcgctgatggacgagaccatgaaggagttgaaggcctacaaatcggaactggaggaacaactgaccccggtggcggaggagacgcgggcacggctgtccaaggagctgcaggcggcgcaggcccggctgggcgcggacatggaggacgtgtgcggccgcctggtgcagtaccgcggcgaggtgcaggccatgctcggccagagcaccgaggagctgcgggtgcgcctcgcctcccacctgcgcaagctgcgtaagcggctcctccgcgatgccgatgacctgcagaagcgcctggcagtgtaccaggccggggcccgcgagggcgccgagcgcggcctcagcgccatccgcgagcgcctggggcccctggtggaacagggccgcgtgcgggccgccactgtgggctccctggccggccagccgctacaggagcgggcccaggcctggggcgagcggctgcgcgcgcggatggaggagatgggcagccggacccgcgaccgcctggacgaggtgaaggagcaggtggcggaggtgcgcgccaagctggaggagcaggcccagcagatacgcctgcaggccgaggccttccaggcccgcctcaagagctggttcgagcccctggtggaagacatgcagcgccagtgggccgggctggtggagaaggtgcaggctgccgtgggcaccagcgccgcccctgtgcccagcgacaatcactgaacgccgaagcctgcagccatgcgaccccacgccaccccgtgcctcctgcctccgcgcagcctgcagcgggagaccctgtccccgccccagccgtcctcctggggtggaccctagtttaataaagattcaccaagtttcacgcatctgctggcctccccctgtatttcctctaagccccagcctcagtttctctttctgcccacatactggccacacaattctcagccccctcctctccatctgtgtctgtgtgtatctttctctctgccctttttttttttttagacggagtctggctctgtcacccaggctagagtgcagtggcacgatcttggctcactgcaacctctgcctcttgggttcaagcgattctgctgcctcagtagctgggattacaggctcacaccaccacacccggctaatttttgtatttttagtagagacgagctttcaccatgttggccaggcaggtctcaaactcctgaccaagtgatccacccgccggcctcccaaagtgctgagattacaggcctgagccaccatgcccggcctctgcccctctttcttttttagggggcagggaaaggtctcaccctgtcacccgccatcacagctcactgcagcctccacctcctggactcaagtgataagtgatcctcccgcctcagcctttccagtagctgagactacaggcgcataccactaggattaatttgggggggggtggtgtgtgtggagatggggtctggctttgttggccaggctgatgtggaattcctgggctcaagcgatactcccaccttggcctcctgagtagctgagactactggctagcaccaccacacccagctttttattattatttgtagagacaaggtctcaatatgttgcccaggctagtctcaaacccctgggctcaagagatcctccgccatcggcctcccaaagtgctgggattccaggcatggggctccgagcccggcctgcccaacttaataatacttgttcctcagagttgcaactccaaatgacctgagattggtgcctttattctaagctattttnattttttttctgctgtcattattctcccccttctctcctccagtcttatctgatatctgcctccttcccacccaccctgcaccccatcccacccctctgtctctccctgttctcctcaggagactctggcttcctgttttcctccacttctatcttttatctctccctcctacggtttcttttctttctccccggcctgcttgtttctcccccaacccccttcatctggatttcttcttctgccattcagtttggtttgagctctctgcttctccggttccctctgagctagctgtcccttcacccactgtgaactgggtttccctgcccaaccctcattctctttctttctttctttttttttttttgagacagagtcttgctctgttgcccagcctggagtgcagtggtgcaatcttggttcactgcaacctccacttcccagattcaagcaattctcctgcctcagcctccagagtagctgggattacaggcgtgtcccaccacacccgactaatttttgtatttttggtagagacaaggcttcggcattgttggccaggcaggtctcgaactcctgacctcaagtaatctgcctgcctcaccctcccaaagtgctgggattacaggcatgagccacctcacccggaccatccctcattctccatcctttcctccagttgtgatgtctacccctcatgtttcccaacaagcctactgggtgctgaatccaggctgggaagagaagggagcggctcttctgtcggagtctgcaccaggcccatgctgagacgagagctggcgctcagagaggggaagcttggatggaagcccaggagccgccggcactctcttcncctcccaccccctcagttctcagagacggggaggagggttcccaccaacgggggacaggctgagacttgagcttgtatctcctgggccagctgcaacatctgcttgtccctctgcccatcttggctcctgcacaccctgaacttggtgctttccctggcactgctctgatcacccacgtggaggcagcacccctcccctggagatgactcaccagggctgagtgaggaggggaagggtcagtgtgctcacaggcagggggcctggtctgctgggcctgctgctgattcaccgtatgtccaggagctggagcagcaccctctcagagcctcagtttccccagatgtcaatgagagaatcagcatcagccacatctcccacctgaagaatcgaaccttgagttctcacctttaagaattttttttttttttgagacagtgccttgctcagtcgaccacgctggagtgcagtagcacgatcatcaatcactgcagcctccaactcaagcaaccctcctgcctcaacctcctgagtagctggggccacaggcacccaccaccatgcctggctaattctttcttttttgagatggagtctcactctgtcgcccaggctggagtgcagtggcaccatcttggctcaccgcaaccctgccccccgggttcaagcaattctcctgcctcagcctcctgagtagctagaattacaggcgcacaccaccacaccaggctaatttttgtatttttagtagaaacgaggtttcaccacggtggtcaggttggtctcaaactcctgacatcaggtgatccacccgcctcggcctcccaaagcactgggattacaggagtgagccaccatgcctggccatattttaaacttttttgtagagatggggtcttactatgttgcccaggctgatctcaaactcttgggctcaagcagatcctcctgccaaagcttcccaaagtagttggattacaggtgtgagccaccacgccccaccaacctatgaagatgtctaagcagacagggtgccctanctcaccacatccccagtcagatccagaggtgggacaaggatgggaaggaggttccagaacaaaggctggcagggagtcgtatgggacaggagctgacccagcaaccatccacagagacatcctggagcctgggaaggagaaggacaaagagcccccttttttaaattttttttatgtttttgagacggagtctcactctgtcacccaagctggagtgcagtngcacaatcttggctcactgcaacctccacctcatgggttcaaacgactctcctgcctcagcctcctgagtagctgggaccacaggtgcacaccaccatgcctggataatttttgaatttttggtagagacggagtttcaccatgttggccaggcaggtctcgaactcctgacctcaagtgtccgcccaccttggcctcccaaagttctgggaatacaggcntgagccactgcaaccagccagtagcccccatctttgcccctcgctgagccctactggatgttcttggttatgcgacagtttccccatctattaaagagaaacccctatagcagaggggaggatgaggttggaaaagcaggagcattgttatgctattcttgtggggtctgggaagcagacatctgggtggatgtttggggggtgctgggcttagttggggaagtaggggggcccctggggctnacagggactggaagctctgagctggccagagggatgttgcaatcctgccagggtcttgtctatgctgtccttttcacaaccatccccctactgccaggctgacacgtggttgcgggggcacaaggccagccaacctagagtctgaggctaggcggaggacaccctccccaccagctgccagggtcactggcggtcaaaggcagctggtggggaaggcattggactccagccttgggggacggatgtagtgatggtgggaagcaggcttggtgccaggaggggcgtcagagggtgaataanagcagatagagtgtttgggggaggtagccanccaaagggggtgaggcccggtggaagggaagaagggacatacacgcagagctttgcagctgagggttttaattttttgagatggggtctctgtcccaccaggctggagtgcagtggcacaatcacagctcactgcagcctcgaactcctgggctcaagcaatcttcctacctcagcctcttgagtagctgggactacagcatgcgccaccacgctcggctaatttttgaattttttgtagagatgaggtctccctatattgcccaggctggtctcgaactcccangctcaagtgatcctccctcttcagcttcccaaagtgctgggattacangcatganccaccatgcctggctaatgcaggtgaggtttttgcagtgtcatccagctaaggcgacccgttcccctcccaaaaaagggagactgagaaccatgaagttaagagcccagagaatatcacggtggtctggggtgcttcaagggctggtctggaataaattggaggtggcacgcagggtaggagcgccgggccaactgggagacccagcaacataaaggaaaagttgttggggctgaggaggcttgctgagagaggggaagtgagggaaagaggtgatctagggacacggtgtgaatgagggggggatgagatcacagggttattactgggagacccctgagggaagntggccacagggacaggacaaggctgtcttcttaagggaggagaccacccctcatattgtcttatgcccaatttctgcctccaaagaaagaaaaagtaaaaactaaaaggcagaaatgaaatccacaagcagacagcccgcgccacaccctgggcctggtggttaaagattgacccctgacctaatccgttaggttatctatagattacagacattgtatagaaaagcactgtgaaaatccctattctgttttgttccgatctaattaccggtgcatgcagcccccagtcacgcatcccctgcttgttcaatcgatcacgaccctctcacgtgcacccacttagagttgtgagcccttaaaaggaacagggattgctcactcggggagctcggctcttgagacaggaatcttgcccattccccgaacgaataaaccccttccttaactcagcgtctgaggaattttgtctgcggctcctcctgctacattctgagtggggaaagggactaaggtggtctgaggaccccacagagtcaggaagattgagcagagtgcccctccggcctcgccatgaggctcttcctgtcgctcccggtcctggtggtggttctgtcgatcgtcttggaaggcccagccccagcccaggggaccccagacgtctccagtgccttggataagctgaaggagtttggaaacacactggaggacaaggctcgggaactcatcagccgcatcaaacagagtgaactttctgccaagatgcgggagtggttttcagagacatttcagaaagtgaaggagaaactcaagattgactcatgaggacctgaagggtgacatcccaggaggggcctctgaaatttcccacaccccagcgcctgtgctgaggactccctccatgtggccccaggtgccaccaataaaaatcctacagaaaa

SEQ ID NO: 439238 - DNA, 6838 bp, Homo sapiens
  misc_feature (2098)..(2098): n is a, c, g, or t
  misc_feature (2955)..(2955): n is a, c, g, or t
  misc_feature (3993)..(3993): n is a, c, g, or t
  misc_feature (4215)..(4215): n is a, c, g, or t
  misc_feature (4436)..(4436): n is a, c, g, or t
  misc_feature (4679)..(4679): n is a, c, g, or t
  misc_feature (4979)..(4979): n is a, c, g, or t
  misc_feature (5010)..(5010): n is a, c, g, or t
  misc_feature (5295)..(5295): n is a, c, g, or t
  misc_feature (5343)..(5343): n is a, c, g, or t
  misc_feature (5350)..(5350): n is a, c, g, or t
  misc_feature (5696)..(5696): n is a, c, g, or t
agcgggagtcctactcagccccagcggaggtgaaggacgtccttccccaggagccgactggccaatcacaggcaggaagatgaaggttctgtgggctgcgttgctggtcacattcctggcaggatgccaggccaaggtggagcaagcggtggagacagagccggagcccgagctgcgccagcagaccgagtggcagagcggccagcgctgggaactggcactgggtcgcttttgggattacctgcgctgggtgcagacactgtctgagcaggtgcaggaggagctgctcagctcccaggtcacccaggaactgagggcgctgatggacgagaccatgaaggagttgaaggcctacaaatcggaactggaggaacaactgaccccggtggcggaggagacgcgggcacggctgtccaaggagctgcaggcggcgcaggcccggctgggcgcggacatggaggacgtgtgcggccgcctggtgcagtaccgcggcgaggtgcaggccatgctcggccagagcaccgaggagctgcgggtgcgcctcgcctcccacctgcgcaagctgcgtaagcggctcctccgcgatgccgatgacctgcagaagcgcctggcagtgtaccaggccggggcccgcgagggcgccgagcgcggcctcagcgccatccgcgagcgcctggggcccctggtggaacagggccgcgtgcgggccgccactgtgggctccctggccggccagccgctacaggagcgggcccaggcctggggcgagcggctgcgcgcgcggatggaggagatgggcagccggacccgcgaccgcctggacgaggtgaaggagcaggtggcggaggtgcgcgccaagctggaggagcaggcccagcagatacgcctgcaggccgaggccttccaggcccgcctcaagagctggttcgagcccctggtggaagacatgcagcgccagtgggccgggctggtggagaaggtgcaggctgccgtgggcaccagcgccgcccctgtgcccagcgacaatcactgaacgccgaagcctgcagccatgcgaccccacgccaccccgtgcctcctgcctccgcgcagcctgcagcgggagaccctgtccccgccccagccgtcctcctggggtggaccctagtttaataaagattcaccaagtttcacgcatctgctggcctccccctgtatttcctctaagccccagcctcagtttctctttctgcccacatactggccacacaattctcagccccctcctctccatctgtgtctgtgtgtatctttctctctgccctttttttttttttagacggagtctggctctgtcacccaggctagagtgcagtggcacgatcttggctcactgcaacctctgcctcttgggttcaagcgattctgctgcctcagtagctgggattacaggctcacaccaccacacccggctaatttttgtatttttagtagagacgagctttcaccatgttggccaggcaggtctcaaactcctgaccaagtgatccacccgccggcctcccaaagtgctgagattacaggcctgagccaccatgcccggcctctgcccctctttcttttttagggggcagggaaaggtctcaccctgtcacccgccatcacagctcactgcagcctccacctcctggactcaagtgataagtgatcctcccgcctcagcctttccagtagctgagactacaggcgcataccactaggattaatttgggggggggtggtgtgtgtggagatggggtctggctttgttggccaggctgatgtggaattcctgggctcaagcgatactcccaccttggcctcctgagtagctgagactactggctagcaccaccacacccagctttttattattatttgtagagacaaggtctcaatatgttgcccaggctagtctcaaacccctgggctcaagagatcctccgccatcggcctcccaaagtgctgggattccaggcatggggctccgagcccggcctgcccaacttaataatacttgttcctcagagttgcaactccaaatgacctgagattggtgcctttattctaagctattttnattttttttctgctgtcattattctcccccttctctcctccagtcttatctgatatctgcctccttcccacccaccctgcaccccatcccacccctctgtctctccctgttctcctcaggagactctggcttcctgttttcctccacttctatcttttatctctccctcctacggtttcttttctttctccccggcctgcttgtttctcccccaacccccttcatctggatttcttcttctgccattcagtttggtttgagctctctgcttctccggttccctctgagctagctgtcccttcacccactgtgaactgggtttccctgcccaaccctcattctctttctttctttctttttttttttttgagacagagtcttgctctgttgcccagcctggagtgcagtggtgcaatcttggttcactgcaacctccacttcccagattcaagcaattctcctgcctcagcctccagagtagctgggattacaggcgtgtcccaccacacccgactaatttttgtatttttggtagagacaaggcttcggcattgttggccaggcaggtctcgaactcctgacctcaagtaatctgcctgcctcaccctcccaaagtgctgggattacaggcatgagccacctcacccggaccatccctcattctccatcctttcctccagttgtgatgtctacccctcatgtttcccaacaagcctactgggtgctgaatccaggctgggaagagaagggagcggctcttctgtcggagtctgcaccaggcccatgctgagacgagagctggcgctcagagaggggaagcttggatggaagcccaggagccgccggcactctcttcncctcccaccccctcagttctcagagacggggaggagggttcccaccaacgggggacaggctgagacttgagcttgtatctcctgggccagctgcaacatctgcttgtccctctgcccatcttggctcctgcacaccctgaacttggtgctttccctggcactgctctgatcacccacgtggaggcagcacccctcccctggagatgactcaccagggctgagtgaggaggggaagggtcagtgtgctcacaggcagggggcctggtctgctgggcctgctgctgattcaccgtatgtccaggagctggagcagcaccctctcagagcctcagtttccccagatgtcaatgagagaatcagcatcagccacatctcccacctgaagaatcgaaccttgagttctcacctttaagaattttttttttttttgagacagtgccttgctcagtcgaccacgctggagtgcagtagcacgatcatcaatcactgcagcctccaactcaagcaaccctcctgcctcaacctcctgagtagctggggccacaggcacccaccaccatgcctggctaattctttcttttttgagatggagtctcactctgtcgcccaggctggagtgcagtggcaccatcttggctcaccgcaaccctgccccccgggttcaagcaattctcctgcctcagcctcctgagtagctagaattacaggcgcacaccaccacaccaggctaatttttgtatttttagtagaaacgaggtttcaccacggtggtcaggttggtctcaaactcctgacatcaggtgatccacccgcctcggcctcccaaagcactgggattacaggagtgagccaccatgcctggccatattttaaacttttttgtagagatggggtcttactatgttgcccaggctgatctcaaactcttgggctcaagcagatcctcctgccaaagcttcccaaagtagttggattacaggtgtgagccaccacgccccaccaacctatgaagatgtctaagcagacagggtgccctanctcaccacatccccagtcagatccagaggtgggacaaggatgggaaggaggttccagaacaaaggctggcagggagtcgtatgggacaggagctgacccagcaaccatccacagagacatcctggagcctgggaaggagaaggacaaagagcccccttttttaaattttttttatgtttttgagacggagtctcactctgtcacccaagctggagtgcagtngcacaatcttggctcactgcaacctccacctcatgggttcaaacgactctcctgcctcagcctcctgagtagctgggaccacaggtgcacaccaccatgcctggataatttttgaatttttggtagagacggagtttcaccatgttggccaggcaggtctcgaactcctgacctcaagtgtccgcccaccttggcctcccaaagttctgggaatacaggcntgagccactgcaaccagccagtagcccccatctttgcccctcgctgagccctactggatgttcttggttatgcgacagtttccccatctattaaagagaaacccctatagcagaggggaggatgaggttggaaaagcaggagcattgttatgctattcttgtggggtctgggaagcagacatctgggtggatgtttggggggtgctgggcttagttggggaagtaggggggcccctggggctnacagggactggaagctctgagctggccagagggatgttgcaatcctgccagggtcttgtctatgctgtccttttcacaaccatccccctactgccaggctgacacgtggttgcgggggcacaaggccagccaacctagagtctgaggctaggcggaggacaccctccccaccagctgccagggtcactggcggtcaaaggcagctggtggggaaggcattggactccagccttgggggacggatgtagtgatggtgggaagcaggcttggtgccaggaggggcgtcagagggtgaataanagcagatagagtgtttgggggaggtagccanccaaagggggtgaggcccggtggaagggaagaagggacatacacgcagagctttgcagctgagggttttaattttttgagatggggtctctgtcccaccaggctggagtgcagtggcacaatcacagctcactgcagcctcgaactcctgggctcaagcaatcttcctacctcagcctcttgagtagctgggactacagcatgcgccaccacgctcggctaatttttgaattttttgtagagatgaggtctccctatattgcccaggctggtctcgaactcccangctcaagtgatcctccctcttcagcttcccaaagtgctgggattacangcatganccaccatgcctggctaatgcaggtgaggtttttgcagtgtcatccagctaaggcgacccgttcccctcccaaaaaagggagactgagaaccatgaagttaagagcccagagaatatcacggtggtctggggtgcttcaagggctggtctggaataaattggaggtggcacgcagggtaggagcgccgggccaactgggagacccagcaacataaaggaaaagttgttggggctgaggaggcttgctgagagaggggaagtgagggaaagaggtgatctagggacacggtgtgaatgagggggggatgagatcacagggttattactgggagacccctgagggaagntggccacagggacaggacaaggctgtcttcttaagggaggagaccacccctcatattgtcttatgcccaatttctgcctccaaagaaagaaaaagtaaaaactaaaaggcagaaatgaaatccacaagcagacagcccgcgccacaccctgggcctggtggttaaagattgacccctgacctaatccgttaggttatctatagattacagacattgtatagaaaagcactgtgaaaatccctattctgttttgttccgatctaattaccggtgcatgcagcccccagtcacgcatcccctgcttgttcaatcgatcacgaccctctcacgtgcacccacttagagttgtgagcccttaaaaggaacagggattgctcactcggggagctcggctcttgagacaggaatcttgcccattccccgaacgaataaaccccttccttaactcagcgtctgaggaattttgtctgcggctcctcctgctacattctgagtggggaaagggactaaggtggtctgaggaccccacagagtcaggaagattgagagcctgataaaggtcctgcgggcaggacaggacctcccaaccaagccctccagcaaggattcagagtgcccctccggcctcgccatgaggctcttcctgtcgctcccggtcctggtggtggttctgtcgatcgtcttggaaggcccagccccagcccaggggaccccagacgtctccagtgccttggataagctgaaggagtttggaaacacactggaggacaaggctcgggaactcatcagccgcatcaaacagagtgaactttctgccaagatgcgttagaacccttcccagggcacgggagagctggggtgtgtttttgggtggagccctggcagatggtccaagatgaacagattgaaaaaaaaacaagtcctggagaggctgacaacatccctctggtcacacagctagatctcagggagtggttttcagagacatttcagaaagtgaaggagaaactcaagattgactcatgaggacctgaagggtgacatcccaggaggggcctctgaaatttcccacaccccagcgcctgtgctgaggactccctccatgtggccccaggtgccaccaataaaaatcctacagaaaa

SEQ ID NO: 439239 - DNA, 1320 bp, Homo sapiens
agcgggagtcctactcagccccagcggaggtgaaggacgtccttccccaggagccgactggccaatcacaggcaggaagatgaaggttctgtgggctgcgttgctggtcacattcctggcaggatgccaggccaaggtggagcaagcggtggagacagagccggagcccgagctgcgccagcagaccgagtggcagagcggccagcgctgggaactggcactgggtcgcttttgggattacctgcgctgggtgcagacactgtctgagcaggtgcaggaggagctgctcagctcccaggtcacccaggaactgagggcgctgatggacgagaccatgaaggagttgaaggcctacaaatcggaactggaggaacaactgaccccggtggcggaggagacgcgggcacggctgtccaaggagctgcaggcggcgcaggcccggctgggcgcggacatggaggacgtgtgcggccgcctggtgcagtaccgcggcgaggtgcaggccatgctcggccagagcaccgaggagctgcgggtgcgcctcgcctcccacctgcgcaagctgcgtaagcggctcctccgcgatgccgatgacctgcagaagcgcctggcagtgtaccaggccggggcccgcgagggcgccgagcgcggcctcagcgccatccgcgagcgcctggggcccctggtggaacagggccgcgtgcgggccgccactgtgggctccctggccggccagccgctacaggagcgggcccaggcctggggcgagcggctgcgcgcgcggatggaggagatgggcagccggacccgcgaccgcctggacgaggtgaaggagcaggtggcggaggtgcgcgccaagctggaggagcaggcccagcagatacgcctgcaggccgaggccttccaggcccgcctcaagagctggttcgagcccctggtggaagacatgcagcgccagtgggccgggctggtggagaaggtgcaggctgccgtgggcaccagcgccgcccctgtgcccagcgacaatcactgaacgccgaagcctgcagccatgcgaccccacgccaccccgtgcctcctgcctccgcgcagcctgcagcgggagaccctgtccccgccccagccgtcctcctggggtggaccctagtttaataaagattcaccaagtttcacgcaaagctgaaatctttatttgtcttttctattatatattggataataaaactctggaggggggtcccattgccaaattggccttatggtgagacttattgcattgcactgcccgtttggttaaactcagcgactgggaaaaccctg

SEQ ID NO: 439240 - DNA, 1206 bp, Homo sapiens
agcgggagccctataattggacaagtctgggagcggagtcctactcagccccagcggaggtgaaggacgtccttccccaggagccgactggccaatcacaggcaggaagatgaaggttctgtgggctgcgttgctggtcacattcctggcaggatgccaggccaaggtggagcaagcggtggagacagagccggagcccgagctgcgccagcagaccgagtggcagagcggccagcgctgggaactggcactgggtcgcttttgggattacctgcgctgggtgcagacactgtctgagcaggtgcaggaggagctgctcagctcccaggtcacccaggaactgagggcgctgatggacgagaccatgaaggagttgaaggcctacaaatcggaactggaggaacaactgaccccggtggcggaggagacgcgggcacggctgtccaaggagctgcaggcggcgcaggcccggctgggcgcggacatggaggacgtgtgcggccgcctggtgcagtaccgcggcgaggtgcaggccatgctcggccagagcaccgaggagctgcgggtgcgcctcgcctcccacctgcgcaagctgcgtaagcggctcctccgcgatgccgatgacctgcagaagcgcctggcagtgtaccaggccggggcccgcgagggcgccgagcgcggcctcagcgccatccgcgagcgcctggggcccctggtggaacagggccgcgtgcgggccgccactgtgggctccctggccggccagccgctacaggagcgggcccaggcctggggcgagcggctgcgcgcgcggatggaggagatgggcagccggacccgcgaccgcctggacgaggtgaaggagcaggtggcggaggtgcgcgccaagctggaggagcaggcccagcagatacgcctgcaggccgaggccttccaggcccgcctcaagagctggttcgagcccctggtggaagacatgcagcgccagtgggccgggctggtggagaaggtgcaggctgccgtgggcaccagcgccgcccctgtgcccagcgacaatcactgaacgccgaagcctgcagccatgcgaccccacgccaccccgtgcctcctgcctccgcgcagcctgcagcgggagaccctgtccccgccccagccgtcctcctggggtggaccctagtttaataaagattcaccaagtttcacgca

SEQ ID NO: 439241 - DNA, 6762 bp, Homo sapiens
  misc_feature (1846)..(1846): n is a, c, g, or t
  misc_feature (2703)..(2703): n is a, c, g, or t
  misc_feature (3741)..(3741): n is a, c, g, or t
  misc_feature (3963)..(3963): n is a, c, g, or t
  misc_feature (4184)..(4184): n is a, c, g, or t
  misc_feature (4427)..(4427): n is a, c, g, or t
  misc_feature (4727)..(4727): n is a, c, g, or t
  misc_feature (4758)..(4758): n is a, c, g, or t
  misc_feature (5043)..(5043): n is a, c, g, or t
  misc_feature (5091)..(5091): n is a, c, g, or t
  misc_feature (5098)..(5098): n is a, c, g, or t
  misc_feature (5444)..(5444): n is a, c, g, or t
  misc_feature (6321)..(6321): n is a, c, g, or t
agcgggagtcctactcagccccagcggaggtgaaggacgtccttccccaggagccgactggccaatcacaggcaggaagatgaaggttctgtgggctgcgttgctggtcacattcctggcaggatgccaggccaaggtggagcaagcggtggagacagagccggagcccgagctgcgccagcagaccgagtggcagagcggccagcgctgggaactggcactgggtcgcttttgggattacctgcgctgggtgcagacactgtctgagcaggtgcaggaggagctgctcagctcccaggtcacccaggaactgagggcgctgatggacgagaccatgaaggagttgaaggcctacaaatcggaactggaggaacaactgaccccggtggcggaggagacgcgggcacggctgtccaaggagctgcaggcggcgcaggcccggctgggcgcggacatggaggacgtgtgcggccgcctggtgcagtaccgcggcgaggtgcaggccatgctcggccagagcaccgaggagctgcgggtgcgcctcgcctcccacctgcgcaagctgcgtaagcggctcctccgcgatgccgatgacctgcagaagcgcctggcagtgtaccaggccggggcccgcgagggcgccgagcgcggcctcagcgccatccgcgagcgcctggggcccctggtggaacagggccgcgtgcgggccgccactgtgggctccctggccggccagccgctacaggagcgggcccaggcctggggcgagcggctgcgcgcgcggatggaggagatgggcagccggacccgcgaccgcctggacgaggtgaaggagcgcagcctgcagcgggagaccctgtccccgccccagccgtcctcctggggtggaccctagtttaataaagattcaccaagtttcacgcatctgctggcctccccctgtatttcctctaagccccagcctcagtttctctttctgcccacatactggccacacaattctcagccccctcctctccatctgtgtctgtgtgtatctttctctctgccctttttttttttttagacggagtctggctctgtcacccaggctagagtgcagtggcacgatcttggctcactgcaacctctgcctcttgggttcaagcgattctgctgcctcagtagctgggattacaggctcacaccaccacacccggctaatttttgtatttttagtagagacgagctttcaccatgttggccaggcaggtctcaaactcctgaccaagtgatccacccgccggcctcccaaagtgctgagattacaggcctgagccaccatgcccggcctctgcccctctttcttttttagggggcagggaaaggtctcaccctgtcacccgccatcacagctcactgcagcctccacctcctggactcaagtgataagtgatcctcccgcctcagcctttccagtagctgagactacaggcgcataccactaggattaatttgggggggggtggtgtgtgtggagatggggtctggctttgttggccaggctgatgtggaattcctgggctcaagcgatactcccaccttggcctcctgagtagctgagactactggctagcaccaccacacccagctttttattattatttgtagagacaaggtctcaatatgttgcccaggctagtctcaaacccctgggctcaagagatcctccgccatcggcctcccaaagtgctgggattccaggcatggggctccgagcccggcctgcccaacttaataatacttgttcctcagagttgcaactccaaatgacctgagattggtgcctttattctaagctattttnattttttttctgctgtcattattctcccccttctctcctccagtcttatctgatatctgcctccttcccacccaccctgcaccccatcccacccctctgtctctccctgttctcctcaggagactctggcttcctgttttcctccacttctatcttttatctctccctcctacggtttcttttctttctccccggcctgcttgtttctcccccaacccccttcatctggatttcttcttctgccattcagtttggtttgagctctctgcttctccggttccctctgagctagctgtcccttcacccactgtgaactgggtttccctgcccaaccctcattctctttctttctttctttttttttttttgagacagagtcttgctctgttgcccagcctggagtgcagtggtgcaatcttggttcactgcaacctccacttcccagattcaagcaattctcctgcctcagcctccagagtagctgggattacaggcgtgtcccaccacacccgactaatttttgtatttttggtagagacaaggcttcggcattgttggccaggcaggtctcgaactcctgacctcaagtaatctgcctgcctcaccctcccaaagtgctgggattacaggcatgagccacctcacccggaccatccctcattctccatcctttcctccagttgtgatgtctacccctcatgtttcccaacaagcctactgggtgctgaatccaggctgggaagagaagggagcggctcttctgtcggagtctgcaccaggcccatgctgagacgagagctggcgctcagagaggggaagcttggatggaagcccaggagccgccggcactctcttcncctcccaccccctcagttctcagagacggggaggagggttcccaccaacgggggacaggctgagacttgagcttgtatctcctgggccagctgcaacatctgcttgtccctctgcccatcttggctcctgcacaccctgaacttggtgctttccctggcactgctctgatcacccacgtggaggcagcacccctcccctggagatgactcaccagggctgagtgaggaggggaagggtcagtgtgctcacaggcagggggcctggtctgctgggcctgctgctgattcaccgtatgtccaggagctggagcagcaccctctcagagcctcagtttccccagatgtcaatgagagaatcagcatcagccacatctcccacctgaagaatcgaaccttgagttctcacctttaagaattttttttttttttgagacagtgccttgctcagtcgaccacgctggagtgcagtagcacgatcatcaatcactgcagcctccaactcaagcaaccctcctgcctcaacctcctgagtagctggggccacaggcacccaccaccatgcctggctaattctttcttttttgagatggagtctcactctgtcgcccaggctggagtgcagtggcaccatcttggctcaccgcaaccctgccccccgggttcaagcaattctcctgcctcagcctcctgagtagctagaattacaggcgcacaccaccacaccaggctaatttttgtatttttagtagaaacgaggtttcaccacggtggtcaggttggtctcaaactcctgacatcaggtgatccacccgcctcggcctcccaaagcactgggattacaggagtgagccaccatgcctggccatattttaaacttttttgtagagatggggtcttactatgttgcccaggctgatctcaaactcttgggctcaagcagatcctcctgccaaagcttcccaaagtagttggattacaggtgtgagccaccacgccccaccaacctatgaagatgtctaagcagacagggtgccctanctcaccacatccccagtcagatccagaggtgggacaaggatgggaaggaggttccagaacaaaggctggcagggagtcgtatgggacaggagctgacccagcaaccatccacagagacatcctggagcctgggaaggagaaggacaaagagcccccttttttaaattttttttatgtttttgagacggagtctcactctgtcacccaagctggagtgcagtngcacaatcttggctcactgcaacctccacctcatgggttcaaacgactctcctgcctcagcctcctgagtagctgggaccacaggtgcacaccaccatgcctggataatttttgaatttttggtagagacggagtttcaccatgttggccaggcaggtctcgaactcctgacctcaagtgtccgcccaccttggcctcccaaagttctgggaatacaggcntgagccactgcaaccagccagtagcccccatctttgcccctcgctgagccctactggatgttcttggttatgcgacagtttccccatctattaaagagaaacccctatagcagaggggaggatgaggttggaaaagcaggagcattgttatgctattcttgtggggtctgggaagcagacatctgggtggatgtttggggggtgctgggcttagttggggaagtaggggggcccctggggctnacagggactggaagctctgagctggccagagggatgttgcaatcctgccagggtcttgtctatgctgtccttttcacaaccatccccctactgccaggctgacacgtggttgcgggggcacaaggccagccaacctagagtctgaggctaggcggaggacaccctccccaccagctgccagggtcactggcggtcaaaggcagctggtggggaaggcattggactccagccttgggggacggatgtagtgatggtgggaagcaggcttggtgccaggaggggcgtcagagggtgaataanagcagatagagtgtttgggggaggtagccanccaaagggggtgaggcccggtggaagggaagaagggacatacacgcagagctttgcagctgagggttttaattttttgagatggggtctctgtcccaccaggctggagtgcagtggcacaatcacagctcactgcagcctcgaactcctgggctcaagcaatcttcctacctcagcctcttgagtagctgggactacagcatgcgccaccacgctcggctaatttttgaattttttgtagagatgaggtctccctatattgcccaggctggtctcgaactcccangctcaagtgatcctccctcttcagcttcccaaagtgctgggattacangcatganccaccatgcctggctaatgcaggtgaggtttttgcagtgtcatccagctaaggcgacccgttcccctcccaaaaaagggagactgagaaccatgaagttaagagcccagagaatatcacggtggtctggggtgcttcaagggctggtctggaataaattggaggtggcacgcagggtaggagcgccgggccaactgggagacccagcaacataaaggaaaagttgttggggctgaggaggcttgctgagagaggggaagtgagggaaagaggtgatctagggacacggtgtgaatgagggggggatgagatcacagggttattactgggagacccctgagggaagntggccacagggacaggacaaggctgtcttcttaagggaggagaccacccctcatattgtcttatgcccaatttctgcctccaaagaaagaaaaagtaaaaactaaaaggcagaaatgaaatccacaagcagacagcccgcgccacaccctgggcctggtggttaaagattgacccctgacctaatccgttaggttatctatagattacagacattgtatagaaaagcactgtgaaaatccctattctgttttgttccgatctaattaccggtgcatgcagcccccagtcacgcatcccctgcttgttcaatcgatcacgaccctctcacgtgcacccacttagagttgtgagcccttaaaaggaacagggattgctcactcggggagctcggctcttgagacaggaatcttgcccattccccgaacgaataaaccccttccttaactcagcgtctgaggaattttgtctgcggctcctcctgctacattctgagtggggaaagggactaaggtggtctgaggaccccacagagtcaggaagattgagaggtgagagtgctgaacggggaggggctttggggctaagggaagtgcccgggaccccacctgaccccaacgctcacgggacaggggcagaggagaaaaacgtgggtggacagagggaggcaggcggtcaggggaaggctcaggaggagggagatcaacatcaacctgccccgccccctccccagcctgataaaggtcctgcgggcaggacaggacctcccaaccaagccctccagcaaggattcaggttggtgctgagtgcctgggagggacacccgcctacactctgcaagaaactcaaaaagggagatgaggggatcgtgggagggangtagggagggaggagggtgccactgatcccctgaacccctgcctctgcctcagagtgcccctccggcctcgccatgaggctcttcctgtcgctcccggtcctggtggtggttctgtcgatcgtcttggaaggcccagccccagcccaggggaccccagacgtctccagtgccttggataagctgaaggagtttggaaacacactggaggacaaggctcgggaactcatcagccgcatcaaacagagtgaactttctgccaagatgcgggagtggttttcagagacatttcagaaagtgaaggagaaactcaagattgactcatgaggacctgaagggtgacatcccaggaggggcctctgaaatttcccacaccccagcgcctgtgctgaggactccctccatgtggccccaggtgccaccaataaaaatcctacagaaaa

SEQ ID NO: 439242 - DNA, 6815 bp, Homo sapiens
  misc_feature (1899)..(1899): n is a, c, g, or t
  misc_feature (2756)..(2756): n is a, c, g, or t
  misc_feature (3794)..(3794): n is a, c, g, or t
  misc_feature (4016)..(4016): n is a, c, g, or t
  misc_feature (4237)..(4237): n is a, c, g, or t
  misc_feature (4480)..(4480): n is a, c, g, or t
  misc_feature (4780)..(4780): n is a, c, g, or t
  misc_feature (4811)..(4811): n is a, c, g, or t
  misc_feature (5096)..(5096): n is a, c, g, or t
  misc_feature (5144)..(5144): n is a, c, g, or t
  misc_feature (5151)..(5151): n is a, c, g, or t
  misc_feature (5497)..(5497): n is a, c, g, or t
  misc_feature (6374)..(6374): n is a, c, g, or t
agcgggagtcctactcagccccagcggaggtgaaggacgtccttccccaggagccgactggccaatcacaggcaggaagatgaaggttctgtgggctgcgttgctggtcacattcctggcaggatgccaggccaaggtggagcaagcggtggagacagagccggagcccgagctgcgccagcagaccgagtggcagagcggccagcgctgggaactggcactgggtcgcttttgggattacctgcgctgggtgcagacactgtctgagcaggtgcaggaggagctgctcagctcccaggtcacccaggaactgagggcgctgatggacgagaccatgaaggagttgaaggcctacaaatcggaactggaggaacaactgaccccggtggcggaggagacgcgggcacggctgtccaaggagctgcaggcggcgcaggcccggctgggcgcggacatggaggacgtgtgcggccgcctggtgcagtaccgcggcgaggtgcaggccatgctcggccagagcaccgaggagctgcgggtgcgcctcgcctcccacctgcgcaagctgcgtaagcggctcctccgcgatgccgatgacctggcagccggacccgcgaccgcctggacgaggtgaaggagcaggtggcggaggtgcgcgccaagctggaggagcaggcccagcagatacgcctgcaggccgaggccttccaggcccgcctcaagagctggttcgagcccctggtggaagacatgcagcgccagtgggccgggctggtggagaaggtgcaggctgccgtgggcaccagcgccgcccctgtgcccagcgacaatcactgaacgccgaagcctgcagccatgcgaccccacgccaccccgtgcctcctgcctccgcgcagcctgcagcgggagaccctgtccccgccccagccgtcctcctggggtggaccctagtttaataaagattcaccaagtttcacgcatctgctggcctccccctgtatttcctctaagccccagcctcagtttctctttctgcccacatactggccacacaattctcagccccctcctctccatctgtgtctgtgtgtatctttctctctgccctttttttttttttagacggagtctggctctgtcacccaggctagagtgcagtggcacgatcttggctcactgcaacctctgcctcttgggttcaagcgattctgctgcctcagtagctgggattacaggctcacaccaccacacccggctaatttttgtatttttagtagagacgagctttcaccatgttggccaggcaggtctcaaactcctgaccaagtgatccacccgccggcctcccaaagtgctgagattacaggcctgagccaccatgcccggcctctgcccctctttcttttttagggggcagggaaaggtctcaccctgtcacccgccatcacagctcactgcagcctccacctcctggactcaagtgataagtgatcctcccgcctcagcctttccagtagctgagactacaggcgcataccactaggattaatttgggggggggtggtgtgtgtggagatggggtctggctttgttggccaggctgatgtggaattcctgggctcaagcgatactcccaccttggcctcctgagtagctgagactactggctagcaccaccacacccagctttttattattatttgtagagacaaggtctcaatatgttgcccaggctagtctcaaacccctgggctcaagagatcctccgccatcggcctcccaaagtgctgggattccaggcatggggctccgagcccggcctgcccaacttaataatacttgttcctcagagttgcaactccaaatgacctgagattggtgcctttattctaagctattttnattttttttctgctgtcattattctcccccttctctcctccagtcttatctgatatctgcctccttcccacccaccctgcaccccatcccacccctctgtctctccctgttctcctcaggagactctggcttcctgttttcctccacttctatcttttatctctccctcctacggtttcttttctttctccccggcctgcttgtttctcccccaacccccttcatctggatttcttcttctgccattcagtttggtttgagctctctgcttctccggttccctctgagctagctgtcccttcacccactgtgaactgggtttccctgcccaaccctcattctctttctttctttctttttttttttttgagacagagtcttgctctgttgcccagcctggagtgcagtggtgcaatcttggttcactgcaacctccacttcccagattcaagcaattctcctgcctcagcctccagagtagctgggattacaggcgtgtcccaccacacccgactaatttttgtatttttggtagagacaaggcttcggcattgttggccaggcaggtctcgaactcctgacctcaagtaatctgcctgcctcaccctcccaaagtgctgggattacaggcatgagccacctcacccggaccatccctcattctccatcctttcctccagttgtgatgtctacccctcatgtttcccaacaagcctactgggtgctgaatccaggctgggaagagaagggagcggctcttctgtcggagtctgcaccaggcccatgctgagacgagagctggcgctcagagaggggaagcttggatggaagcccaggagccgccggcactctcttcncctcccaccccctcagttctcagagacggggaggagggttcccaccaacgggggacaggctgagacttgagcttgtatctcctgggccagctgcaacatctgcttgtccctctgcccatcttggctcctgcacaccctgaacttggtgctttccctggcactgctctgatcacccacgtggaggcagcacccctcccctggagatgactcaccagggctgagtgaggaggggaagggtcagtgtgctcacaggcagggggcctggtctgctgggcctgctgctgattcaccgtatgtccaggagctggagcagcaccctctcagagcctcagtttccccagatgtcaatgagagaatcagcatcagccacatctcccacctgaagaatcgaaccttgagttctcacctttaagaattttttttttttttgagacagtgccttgctcagtcgaccacgctggagtgcagtagcacgatcatcaatcactgcagcctccaactcaagcaaccctcctgcctcaacctcctgagtagctggggccacaggcacccaccaccatgcctggctaattctttcttttttgagatggagtctcactctgtcgcccaggctggagtgcagtggcaccatcttggctcaccgcaaccctgccccccgggttcaagcaattctcctgcctcagcctcctgagtagctagaattacaggcgcacaccaccacaccaggctaatttttgtatttttagtagaaacgaggtttcaccacggtggtcaggttggtctcaaactcctgacatcaggtgatccacccgcctcggcctcccaaagcactgggattacaggagtgagccaccatgcctggccatattttaaacttttttgtagagatggggtcttactatgttgcccaggctgatctcaaactcttgggctcaagcagatcctcctgccaaagcttcccaaagtagttggattacaggtgtgagccaccacgccccaccaacctatgaagatgtctaagcagacagggtgccctanctcaccacatccccagtcagatccagaggtgggacaaggatgggaaggaggttccagaacaaaggctggcagggagtcgtatgggacaggagctgacccagcaaccatccacagagacatcctggagcctgggaaggagaaggacaaagagcccccttttttaaattttttttatgtttttgagacggagtctcactctgtcacccaagctggagtgcagtngcacaatcttggctcactgcaacctccacctcatgggttcaaacgactctcctgcctcagcctcctgagtagctgggaccacaggtgcacaccaccatgcctggataatttttgaatttttggtagagacggagtttcaccatgttggccaggcaggtctcgaactcctgacctcaagtgtccgcccaccttggcctcccaaagttctgggaatacaggcntgagccactgcaaccagccagtagcccccatctttgcccctcgctgagccctactggatgttcttggttatgcgacagtttccccatctattaaagagaaacccctatagcagaggggaggatgaggttggaaaagcaggagcattgttatgctattcttgtggggtctgggaagcagacatctgggtggatgtttggggggtgctgggcttagttggggaagtaggggggcccctggggctnacagggactggaagctctgagctggccagagggatgttgcaatcctgccagggtcttgtctatgctgtccttttcacaaccatccccctactgccaggctgacacgtggttgcgggggcacaaggccagccaacctagagtctgaggctaggcggaggacaccctccccaccagctgccagggtcactggcggtcaaaggcagctggtggggaaggcattggactccagccttgggggacggatgtagtgatggtgggaagcaggcttggtgccaggaggggcgtcagagggtgaataanagcagatagagtgtttgggggaggtagccanccaaagggggtgaggcccggtggaagggaagaagggacatacacgcagagctttgcagctgagggttttaattttttgagatggggtctctgtcccaccaggctggagtgcagtggcacaatcacagctcactgcagcctcgaactcctgggctcaagcaatcttcctacctcagcctcttgagtagctgggactacagcatgcgccaccacgctcggctaatttttgaattttttgtagagatgaggtctccctatattgcccaggctggtctcgaactcccangctcaagtgatcctccctcttcagcttcccaaagtgctgggattacangcatganccaccatgcctggctaatgcaggtgaggtttttgcagtgtcatccagctaaggcgacccgttcccctcccaaaaaagggagactgagaaccatgaagttaagagcccagagaatatcacggtggtctggggtgcttcaagggctggtctggaataaattggaggtggcacgcagggtaggagcgccgggccaactgggagacccagcaacataaaggaaaagttgttggggctgaggaggcttgctgagagaggggaagtgagggaaagaggtgatctagggacacggtgtgaatgagggggggatgagatcacagggttattactgggagacccctgagggaagntggccacagggacaggacaaggctgtcttcttaagggaggagaccacccctcatattgtcttatgcccaatttctgcctccaaagaaagaaaaagtaaaaactaaaaggcagaaatgaaatccacaagcagacagcccgcgccacaccctgggcctggtggttaaagattgacccctgacctaatccgttaggttatctatagattacagacattgtatagaaaagcactgtgaaaatccctattctgttttgttccgatctaattaccggtgcatgcagcccccagtcacgcatcccctgcttgttcaatcgatcacgaccctctcacgtgcacccacttagagttgtgagcccttaaaaggaacagggattgctcactcggggagctcggctcttgagacaggaatcttgcccattccccgaacgaataaaccccttccttaactcagcgtctgaggaattttgtctgcggctcctcctgctacattctgagtggggaaagggactaaggtggtctgaggaccccacagagtcaggaagattgagaggtgagagtgctgaacggggaggggctttggggctaagggaagtgcccgggaccccacctgaccccaacgctcacgggacaggggcagaggagaaaaacgtgggtggacagagggaggcaggcggtcaggggaaggctcaggaggagggagatcaacatcaacctgccccgccccctccccagcctgataaaggtcctgcgggcaggacaggacctcccaaccaagccctccagcaaggattcaggttggtgctgagtgcctgggagggacacccgcctacactctgcaagaaactcaaaaagggagatgaggggatcgtgggagggangtagggagggaggagggtgccactgatcccctgaacccctgcctctgcctcagagtgcccctccggcctcgccatgaggctcttcctgtcgctcccggtcctggtggtggttctgtcgatcgtcttggaaggcccagccccagcccaggggaccccagacgtctccagtgccttggataagctgaaggagtttggaaacacactggaggacaaggctcgggaactcatcagccgcatcaaacagagtgaactttctgccaagatgcgggagtggttttcagagacatttcagaaagtgaaggagaaactcaagattgactcatgaggacctgaagggtgacatcccaggaggggcctctgaaatttcccacaccccagcgcctgtgctgaggactccctccatgtggccccaggtgccaccaataaaaatcctacagaaaa

SEQ ID NO: 439243 - DNA, 977 bp, Homo sapiens
agcgggagtcctactcagccccagcggaggtgaaggacgtccttccccaggagccgactggccaatcacaggcaggaagatgaaggttctgtgggctgcgttgctggtcacattcctggcaggatgccaggccaaggtggagcaagcggtggagacagagccggagcccgagctgcgccagcagaccgagtggcagagcggccagcgctgggaactggcactgggtcgcttttgggattacctgcgctgggtgcagacactgtctgagcaggtgcaggaggagctgctcagctcccaggtcacccaggaactgagggcgctgatggacgagaccatgaaggagttgaaggcctacaaatcggaactggaggaacaactgaccccggtggcggaggagacgcgggcacggctgtccaaggagctgcaggcggcgcaggcccggctgggcgcggacatggaggacgtgtgcggccgcctggtgcagtaccgcggcgaggtgcaggccatgctcggccagagcaccgaggagctgcgggtgcgcctcgcctcccacctgcgcaagctgcgtaagcggctcctccgcgatgccgatgacctggcagccggacccgcgaccgcctggacgaggtgaaggagcaggtggcggaggtgcgcgccaagctggaggagcaggcccagcagatacgcctgcaggccgaggccttccaggcccgcctcaagagctggttcgagcccctggtggaagacatgcagcgccagtgggccgggctggtggagaaggtgcaggctgccgtgggcaccagcgccgcccctgtgcccagcgacaatcactgaacgccgaagcctgcagccatgcgaccccacgccaccccgtgcctcctgcctccgcgcagcctgcagcgggagaccctgtccccgccccagccgtcctcctggggtggaccctagtttaataaagattcaccaagtttcacgca

SEQ ID NO: 439244 - DNA, 7018 bp, Homo sapiens
  misc_feature (2102)..(2102): n is a, c, g, or t
  misc_feature (2959)..(2959): n is a, c, g, or t
  misc_feature (3997)..(3997): n is a, c, g, or t
  misc_feature (4219)..(4219): n is a, c, g, or t
  misc_feature (4440)..(4440): n is a, c, g, or t
  misc_feature (4683)..(4683): n is a, c, g, or t
  misc_feature (4983)..(4983): n is a, c, g, or t
  misc_feature (5014)..(5014): n is a, c, g, or t
  misc_feature (5299)..(5299): n is a, c, g, or t
  misc_feature (5347)..(5347): n is a, c, g, or t
  misc_feature (5354)..(5354): n is a, c, g, or t
  misc_feature (5700)..(5700): n is a, c, g, or t
  misc_feature (6577)..(6577): n is a, c, g, or t
agcgggagtcctactcagccccagcggaggtgaaggacgtccttccccaggagccgactggccaatcacaggcaggaagatgaaggttctgtgggctgcgttgctggtcacattcctggcaggatgccaggccaaggtggagcaagcggtggagacagagccggagcccgagctgcgccagcagaccgagtggcagagcggccagcgctgggaactggcactgggtcgcttttgggattacctgcgctgggtgcagacactgtctgagcaggtgcaggaggagctgctcagctcccaggtcacccaggaactgagggagggcgctgatggacgagaccatgaaggagttgaaggcctacaaatcggaactggaggaacaactgaccccggtggcggaggagacgcgggcacggctgtccaaggagctgcaggcggcgcaggcccggctgggcgcggacatggaggacgtgtgcggccgcctggtgcagtaccgcggcgaggtgcaggccatgctcggccagagcaccgaggagctgcgggtgcgcctcgcctcccacctgcgcaagctgcgtaagcggctcctccgcgatgccgatgacctgcagaagcgcctggcagtgtaccaggccggggcccgcgagggcgccgagcgcggcctcagcgccatccgcgagcgcctggggcccctggtggaacagggccgcgtgcgggccgccactgtgggctccctggccggccagccgctacaggagcgggcccaggcctggggcgagcggctgcgcgcgcggatggaggagatgggcagccggacccgcgaccgcctggacgaggtgaaggagcaggtggcggaggtgcgcgccaagctggaggagcaggcccagcagatacgcctgcaggccgaggccttccaggcccgcctcaagagctggttcgagcccctggtggaagacatgcagcgccagtgggccgggctggtggagaaggtgcaggctgccgtgggcaccagcgccgcccctgtgcccagcgacaatcactgaacgccgaagcctgcagccatgcgaccccacgccaccccgtgcctcctgcctccgcgcagcctgcagcgggagaccctgtccccgccccagccgtcctcctggggtggaccctagtttaataaagattcaccaagtttcacgcatctgctggcctccccctgtatttcctctaagccccagcctcagtttctctttctgcccacatactggccacacaattctcagccccctcctctccatctgtgtctgtgtgtatctttctctctgccctttttttttttttagacggagtctggctctgtcacccaggctagagtgcagtggcacgatcttggctcactgcaacctctgcctcttgggttcaagcgattctgctgcctcagtagctgggattacaggctcacaccaccacacccggctaatttttgtatttttagtagagacgagctttcaccatgttggccaggcaggtctcaaactcctgaccaagtgatccacccgccggcctcccaaagtgctgagattacaggcctgagccaccatgcccggcctctgcccctctttcttttttagggggcagggaaaggtctcaccctgtcacccgccatcacagctcactgcagcctccacctcctggactcaagtgataagtgatcctcccgcctcagcctttccagtagctgagactacaggcgcataccactaggattaatttgggggggggtggtgtgtgtggagatggggtctggctttgttggccaggctgatgtggaattcctgggctcaagcgatactcccaccttggcctcctgagtagctgagactactggctagcaccaccacacccagctttttattattatttgtagagacaaggtctcaatatgttgcccaggctagtctcaaacccctgggctcaagagatcctccgccatcggcctcccaaagtgctgggattccaggcatggggctccgagcccggcctgcccaacttaataatacttgttcctcagagttgcaactccaaatgacctgagattggtgcctttattctaagctattttnattttttttctgctgtcattattctcccccttctctcctccagtcttatctgatatctgcctccttcccacccaccctgcaccccatcccacccctctgtctctccctgttctcctcaggagactctggcttcctgttttcctccacttctatcttttatctctccctcctacggtttcttttctttctccccggcctgcttgtttctcccccaacccccttcatctggatttcttcttctgccattcagtttggtttgagctctctgcttctccggttccctctgagctagctgtcccttcacccactgtgaactgggtttccctgcccaaccctcattctctttctttctttctttttttttttttgagacagagtcttgctctgttgcccagcctggagtgcagtggtgcaatcttggttcactgcaacctccacttcccagattcaagcaattctcctgcctcagcctccagagtagctgggattacaggcgtgtcccaccacacccgactaatttttgtatttttggtagagacaaggcttcggcattgttggccaggcaggtctcgaactcctgacctcaagtaatctgcctgcctcaccctcccaaagtgctgggattacaggcatgagccacctcacccggaccatccctcattctccatcctttcctccagttgtgatgtctacccctcatgtttcccaacaagcctactgggtgctgaatccaggctgggaagagaagggagcggctcttctgtcggagtctgcaccaggcccatgctgagacgagagctggcgctcagagaggggaagcttggatggaagcccaggagccgccggcactctcttcncctcccaccccctcagttctcagagacggggaggagggttcccaccaacgggggacaggctgagacttgagcttgtatctcctgggccagctgcaacatctgcttgtccctctgcccatcttggctcctgcacaccctgaacttggtgctttccctggcactgctctgatcacccacgtggaggcagcacccctcccctggagatgactcaccagggctgagtgaggaggggaagggtcagtgtgctcacaggcagggggcctggtctgctgggcctgctgctgattcaccgtatgtccaggagctggagcagcaccctctcagagcctcagtttccccagatgtcaatgagagaatcagcatcagccacatctcccacctgaagaatcgaaccttgagttctcacctttaagaattttttttttttttgagacagtgccttgctcagtcgaccacgctggagtgcagtagcacgatcatcaatcactgcagcctccaactcaagcaaccctcctgcctcaacctcctgagtagctggggccacaggcacccaccaccatgcctggctaattctttcttttttgagatggagtctcactctgtcgcccaggctggagtgcagtggcaccatcttggctcaccgcaaccctgccccccgggttcaagcaattctcctgcctcagcctcctgagtagctagaattacaggcgcacaccaccacaccaggctaatttttgtatttttagtagaaacgaggtttcaccacggtggtcaggttggtctcaaactcctgacatcaggtgatccacccgcctcggcctcccaaagcactgggattacaggagtgagccaccatgcctggccatattttaaacttttttgtagagatggggtcttactatgttgcccaggctgatctcaaactcttgggctcaagcagatcctcctgccaaagcttcccaaagtagttggattacaggtgtgagccaccacgccccaccaacctatgaagatgtctaagcagacagggtgccctanctcaccacatccccagtcagatccagaggtgggacaaggatgggaaggaggttccagaacaaaggctggcagggagtcgtatgggacaggagctgacccagcaaccatccacagagacatcctggagcctgggaaggagaaggacaaagagcccccttttttaaattttttttatgtttttgagacggagtctcactctgtcacccaagctggagtgcagtngcacaatcttggctcactgcaacctccacctcatgggttcaaacgactctcctgcctcagcctcctgagtagctgggaccacaggtgcacaccaccatgcctggataatttttgaatttttggtagagacggagtttcaccatgttggccaggcaggtctcgaactcctgacctcaagtgtccgcccaccttggcctcccaaagttctgggaatacaggcntgagccactgcaaccagccagtagcccccatctttgcccctcgctgagccctactggatgttcttggttatgcgacagtttccccatctattaaagagaaacccctatagcagaggggaggatgaggttggaaaagcaggagcattgttatgctattcttgtggggtctgggaagcagacatctgggtggatgtttggggggtgctgggcttagttggggaagtaggggggcccctggggctnacagggactggaagctctgagctggccagagggatgttgcaatcctgccagggtcttgtctatgctgtccttttcacaaccatccccctactgccaggctgacacgtggttgcgggggcacaaggccagccaacctagagtctgaggctaggcggaggacaccctccccaccagctgccagggtcactggcggtcaaaggcagctggtggggaaggcattggactccagccttgggggacggatgtagtgatggtgggaagcaggcttggtgccaggaggggcgtcagagggtgaataanagcagatagagtgtttgggggaggtagccanccaaagggggtgaggcccggtggaagggaagaagggacatacacgcagagctttgcagctgagggttttaattttttgagatggggtctctgtcccaccaggctggagtgcagtggcacaatcacagctcactgcagcctcgaactcctgggctcaagcaatcttcctacctcagcctcttgagtagctgggactacagcatgcgccaccacgctcggctaatttttgaattttttgtagagatgaggtctccctatattgcccaggctggtctcgaactcccangctcaagtgatcctccctcttcagcttcccaaagtgctgggattacangcatganccaccatgcctggctaatgcaggtgaggtttttgcagtgtcatccagctaaggcgacccgttcccctcccaaaaaagggagactgagaaccatgaagttaagagcccagagaatatcacggtggtctggggtgcttcaagggctggtctggaataaattggaggtggcacgcagggtaggagcgccgggccaactgggagacccagcaacataaaggaaaagttgttggggctgaggaggcttgctgagagaggggaagtgagggaaagaggtgatctagggacacggtgtgaatgagggggggatgagatcacagggttattactgggagacccctgagggaagntggccacagggacaggacaaggctgtcttcttaagggaggagaccacccctcatattgtcttatgcccaatttctgcctccaaagaaagaaaaagtaaaaactaaaaggcagaaatgaaatccacaagcagacagcccgcgccacaccctgggcctggtggttaaagattgacccctgacctaatccgttaggttatctatagattacagacattgtatagaaaagcactgtgaaaatccctattctgttttgttccgatctaattaccggtgcatgcagcccccagtcacgcatcccctgcttgttcaatcgatcacgaccctctcacgtgcacccacttagagttgtgagcccttaaaaggaacagggattgctcactcggggagctcggctcttgagacaggaatcttgcccattccccgaacgaataaaccccttccttaactcagcgtctgaggaattttgtctgcggctcctcctgctacattctgagtggggaaagggactaaggtggtctgaggaccccacagagtcaggaagattgagaggtgagagtgctgaacggggaggggctttggggctaagggaagtgcccgggaccccacctgaccccaacgctcacgggacaggggcagaggagaaaaacgtgggtggacagagggaggcaggcggtcaggggaaggctcaggaggagggagatcaacatcaacctgccccgccccctccccagcctgataaaggtcctgcgggcaggacaggacctcccaaccaagccctccagcaaggattcaggttggtgctgagtgcctgggagggacacccgcctacactctgcaagaaactcaaaaagggagatgaggggatcgtgggagggangtagggagggaggagggtgccactgatcccctgaacccctgcctctgcctcagagtgcccctccggcctcgccatgaggctcttcctgtcgctcccggtcctggtggtggttctgtcgatcgtcttggaaggcccagccccagcccaggggaccccagacgtctccagtgccttggataagctgaaggagtttggaaacacactggaggacaaggctcgggaactcatcagccgcatcaaacagagtgaactttctgccaagatgcgggagtggttttcagagacatttcagaaagtgaaggagaaactcaagattgactcatgaggacctgaagggtgacatcccaggaggggcctctgaaatttcccacaccccagcgcctgtgctgaggactccctccatgtggccccaggtgccaccaataaaaatcctacagaaaa

SEQ ID NO: 439245 - DNA, 1163 bp, Homo sapiens
agcgggagtcctactcagccccagcggaggtgaaggacgtccttccccaggagccgactggccaatcacaggcaggaagatgaaggttctgtgggctgcgttgctggtcacattcctggcaggatgccaggccaaggtggagcaagcggtggagacagagccggagcccgagctgcgccagcagaccgagtggcagagcggccagcgctgggaactggcactgggtcgcttttgggattacctgcgctgggtgcagacactgtctgagcaggtgcaggaggagctgctcagctcccaggtcacccaggaactgagggagggcgctgatggacgagaccatgaaggagttgaaggcctacaaatcggaactggaggaacaactgaccccggtggcggaggagacgcgggcacggctgtccaaggagctgcaggcggcgcaggcccggctgggcgcggacatggaggacgtgtgcggccgcctggtgcagtaccgcggcgaggtgcaggccatgctcggccagagcaccgaggagctgcgggtgcgcctcgcctcccacctgcgcaagctgcgtaagcggctcctccgcgatgccgatgacctgcagaagcgcctggcagtgtaccaggccggggcccgcgagggcgccgagcgcggcctcagcgccatccgcgagcgcctggggcccctggtggaacagggccgctgcgggccgccactgtgggctccctggccggccagccgctacaggagcgggcccaggcctggggcgagcggctgcgcgcgcggatggaggagatggtgggcagccggacccgcgaccgcctggacgaggtgaaggagcaggtggcggaggtgcgcgccaagctgggagcaggcccagcagatacgcctgcaggccgaggccttccaggcccgcctcaagagctggttcgagcccctggtggaagacatgcagcgccagtgggccgggctggtggagaaggtgcaggctgccgtgggcaccagcgccgcccctgtgcccagcgacaatcactgaacgccgaagcctgcagccatgcgaccccacgccaccccgtgcctcctgcctccgcgcagcctgcagcgggagaccctgtccccgccccagccgtcctcctggggtgggccctagtttaataaagat

SEQ ID NO: 439246 - DNA, 2229 bp, Homo sapiens
gaaaggcaaggatgtggccttcatgtgatgggcagcatattttctgactcatgcacagatacacttaatactcctcatggaacacaatatcccacgtctccctttacctatccgttcagcagaatggtgctattaaaaaaatggtgctaatatctagatggtggcagaattaatgtaaacatagataggcatacaaatgggtaagtgtatgtgaaactctccatatacatcttctgttaaacatgtaacggtgttgctgaccaatgccagttttattgcttgggtaccttgaatttaagatttaatattatgtgctttttatttttttccaagccattaacgtgtattactctcatgaattcctgtgaaaaataaaacagtgggattgggatgaaattcaagatagaccagaaacaggaggaaagtacaaatgtttacctaaagccagagaatttatttctagatgataattacattattgtattctctgcctttaaacataaacattgctggccgatagcaatctctggtgaataatggttttcgaggagaggagacacttaaattgttagtgacatgagtggaggagaatctgatatttactaatgaggcagtttgcaaagactgtccctgaagtgtagtgtagtctttcagggggattcatttagtaagctagattgatttaacctggtactgtactagcatagggtcaaatacgtgtcatcagagacctgggtatgaccaggcttacaaaactcaggaacaaactcagattcctactgacctcaaccaactaaactaggccaaatttctccgtgtacaaaatggaccacgttatttacaatccacgtggtggagaagatggtagacatgtggagagagtttggccaggtgctccattctaggtctttttccagtttctcaaaggcagaacattggctcctaattatttgccatggatatttgcttcctgttctggagctatgttgtaagacagctgtgtgatgtccatcattcttgactccagaatgaagacagggcttgctgttttctgtcctgttggtatcatctgttgccttggcgatcactcagtgatgagtcgtcagtattttgacatgtcccagtgcttgctgtacaagaggggactcagatcaacaggaagactctgaagacaggaacctgcatggtatcttacatctttgatacttgggtgctgatatgaagcagagttgttgatttactttatctaggcccttctttcttctcacctggatcaagcaactgagaagtgtatcaggagacactggatacatatctctatgaaatagagagggccatcgcagggcctggtacttaactacattaacgttctaaaacccagtttggtttacgttgtctttcacagtagtatatttagctcttctctggaaagttgtgggttaatataattcttaaacatgaaaatgtaattaaacacaccacgagagaacaatattccaggagacttaatagtgattactttcttcaatcaggaaatcgtttcagtgcctcctttgtaggaatgctttgttttgtgatgggttttcttaaagaagagcacacctccgtccaatctcctgagacagccacgtctccgctgacatcccactgtgatgctttcagatagtcagtgaatgtttctgataaccttcatccagtatctgaaacacaatgtgagagattatattgttttagataataacatcccatttagttgactaaaatcttccaaactctgaaagctgcacactgctactccagagagtgcaggtcttagctcttctcctttctgacttcaagatgaatctttgggacgatgtttctggtgcttggtccacagtgattcacttttgaaggagaggccacatgacatgaactgcctggtgttacaacctagctaacatatttgatgctactcctgttgtctgtactgcttattcaagtagtattctaagttatgttactaaaaaacatggtgggtaaagcacaatcctacccatcattgtcctccaaaataattgtatgacatacacggcccagcccattgccctccctgcatctctgtgctgctttgccatttccccttctacccagcctcctcaaggggtaccttggtggatatttcagtacttaaaaccagactgtaatcataacctccctctgtgtggcatcaataaatagccaaactca

SEQ ID NO: 439247 - DNA, 274 bp, Homo sapiens
gcggccgcctactactactactgctcgaattcaagcttctaacgatgtacggggacatggtgggtaaagcacaatcctacccatcattgtcctccaaaataattgtatgacatacacggcccagcccattgccctccctgcatctctgtgctgctttgccatttccccttctacccagcctcctcaaggggtaccttggtggatatttcagtacttaaaaccagactgtaatcataacctccctctgtgtggcatcaataaatagccaaactca

SEQ ID NO: 439248 - DNA, 362 bp, Homo sapiens
tgccacctgtcctcacctcttctcaggttggaaaatggaggttccatattaaaatatttcaaagaaccaggtaaattgtactaagtacaagaacatagtgcaaacttctaatctagagaaaaaacatttctaaaaagtaaggtaaaggggatctactcctcagtgtacccatcattgtcctccaaaataattgtatgacatacacggcccagcccattgccctccctgcatctctgtgctgctttgccatttccccttctacccagcctcctcaaggggtaccttggtggatatttcagtacttaaaaccagactgtaatcataacctccctctgtgtggcatcaataaatagccaaactca

SEQ ID NO: 439249 - DNA, 428 bp, Homo sapiens
ctgtgggttccttttacaatgtgaacctcaagtactaaaagtgcatttttaaagaaatattctgcatttcaggtttcccactaattatgactggccttctcccaagttagtttgagctattttggtgaggttttatagtgatttaataagaaaagcttttttaaaacctcataaaaccttctgtacaattcattctgaccaacattccctcttacaattatgtcattaacaacttctttttaaaagaccagaacttttgtctattcatgttaaccttaaaagcagcattcaccgaacccctgagaaacaaggagagctataatactttacaggattggggcagagcacatgaaatcatgtgtgagagagggttctgtacatttgtttttcttaattgccatttctgacttgggcagcctccccaccca

SEQ ID NO: 439250 - DNA, 384 bp, Homo sapiens
tggtaacttataaagaacagaaatttatttcttattgttctcaaggctgggaagtctaagatcaaatcaccagcaggttggggtctggtgagggtctagtccctgcctccaagatgatgtctcattgctgtatgctccggaaaggaggaacagtgtccccacaaagtggaaggacaataggtccaactccttccttcaggcccttttataaaaacacctaatcccattcatgagggtggagccctcatggcctaattacatcttcaaggccccacctcttaataccatcacattggcagcacctgaattttggaggggacacagtcataccatagcaatgcctaaaactgatttcttggtcttattccccaagcctgaccctaa

SEQ ID NO: 439251 - DNA, 1228 bp, Homo sapiens
gctgaaaccctgtacttctgttcgcggccgtgtagagctgccccttatgccacagcttcctcatccatacgtaggggtgatgttggcaaggcctccggggcgctcaggatcaaaggcggcggcagtgtcctgccaagtgttcacagctgatgagacgtggtccctgaacacagcggttcctgttctgatcactcgagtctccgtgatgccaccgttcccagaaggcagcccgtgcagcctccgggtccccccttcagccatggcagcccgtgcagcctccgggtcgtcccttcggccaagcttccctttccttgagagcagcacgctggcctggccatgcagaacaaaacacaactcagaaatccctcctcagccctcggcagtaaaacttctgaggattcgactttttagttaatttgctcactgtggcagctcactggaaaataaatcgaggatgccaagtcctcctcttagaaaaatagcccctgcagtggggtttgctgatgtgctcatttgtgtcattgcaggctttatcctgtggataaacgcagagtgaacgagtttggggagtcctacgaggagaaggccacgcgggcgccccacacggactgaaggccgcccgggctgccgccagccaagtgcaacttgaattgtcaatgagtatttttggaagcatttggaggaattcctagacattgcgttttctgtgttgccaaaatcccttcggacatttctcagacatctcccaagttcccatcacgtcagatttggagctggtagcgcttacgatgcccccacgtgtgaacatctgtcttggtcacagagctgggtgctgccggtcaccttgagctgtggtggctcccggcacacgagtgtccggggttcggccatgtcctcacgcgggcaggggtgggagccctcacaggcaagggggctgttggatttccatttcaggtggttttctaagtgctccttatgtgaatttcaaacacgtatggaattcattccgcatggactctgggatcaaaggctctttcctcttttgtttgagagttggttgttttaaagcttaatgtatgtttctattttaaaataaatttttctggctgtggcatttttcttgacctggtataatgaaagtatttcagatatttgagtttaacccttttccagaaagtaatacatgatatggatttatttatgcattaaaagagcaaatttaaagagc

SEQ ID NO: 439252 - DNA, 481 bp, Homo sapiens
ccttagtcacagctcagctgtgctcagatcctccctgagtctattaatatcactgtgttgaatttcacaacagtttggcacttacagcgaatctgagaggaaaaccgaggagtacgatactcaggtaagtcacttgtgattcagggcacgtgcatgccaggcaaatccaacaccctcaaagacgggtcttttactgtcattgctcagtgcggaagtctccttggagtacgggtcagcccgccttgagcagggatcccaagagtgaacacataaaacccaaatttcttactgggaagggcgggggctcgcagagactcatttcccagtccttacaggcacagcctgcctgtgtcaccgtatagtagggatattttcatcgtttgtaagtcacattcgccaggcagctgacgcaggccatggtgtctgctgtggttgctgggaacgcacttgccgtcaccaaggccataatggccgcggccgc

SEQ ID NO: 439253 - DNA, 300 bp, Homo sapiens
  misc_feature (232)..(232): n is a, c, g, or t
tggaatgtgcctgtagaggaggagctggatggaatgtgcctgtagaggaggagctggatggaatgtgtctgtagaggaggagctggatggaatgtgtctgtagaggaggagctggatgaaatgtccctgtagaggaggagctggatggaatgcgtacaggtaaccaaggtaacaggtgtgagttattgattagagttgacgtgaagcaggtaggctgtttacagtaactagngtcaaggaagaacaagaaagtcgagttcgagaacaaaggataaggaagttaaccagctaaataaaccc

SEQ ID NO: 439254 - DNA, 2442 bp, Homo sapiens
atggcggacaactttgtctttgacgggtcctccctgcctgccgatgtgcatcggtacatgaagatgatccagctggggaaaaccgtgcattacctgcccatcctgttcatcgaccagctcagcaaccgcgtgaaggacctgatggtcataaaccgctccggcggtctgcggcgcgcggcgcattcgttcccccgcggcggtggcggtggcgcgcggcggctctccagtgagcggcggagcccggagcggcgggctgggcgccgggcgggcggggctcgcggctgagaggcgggcgggccgggggcgccgggcgcggggccgccatgtggagcggccgcagctccttcaccagcttggtggtgggcgtgttcgtggtctacgtggtgcacacctgctgggtcatgtacggcatcgtctacacccgcccgtgctccggcgacgccaactgcatccagccctacctggcgcggcggcccaagctgcagctgagcgtgtacaccacgacgaggtcccacctgggtgctgagaacaacatcgacctggtcttgaatgtggaagactttgatgtggagtccaaatttgaaaggacagttaatgtttctgtaccaaagaaaacgagaaacaatgggacgctgtatgcctacatcttcctccatcacgctggggtcctgccgtggcacgacgggaagcaggtgcacctggtcagtcctctgaccacctacatggtccccaagccagaagaaatcaacctgctcaccggggagtctgatacacagcagatcgaggcggagaagaagccgacgagtgccctggatgagccagtgtcccactggcgaccgcggctggcgctgaacgtgatggcggacaactttgtctttgacgggtcctccctgcctgccgatgtgcatcggtacatgaagatgatccagctggggaaaaccgtgcattacctgcccatcctgttcatcgaccagctcagcaaccgcgtgaaggacctgatggtcataaaccgctccaccaccgagctgcccctcaccgtgtcctacgacaaggtctcactggggcggctgcgcttctggatccacatgcaggacgccgtgtactccctgcagcagttcgggttttcagagaaagatgctgatgaggtgaaaggaatttttgtagataccaacttatacttcctggcgctgaccttctttgtcgcagcgttccatcttctctttgatttcctggcctttaaaaatgacatcagtttctggaagaagaagaagagcatgatcggcatgtccaccaaggcagtgctctggcgctgcttcagcaccgtggtcatctttctgttcctgctggacgagcagacgagcctgctggtgctggtcccggcgggtgttggagccgccattgagctgtggaaagtgaagaaggcattgaagatgactattttttggagaggcctgatgcccgaatttcagtttggcacttacagcgaatctgagaggaaaaccgaggagtacgatactcaggccatgaagtacttgtcatacctgctgtaccctctctgtgtcgggggtgctgtctattcactcctgaatatcaaatataagagctggtactcctggttaatcaacagcttcgtcaacggggtctatgcctttggtttcctcttcatgctgccccagctctttgtgaactacaagttgaagtcagtggcacatctgccctggaaggccttcacctacaaggctttcaacaccttcattgatgacgtctttgccttcatcatcaccatgcccacgtctcaccggctggcctgcttccgggacgacgtggtgtttctggtctacctgtaccagcggtggctttatcctgtggataaacgcagagtgaacgagtttggggagtcctacgaggagaaggccacgcgggcgccccacacggactgaaggccgcccgggctgccgccagccaagtgcaacttgaattgtcaatgagtatttttggaagcatttggaggaattcctagacattgcgttttctgtgttgccaaaatcccttcggacatttctcagacatctcccaagttcccatcacgtcagatttggagctggtagcgcttacgatgcccccacgtgtgaacatctgtcttggtcacagagctgggtgctgccggtcaccttgagctgtggtggctcccggcacacgagtgtccggggttcggccatgtcctcacgcgggcaggggtgggagccctcacaggcaagggggctgttggatttccatttcaggtggttttctaagtgctccttatgtgaatttcaaacacgtatggaattcattccgcatggactctgggatcaaaggctctttcctcttttgtttgagagttggttgttttaaagcttaatgtatgtttctattttaaaataaatttttctggctgtggca

SEQ ID NO: 439255 - DNA, 2498 bp, Homo sapiens
cgcgtccacttccggcaggcggcggggcccggaagcggcgcgcggggccggcgaatcccgcggcgccaggtgggagcggggccggagcatgcggggcggccggcggtctgcggcgcgcggcgcattcgttcccccgcggcggtggcggtggcgcgcggcggctctccagtgagcggcggagcccggagcggcgggctgggcgccgggcgggcggggctcgcggctgagaggcgggcgggccgggggcgccgggcgcggggccgccatgtggagcggccgcagctccttcaccagcttggtggtgggcgtgttcgtggtctacgtggtgcacacctgctgggtcatgtacggcatcgtctacacccgcccgtgctccggcgacgccaactgcatccagccctacctggcgcggcggcccaagctgcagctgagcgtgtacaccacgacgaggtcccacctgggtgctgagaacaacatcgacctggtcttgaatgtggaagactttgatgtggagtccaaatttgaaaggacagttaatgtttctgtaccaaagaaaacgagaaacaatgggacgctgtatgcctacatcttcctccatcacgctggggtcctgccgtggcacgacgggaagcaggtgcacctggtcagtcctctgaccacctacatggtccccaagccagaagaaatcaacctgctcaccggggagtctgatacacagcagatcgaggcggagaagaagccgacgagtgccctggatgagccagtgtcccactggcgaccgcggctggcgctgaacgtgatggcggacaactttgtctttgacgggtcctccctgcctgccgatgtgcatcggtacatgaagatgatccagctggggaaaaccgtgcattacctgcccatcctgttcatcgaccagctcagcaaccgcgtgaaggacctgatggtcataaaccgctccaccaccgagctgcccctcaccgtgtcctacgacaaggtctcactggggcggctgcgcttctggatccacatgcaggacgccgtgtactccctgcagcagttcgggttttcagagaaagatgctgatgaggtgaaaggaatttttgtagataccaacttatacttcctggcgctgaccttctttgtcgcagcgttccatcttctctttgatttcctggcctttaaaaatgacatcagtttctggaagaagaagaagagcatgatcggcatgtccaccaaggcagtgctctggcgctgcttcagcaccgtggtcatctttctgttcctgctggacgagcagacgagcctgctggtgctggtcccggcgggtgttggagccgccattgagctgtggaaagtgaagaaggcattgaagatgactattttttggagaggcctgatgcccgaatttcagtttggcacttacagcgaatctgagaggaaaaccgaggagtacgatactcaggccatgaagtacttgtcatacctgctgtaccctctctgtgtcgggggtgctgtctattcactcctgaatatcaaatataagagctggtactcctggttaatcaacagcttcgtcaacggggtctatgcctttggtttcctcttcatgctgccccagctctttgtgaactacaagttgaagtcagtggcacatctgccctggaaggccttcacctacaaggctttcaacaccttcattgatgacgtctttgccttcatcatcaccatgcccacgtctcaccggctggcctgcttccgggacgacgtggtgtttctggtctacctgtaccagcggtggctttatcctgtggataaacgcagagtgaacgagtttggggagtcctacgaggagaaggccacgcgggcgccccacacggactgaaggccgcccgggctgccgccagccaagtgcaacttgaattgtcaatgagtatttttggaagcatttggaggaattcctagacattgcgttttctgtgttgccaaaatcccttcggacatttctcagacatctcccaagttcccatcacgtcagatttggagctggtagcgcttacgatgcccccacgtgtgaacatctgtcttggtcacagagctgggtgctgccggtcaccttgagctgtggtggctcccggcacacgagtgtccggggttcggccatgtcctcacgcgggcaggggtgggagccctcacaggcaagggggctgttggatttccatttcaggtggttttctaagtgctccttatgtgaatttcaaacacgtatggaattcattccgcatggactctgggatcaaaggctctttcctcttttgtttgagagttggttgttttaaagcttaatgtatgtttctattttaaaataaatttttctggctgtggcatttttcttgacctggtataatgaaagtatttcagatatttgagtttaacccttttccagaaagtaatacatgatatggatttatttatgcattaaaagagcaaatttaaagagc

SEQ ID NO: 439256 - DNA, 2520 bp, Homo sapiens
cgcgtccacttccggcaggcggcggggcccggaagcggcgcgcggggccggcgaatcccgcggcgccaggtgggagcggggccggagcatgcggggcggccggcggtctgcggcgcgcggcgcattcgttcccccgcggcggtggcggtggcgcgcggcggctctccagtgagcggcggagcccggagcggcgggctgggcgccgggcgggcggggctcgcggctgagaggcgggcgggccgggggcgccgggcgcggggccgccatgtggagcggccgcagctccttcaccagcttggtggtgggcgtgttcgtggtctacgtggtgcacacctgctgggtcatgtacggcatcgtctacacccgcccgtgctccggcgacgccaactgcatccagccctacctggcgcggcggcccaagctgcagctgagcgtgtacaccacgacgaggtcccacctgggtgctgagaacaacatcgacctggtcttgaatgtggaagactttgatgtggagtccaaatttgaaaggacagttaatgtttctgtaccaaagaaaacgagaaacaatgggacgctgtatgcctacatcttcctccatcacgctggggtcctgccgtggcacgacgggaagcaggtgcacctggtcagtcctctgaccacctacatggtccccaagccagaagaaatcaacctgctcaccggggagtctgatacacagcagatcgaggcggagaagaagccgacgagtgccctggatgagccagtgtcccactggcgaccgcggctggcgctgaacgtgatggcggacaactttgtctttgacgggtcctccctgcctgccgatgtgcatcggtacatgaagatgatccagctggggaaaaccgtgcattacctgcccatcctgttcatcgaccagctcagcaaccgcgtgaaggacctgatggtcataaaccgctccaccaccgagctgcccctcaccgtgtcctacgacaaggtctcactggggcggctgcgcttctggatccacatgcaggacgccgtgtactccctgcagcagttcgggttttcagagaaagatgctgatgaggtgaaaggaatttttgtagataccaacttatacttcctggcgctgaccttctttgtcgcagcgttccatcttctctttgatttcctggcctttaaaaatgacatcagtttctggaagaagaagaagagcatgatcggcatgtccaccaaggcagtgctctggcgctgcttcagcaccgtggtcatctttctgttcctgctggacgagcagacgagcctgctggtgctggtcccggcgggtgttggagccgccattgagctgtggaaagtgaagaaggcattgaagatgactattttttggagaggcctgatgcccgaatttcagtttggcacttacagcgaatctgagaggaaaaccgaggagtacgatactcaggccatgaagtacttgtcatacctgctgtaccctctctgtgtcgggggtgctgtctattcactcctgaatatcaaatataagagctggtactcctggttaatcaacagcttcgtcaacggggtctatgcctttggtttcctcttcatgctgccccagctctttgtgaactacaagttgaagtcagtggcacatctgccctggaaggccttcacctacaaggctttcaacaccttcattgatgacgtctttgccttcatcatcaccatgcccacgtctcaccggctggcctgcttccgggacgacgtggtgtttctggtctacctgtaccagcggtggctttatcctgtggataaacgcagagtgaacgagtttggggagtcctacgaggagaaggccacgcgggcgccccacacggactgaaggccgcccgggctgccgccagccaagtgcaacttgaattgtcaatgagtatttttggaagcatttggaggaattcctagacattgcgttttctgtgttgccaaaatcccttcggacatttctcagacatctcccaagttcccatcacgtcagatttggagctggtagcgcttacgatgcccccacgtgtgaacatctgtcttggtcacagagctgggtgctgccggtcaccttgagctgtggtggctcccggcacacgagtgtccggggttcggccatgtcctcacgcgggcaggggtgggagccctcacaggcaagggggctgttggatttccatttcaggtggttttctaagtgctccttatgtgaatttcaaacacgtatggaattcattccgcatggactctgggatcaaaggctctttcctcttttgtttgagagttggttgttttaaagcttaatgtatgtttctattttaaaataaatttttctggctgtggcatttttcttgacctggtataatgaaagtatttcagatatttgagtttaacccttttccagaaagtaatacatgatatggatttatttatgcattaaaagagcaaatttaaagagccaaaaaaacaaaaaaagggcgc

SEQ ID NO: 439257 - DNA, 2407 bp, Homo sapiens
cgcgtccacttccggcaggcggcggggcccggaagcggcgcgcggggccggcgaatcccgcggcgccaggtgggagcggggccggagcatgcggggcggccggcggtctgcggcgcgcggcgcattcgttcccccgcggcggtggcggtggcgcgcggcggctctccagtgagcggcggagcccggagcggcgggctgggcgccgggcgggcggggctcgcggctgagaggcgggcgggccgggggcgccgggcgcggggccgccatgtggagcggccgcagctccttcaccagcttggtggtgggcgtgttcgtggtctacgtggtgcacacctgctgggtcatgtacggcatcgtctacacccgcccgtgctccggcgacgccaactgcatccagccctacctggcgcggcggcccaagctgcagctgagcgtgtacaccacgacgaggtcccacctgggtgctgagaacaacatcgacctggtcttgaatgtggaagactttgatgtggagtccaaatttgaaaggacagttaatgtttctgtaccaaagaaaacgagaaacaatgggacgctgtatgcctacatcttcctccatcacgctggggtcctgccgtggcacgacgggaagcaggtgcacctggtcagtcctctgaccacctacatggtccccaagccagaagaaatcaacctgctcaccggggagtctgatacacagcagatcgaggcggagaagaagccgacgagtgccctggatgagccagtgtcccactggcgaccgcggctggcgctgaacgtgatggcggacaactttgtctttgacgggtcctccctgcctgccgatgtgcatcggtacatgaagatgatccagctggggaaaaccgtgcattacctgcccatcctgttcatcgaccagctcagcaaccgcgtgaaggacctgatggtcataaaccgctccaccaccgagctgcccctcaccgtgtcctacgacaaggtctcactggggcggctgcgcttctggatccacatgcaggacgccgtgtactccctgcagcagttcgggttttcagagaaagatgctgatgaggtgaaaggaatttttgtagataccaacttatacttcctggcgctgaccttctttgtcgcagcgttccatcttctctttgatttcctggcctttaaaaatgacatcagtttctggaagaagaagaagagcatgatcggcatgtccaccaaggcagtgctctggcgctgcttcagcaccgtggtcatctttctgttcctgctggacgagcagacgagcctgctggtgctggtcccggcgggtgttggagccgccattgagctgtggaaagtgaagaaggcattgaagatgactattttttggagaggcctgatgcccgaatttcagtttggcacttacagcgaatctgagaggaaaaccgaggagtacgatactcaggccatgaagtacttgtcatacctgctgtaccctctctgtgtcgggggtgctgtctattcactcctgaatatcaaatataagagctggtactcctggttaatcaacagcttcgtcaacggggtctatgcctttggtttcctcttcatgctgccccagctctttgtgaactacaagttgaagtcagtggcacatctgccctggaaggccttcacctacaaggctttcaacaccttcattgatgacgtctttgccttcatcatcaccatgcccacgtctcaccggctggcctgcttccgggacgacgtggtgtttctggtctacctgtaccagcggtggctttatcctgtggataaacgcagagtgaacgagtttggggagtcctacgaggagaaggccacgcgggcgccccacacggactgaaggccgcccgggctgccgccagccaagtgcaacttgaattgtcaatgagtatttttggaagcatttggaggaattcctagacattgcgttttctgtgttgccaaaatcccttcggacatttctcagacatctcccaagttcccatcacgtcagatttggagctggtagcgcttacgatgcccccacgtgtgaacatctgtcttggtcacagagctgggtgctgccggtcaccttgagctgtggtggctcccggcacacgagtgtccggggttcggccatgtcctcacgcgggcaggggtgggagccctcacaggcaagggggctgttggatttccatttcaggtggttttctaagtgctccttatgtgaatttcaaacacgtatggaattcattccgcatggactctgggatcaaaggctctttcctcttttgtttgagagttggttgttttaaagcttaatgtatgtttctattttaaaataaatttttctggctgtggcaaaacagatacaaaccatatcgac

SEQ ID NO: 439258 - DNA, 1688 bp, Homo sapiens
agtgatgttggatgtaaagtgaaatattagttggcggatgaagcagatagtgaggaaagttgagccagtgtcccactggcgaccgcggctggcgctgaacgtgatggcggacaactttgtctttgacgggtcctccctgcctgccgatgtgcatcggtacatgaagatgatccagctggggaaaaccgtgcattacctgcccatcctgttcatcgaccagctcagcaaccgcgtgaaggacctgatggtcataaaccgctccaccaccgagctgcccctcaccgtgtcctacgacaaggtctcactggggcggctgcgcttctggatccacatgcaggacgccgtgtactccctgcagcagttcgggttttcagagaaagatgctgatgaggtgaaaggaatttttgtagataccaacttatacttcctggcgctgaccttctttgtcgcagcgttccatcttctctttgatttcctggcctttaaaaatgacatcagtttctggaagaagaagaagagcatgatcggcatgtccaccaaggcagtgctctggcgctgcttcagcaccgtggtcatctttctgttcctgctggacgagcagacgagcctgctggtgctggtcccggcgggtgttggagccgccattgagctgtggaaagtgaagaaggcattgaagatgactattttttggagaggcctgatgcccgaatttcagtttggcacttacagcgaatctgagaggaaaaccgaggagtacgatactcaggccatgaagtacttgtcatacctgctgtaccctctctgtgtcgggggtgctgtctattcactcctgaatatcaaatataagagctggtactcctggttaatcaacagcttcgtcaacggggtctatgcctttggtttcctcttcatgctgccccagctctttgtgaactacaagttgaagtcagtggcacatctgccctggaaggccttcacctacaaggctttcaacaccttcattgatgacgtctttgccttcatcatcaccatgcccacgtctcaccggctggcctgcttccgggacgacgtggtgtttctggtctacctgtaccagcggtggctttatcctgtggataaacgcagagtgaacgagtttggggagtcctacgaggagaaggccacgcgggcgccccacacggactgaaggccgcccgggctgccgccagccaagtgcaacttgaattgtcaatgagtatttttggaagcatttggaggaattcctagacattgcgttttctgtgttgccaaaatcccttcggacatttctcagacatctcccaagttcccatcacgtcagatttggagctggtagcgcttacgatgcccccacgtgtgaacatctgtcttggtcacagagctgggtgctgccggtcaccttgagctgtggtggctcccggcacacgagtgtccggggttcggccatgtcctcacgcgggcaggggtgggagccctcacaggcaagggggctgttggatttccatttcaggtggttttctaagtgctccttatgtgaatttcaaacacgtatggaattcattccgcatggactctgggatcaaaggctctttcctcttttgtttgagagttggttgttttaaagcttaatgtatgtttctattttaaaataaatttttctggctgtggca

SEQ ID NO: 439259 - DNA, 2432 bp, Homo sapiens
cgcgtccacttccggcaggcggcggggcccggaagcggcgcgcggggccggcgaatcccgcggcgccaggtgggagcggggccggagcatgcggggcggccggcggtctgcggcgcgcggcgcattcgttcccccgcggcggtggcggtggcgcgcggcggctctccagtgagcggcggagcccggagcggcgggctgggcgccgggcgggcggggctcgcggctgagaggcgggcgggccgggggcgccgggcgcggggccgccatgtggagcggccgcagctccttcaccagcttggtggtgggcgtgttcgtggtctacgtggtgcacacctgctgggtcatgtacggcatcgtctacacccgcccgtgctccggcgacgccaactgcatccagccctacctggcgcggcggcccaagctgcagctgagcgtgtacaccacgacgaggtcccacctgggtgctgagaacaacatcgacctggtcttgaatgtggaagactttgatgtggagtccaaatttgaaaggacagttaatgtttctgtaccaaagaaaacgagaaacaatgggacgctgtatgcctacatcttcctccatcacgctggggtcctgccgtggcacgacgggaagcaggtgcacctggtcagtcctctgaccacctacatggtccccaagccagaagaaatcaacctgctcaccggggagtctgatacacagcagatcgaggcggagaagaagccgacgagtgccctggatgagccagtgtcccactggcgaccgcggctggcgctgaacgtgatggcggacaactttgtctttgacgggtcctccctgcctgccgatgtgcatcggtacatgaagatgatccagctggggaaaaccgtgcattacctgcccatcctgttcatcgaccagctcagcaaccgcgtgaaggacctgatggtcataaaccgctccaccaccgagctgcccctcaccgtgtcctacgacaaggtctcactggggcggctgcgcttctggatccacatgcaggacgccgtgtactccctgcagcagttcgggttttcagagaaagatgctgatgaggtgaaaggaatttttgtagataccaacttatacttcctggcgctgaccttctttgtcgcagcgttccatcttctctttgatttcctggcctttaaaaatgacatcagtttctggaagaagaagaagagcatgatcggcatgtccaccaaggcaggtggggtctgccctgcaccccctcccagcccgaccatcctgtccccagtgctctggcgctgcttcagcaccgtggtcatctttctgttcctgctggacgagcagacgagcctgctggtgctggtcccggcgggtgttggagccgccattgagctgtggaaagtgaagaaggcattgaagatgactattttttggagaggcctgatgcccgaatttcagtttggcacttacagcgaatctgagaggaaaaccgaggagtacgatactcaggccatgaagtacttgtcatacctgctgtaccctctctgtgtcgggggtgctgtctattcactcctgaatatcaaatataagagctggtactcctggttaatcaacagcttcgtcaacggggtctatgcctttggtttcctcttcatgctgccccagctctttgtgaactacaagttgaagtcagtggcacatctgccctggaaggccttcacctacaaggctttcaacaccttcattgatgacgtctttgccttcatcatcaccatgcccacgtctcaccggctggcctgcttccgggacgacgtggtgtttctggtctacctgtaccagcggtggctttatcctgtggataaacgcagagtgaacgagtttggggagtcctacgaggagaaggccacgcgggcgccccacacggactgaaggccgcccgggctgccgccagccaagtgcaacttgaattgtcaatgagtatttttggaagcatttggaggaattcctagacattgcgttttctgtgttgccaaaatcccttcggacatttctcagacatctcccaagttcccatcacgtcagatttggagctggtagcgcttacgatgcccccacgtgtgaacatctgtcttggtcacagagctgggtgctgccggtcaccttgagctgtggtggctcccggcacacgagtgtccggggttcggccatgtcctcacgcgggcaggggtgggagccctcacaggcaagggggctgttggatttccatttcaggtggttttctaagtgctccttatgtgaatttcaaacacgtatggaattcattccgcatggactctgggatcaaaggctctttcctcttttgtttgagagttggttgttttaaagcttaatgtatgtttctattttaaaataaatttttctggctgtggca

SEQ ID NO: 439260 - DNA, 2280 bp, Homo sapiens
cgcgtccacttccggcaggcggcggggcccggaagcggcgcgcggggccggcgaatcccgcggcgccaggtgggagcggggccggagcatgcggggcggccggcggtctgcggcgcgcggcgcattcgttcccccgcggcggtggcggtggcgcgcggcggctctccagtgagcggcggagcccggagcggcgggctgggcgccgggcgggcggggctcgcggctgagaggcgggcgggccgggggcgccgggcgcggggccgccatgtggagcggccgcagctccttcaccagcttggtggtgggcgtgttcgtggtctacgtggtgcacacctgctgggtcatgtacggcatcgtctacacccgcccgtgctccggcgacgccaactgcatccagccctacctggcgcggcggcccaagctgcagctgagcgtgtacaccacgacgaggtcccacctgggtgctgagaacaacatcgacctggtcttgaatgtggaagactttgatgtggagtccaaatttgaaaggacagttaatgtttctgtaccaaagaaaacgagaaacaatgggacgctgtatgcctacatcttcctccatcacgctggggtcctgccgtggcacgacgggaagcaggtgcacctggtcagtcctctgaccacctacatggtccccaagccagaagaaatcaacctgctcaccggggagtctgatacacagcagatcgaggcggagaagaagccgacgagtgccctggatgagccagtgtcccactggcgaccgcggctggcgctgaacgtgatggcggacaactttgtctttgacgggtcctccctgcctgccgatgtgcatcggtacatgaagatgatccagctggggaaaaccgtgcattacctgcccatcctgttcatcgaccagctcagcaaccgcgtgaaggacctgatggtcataaaccgctccaccaccgagctgcccctcaccgtgtcctacgacaaggtctcactggggcggctgcgcttctggatccacatgcaggacgccgtgtactccctgcagcagttcgggttttcagagaaagatgctgatgaggtgaaaggaatttttgtagataccaacttatacttcctggcgctgaccttctttgtcgcagcgttccatcttctctttgatttcctggcctttaaaaatgacatcagtttctggaagaagaagaagagcatgatcggcatgtccaccaaggcagctgtggaaagtgaagaaggcattgaagatgactattttttggagaggcctgatgcccgaatttcagtttggcacttacagcgaatctgagaggaaaaccgaggagtacgatactcaggccatgaagtacttgtcatacctgctgtaccctctctgtgtcgggggtgctgtctattcactcctgaatatcaaatataagagctggtactcctggttaatcaacagcttcgtcaacggggtctatgcctttggtttcctcttcatgctgccccagctctttgtgaactacaagttgaagtcagtggcacatctgccctggaaggccttcacctacaaggctttcaacaccttcattgatgacgtctttgccttcatcatcaccatgcccacgtctcaccggctggcctgcttccgggacgacgtggtgtttctggtctacctgtaccagcggtggctttatcctgtggataaacgcagagtgaacgagtttggggagtcctacgaggagaaggccacgcgggcgccccacacggactgaaggccgcccgggctgccgccagccaagtgcaacttgaattgtcaatgagtatttttggaagcatttggaggaattcctagacattgcgttttctgtgttgccaaaatcccttcggacatttctcagacatctcccaagttcccatcacgtcagatttggagctggtagcgcttacgatgcccccacgtgtgaacatctgtcttggtcacagagctgggtgctgccggtcaccttgagctgtggtggctcccggcacacgagtgtccggggttcggccatgtcctcacgcgggcaggggtgggagccctcacaggcaagggggctgttggatttccatttcaggtggttttctaagtgctccttatgtgaatttcaaacacgtatggaattcattccgcatggactctgggatcaaaggctctttcctcttttgtttgagagttggttgttttaaagcttaatgtatgtttctattttaaaataaatttttctggctgtggca

SEQ ID NO: 439261 - DNA, 2006 bp, Homo sapiens
cgcgtccacttccggcaggcggcggggcccggaagcggcgcgcggggccggcgaatcccgcggcgccaggtgggagcggggccggagcatgcggggcggccggcggtctgcggcgcgcggcgcattcgttcccccgcggcggtggcggtggcgcgcggcggctctccagtgagcggcggagcccggagcggcgggctgggcgccgggcgggcggggctcgcggctgagaggcgggcgggccgggggcgccgggcgcggggccgccatgtggagcggccgcagctccttcaccagcttggtggtgggcgtgttcgtggtctacgtggtgcacacctgctgggtcatgtacggcatcgtctacacccgcccgtgctccggcgacgccaactgcatccagccctacctggcgcggcggcccaagctgcagctgagcgtgtacaccacgacgaggtcccacctgggtgctgagaacaacatcgacctggtcttgaatgtggaagactttgatgtggagtccaaatttgaaaggacagttaatgtttctgtaccaaagaaaacgagaaacaatgggacgctgtatgcctacatcttcctccatcacgctggggtcctgccgtggcacgacgggaagcaggtgcacctggtcagtcctctgaccacctacatggtccccaagccagaagaaatcaacctgctcaccggggagtctgatacacagcagatcgaggcggagaagaagccgacgagtgccctggatgagccagtgtcccactggcgaccgcggctggcgctgaacgtgatggcggacaactttgtctttgacgggtcctccctgcctgccgatgtgcatcggtacatgaagatgatccagctggggaaaaccgtgcattacctgcccatcctgttcatcgaccagctcagcaaccgcgtgaaggacctgatggtcataaaccgctccaccaccgagctgcccctcaccgtgtcctacgacaaggtctcactggggcggctgcgcttctggatccacatgcaggacgccgtgtactccctgcagcagttcgggttttcagagaaagatgctgatgaggtgaaaggaatttttgtagataccaacttatacttcctggcgctgaccttctttgtcgcagcgttccatcttctctttgatttcctggcctttaaaaatgacatcagtttctggaagaagaagaagagcatgatcggcatgtccaccaaggcagtgctctggcgctgcttcagcaccgtggtcatctttctgttcctgctggacgagcagacgagcctgctggtgctggtcccggcgggtgttggagccgccattgagctgtggaaagtgaagaaggcattgaagatgactattttttggagaggcctgatgcccgaatttcagtttggcacttacagcgaatctgagaggaaaaccgaggagtacgatactcaggccatgaagtacttgtcatacctgctgtaccctctctgtgtcgggggtgctgtctattcactcctgaatatcaaatataagagctggtactcctggttaatcaacagcttcgtcaacggggtctatgcctttggtttcctcttcatgctgccccagctctttgtgaactacaagttgaagtcagtggcacatctgccctggaaggccttcacctacaaggctttcaacaccttcattgatgacgtctttgccttcatcatcaccatgcccacgtctcaccggctggcctgcttccgggacgacgtggtgtttctggtctacctgtaccagcggtggctttatcctgtggataaacgcagagtgaacgagtttggggagtcctacgaggagaaggccacgcgggcgccccacacggactgaaggccgcccgggctgcgcagcagtgccatggattgtcagagttttggagcttggggaatcctaaaatggttttggttgcaattcttggactttcaaattcccatcccctaatggtgagaaaccc

SEQ ID NO: 439262 - DNA, 1198 bp, Homo sapiens
  misc_feature (60)..(60): n is a, c, g, or t
  misc_feature (136)..(136): n is a, c, g, or t
accaaggcagtgctctggcgctgcttcagcaccgtggtcatctttctgttcctgctggancgaaaggccaatgaaacccggaaagggccccctttggcctttgtgggttggccttgggggttcccccggtgccggngggtgtttggagccgccattgagctgtggaaagtgaagaaggcattgaagatgactattttttggagaggcctgatgcccgaatttcagtttggcacttacagcgaatctgagaggaaaaccgaggagtacgatactcaggccatgaagtacttgtcatacctgctgtaccctctctgtgtcgggggtgctgtctattcactcctgaatatcaaatataagagctggtactcctggttaatcaacagcttcgtcaacggggtctatgcctttggtttcctcttcatgctgccccagctctttgtgaactacaagttgaagtcagtggcacatctgccctggaaggccttcacctacaaggctttcaacaccttcattgatgacgtctttgccttcatcatcaccatgcccacgtctcaccggctggcctgcttccgggacgacgtggtgtttctggtctacctgtaccagcggtggctttatcctgtggataaacgcagagtgaacgagtttggggagtcctacgaggagaaggccacgcgggcgccccacacggactgaaggccgcccgggctgccgccagccaagtgcaacttgaattgtcaatgagtatttttggaagcatttggaggaattcctagacattgcgttttctgtgttgccaaaatcccttcggacatttctcagacatctcccaagttcccatcacgtcagatttggagctggtagcgcttacgatgcccccacgtgtgaacatctgtcttggtcacagagctgggtgctgccggtcaccttgagctgtggtggctcccggcacacgagtgtccggggttcggccatgtcctcacgcgggcaggggtgggagccctcacaggcaagggggctgttggatttccatttcaggtggttttctaagtgctccttatgtgaatttcaaacacgtatggaattcattccgcatggactctgggatcaaaggctctttcctcttttgtttgagagttggttgttttaaagcttaatgtatgtttctattttaaaataaatttttctggctgtggca

SEQ ID NO: 439263 - DNA, 1032 bp, Homo sapiens
ccagtggctgacaccaggtcattctgaccctcagctaggagtggccgctgttgccgcatgagtggcagagaccatcgggcttcagcctcacctccctggccctctgccttgccatgaagtacttgtcatacctgctgtaccctctctgtgtcgggggtgctgtctattcactcctgaatatcaaatataagagctggtactcctggttaatcaacagcttcgtcaacggggtctatgcctttggtttcctcttcatgctgccccagctctttgtgaactacaagttgaagtcagtggcacatctgccctggaaggccttcacctacaaggctttcaacaccttcattgatgacgtctttgccttcatcatcaccatgcccacgtctcaccggctggcctgcttccgggacgacgtggtgtttctggtctacctgtaccagcggtggctttatcctgtggataaacgcagagtgaacgagtttggggagtcctacgaggagaaggccacgcgggcgccccacacggactgaaggccgcccgggctgccgccagccaagtgcaacttgaattgtcaatgagtatttttggaagcatttggaggaattcctagacattgcgttttctgtgttgccaaaatcccttcggacatttctcagacatctcccaagttcccatcacgtcagatttggagctggtagcgcttacgatgcccccacgtgtgaacatctgtcttggtcacagagctgggtgctgccggtcaccttgagctgtggtggctcccggcacacgagtgtccggggttcggccatgtcctcacgcgggcaggggtgggagccctcacaggcaagggggctgttggatttccatttcaggtggttttctaagtgctccttatgtgaatttcaaacacgtatggaattcattccgcatggactctgggatcaaaggctctttcctcttttgtttgagagttggttgttttaaagcttaatgtatgtttctattttaaaataaatttttctggctgtggca

SEQ ID NO: 439264 - DNA, 1130 bp, Homo sapiens
ccttagtcacagctcagctgtgctcagatcctccctgagtctattaatatcactgtgttgaatttcacaacagtttggcacttacagcgaatctgagaggaaaaccgaggagtacgatactcaggccatgaagtacttgtcatacctgctgtaccctctctgtgtcgggggtgctgtctattcactcctgaatatcaaatataagagctggtactcctggttaatcaacagcttcgtcaacggggtctatgcctttggtttcctcttcatgctgccccagctctttgtgaactacaaggtaaggcggtgtgtgctgcccgcggcccggcccccgtctcctgtgctgcccacagctgacctgggcctgtctctcctgtttcagttgaagtcagtggcacatctgccctggaaggccttcacctacaaggctttcaacaccttcattgatgacgtctttgccttcatcatcaccatgcccacgtctcaccggctggcctgcttccgggacgacgtggtgtttctggtctacctgtaccagcggtggctttatcctgtggataaacgcagagtgaacgagtttggggagtcctacgaggagaaggccacgcgggcgccccacacggactgaaggccgcccgggctgccgccagccaagtgcaacttgaattgtcaatgagtatttttggaagcatttggaggaattcctagacattgcgttttctgtgttgccaaaatcccttcggacatttctcagacatctcccaagttcccatcacgtcagatttggagctggtagcgcttacgatgcccccacgtgtgaacatctgtcttggtcacagagctgggtgctgccggtcaccttgagctgtggtggctcccggcacacgagtgtccggggttcggccatgtcctcacgcgggcaggggtgggagccctcacaggcaagggggctgttggatttccatttcaggtggttttctaagtgctccttatgtgaatttcaaacacgtatggaattcattccgcatggactctgggatcaaaggctctttcctcttttgtttgagagttggttgttttaaagcttaatgtatgtttctattttaaaataaatttttctggctgtggca

SEQ ID NO: 439265 - DNA, 1701 bp, Homo sapiens
cgcgtccacttccggcaggcggcggggcccggaagcggcgcgcggggccggcgaatcccgcggcgccaggtgggagcggggccggagcatgcggggcggccggcggtctgcggcgcgcggcgcattcgttcccccgcggcggtggcggtggcgcgcggcggctctccagtgagcggcggagcccggagcggcgggctgggcgccgggcgggcggggctcgcggctgagaggcgggcgggccgggggcgccgggcgcggggccgccatgtggagcggccgcagctccttcaccagcttggtggtgggcgtgttcgtggtctacgtggtgcacacctgctgggtcatgtacggcatcgtctacacccgcccgtgctccggcgacgccaactgcatccagccctacctggcgcggcggcccaagctgcagctgagcgtgtacaccacgacgaggtcccacctgggtgctgagaacaacatcgacctggtcttgaatgtggaagactttgatgtggagtccaaatttgaaaggacagttaatgtttctgtaccaaagaaaacgagaaacaatgggacgctgtatgcctacatcttcctccatcacgctggggtcctgccgtggcacgacgggaagcaggtgcacctggtcagtcctctgaccacctacatggtccccaagccagaagaaatcaacctgctcaccggggagtctgatacacagcagatcgaggcggagaagaagccgacgagtgccctggatgagccagtgtcccactggcgaccgcggctggcgctgaacgtgatggcggacaactttgtctttgacgggtcctccctgcctgccgatgtgcatcggtacatgaagatgatccagctggggaaaaccgtgcattacctgcccatcctgttcatcgaccagctcagcaaccgcgtgaaggacctgatggtcataaaccgctccaccaccgagctgcccctcaccgtgtcctacgacaaggtctcactggggcggctgcgcttctggatccacatgcaggacgccgtgtactccctgcagcagttcgggttttcagagaaagatgctgatgaggtgaaaggaatttttgtagataccaacttatacttcctggcgctgaccttctttgtcgcagcgttccatcttctctttgatttcctggcctttaaaaatgacatcagtttctggaagaagaagaagagcatgatcggcatgtccaccaaggcagtgctctggcgctgcttcagcaccgtggtcatctttctgttcctgctggacgagcagacgagcctgctggtgctggtcccggcgggtgttggagccgccattgagctgtggaaagtgaagaaggcattgaagatgactattttttggagaggcctgatgcccgaatttcagtttggcacttacagcgaatctgagaggaaaaccgaggagtacgatactcaggccatgaagtacttgtcatacctgctgtatcctctctgcgtttgcaaacgcagagaggacaaacgcagagggaacgcagagaggacaaacgcagagaggttctcgcgttgaccaaggaacgtcatactcctgcttgctgatcctctcttgcgttcaaacgcagagaggacttgaataggagttcttctcgcgttgaccaaggacgtcatactcctgcttgctgatcctctctgcgtttg

SEQ ID NO: 439266 - DNA, 1114 bp, Homo sapiens
gctgaaaccctgtacttctgttcgcggccgtgtagagctgccccttatgccacagcttcctcatccatacgtaggggtgatgttggcaaggcctccggggcgctcaggatcaaaggcggcggcagtgtcctgccaagtgttcacagctgatgagacgtggtccctgaacacagcggttcctgttctgatcactcgagtctccgtgatgccaccgttcccagaaggcagcccgtgcagcctccgggtccccccttcagccatggcagcccgtgcagcctccgggtcgtcccttcggccaagcttccctttccttgagagcagcacgctggcctggccatgcagaacaaaacacaactcagaaatccctcctcagccctcggcagtaaaacttctgaggattcgactttttagttaatttgctcactgtggcagctcactggaaaataaatcgaggatgccaagtcctcctcttagaaaaatagcccctgcagtggggtttgctgatgtgctcatttgtgtcattgcaggctttatcctgtggataaacgcagagtgaacgagtttggggagtcctacgaggagaaggccacgcgggcgccccacacggactgaaggccgcccgggctgccgccagccaagtgcaacttgaattgtcaatgagtatttttggaagcatttggaggaattcctagacattgcgttttctgtgttgccaaaatcccttcggacatttctcagacatctcccaagttcccatcacgtcagatttggagctggtagcgcttacgatgcccccacgtgtgaacatctgtcttggtcacagagctgggtgctgccggtcaccttgagctgtggtggctcccggcacacgagtgtccggggttcggccatgtcctcacgcgggcaggggtgggagccctcacaggcaagggggctgttggatttccatttcaggtggttttctaagtgctccttatgtgaatttcaaacacgtatggaattcattccgcatggactctgggatcaaaggctctttcctcttttgtttgagagttggttgttttaaagcttaatgtatgtttctattttaaaataaatttttctggctgtggca

SEQ ID NO: 439267 - DNA, 907 bp, Homo sapiens
cgcgtccacttccggcaggcggcggggcccggaagcggcgcgcggggccggcgaatcccgcggcgccaggtgggagcggggccggagcatgcggggcggccggcggtctgcggcgcgcggcgcattcgttcccccgcggcggtggcggtggcgcgcggcggctctccagtgagcggcggagcccggagcggcgggctgggcgccgggcgggcggggctcgcggctgagaggcgggcgggccgggggcgccgggcgcggggccgccatgtggagcggccgcagctccttcaccagcttggtggtgggcgtgttcgtggtctacgtggtgcacacctgctgggtcatgtacggcatcgtctacacccgcccgtgctccggcgacgccaactgcatccagccctacctggcgcggcggcccaagctgcagctgagcgtgtacaccacgacgaggtcccacctgggtgctgagaacaacatcgacctggtcttgaatgtggaagactttgatgtggagtccaaatttgaaaggacagttaatgtttctgtaccaaagaaaacgagaaacaatgggacgctgtatgcctacatcttcctccatcacgctggggtcctgccgtggcacgacgggaagcaggtgcacctggtcagtcctctgaccacctacatggtccccaagccagaagaaatcaacctgctcaccggggagtctgatacacagcagatcgaggcggagaagaagccgacgagtgccctggatgagccagtgtcccactggcgaccgcggctggcgctgaacgtgatggcggacaactttgtctttgacgggtcctccctgcctgccgatgtgcatcggtacatgaagatgatccagctggggaaaaccgtgcgggatcctctagacgacctc

SEQ ID NO: 439268 - DNA, 2384 bp, Homo sapiens
cgcgtccacttccggcaggcggcggggcccggaagcggcgcgcggggccggcgaatcccgcggcgccaggtgggagcggggccggagcatgcggggcggccggcggtctgcggcgcgcggcgcattcgttcccccgcggcggtggcggtggcgcgcggcggctctccagtgagcggcggagcccggagcggcgggctgggcgccgggcgggcggggctcgcggctgagaggcgggcgggccgggggcgccgggcgcggggccgccatgtggagcggccgcagctccttcaccagcttggtggtgggcgtgttcgtggtctacgtggtgcacacctgctgggtcatgtacggcatcgtctacacccgcccgtgctccggcgacgccaactgcatccagccctacctggcgcggcggcccaagctgcagctgagcgtgtacaccacgacgaggtcccacctgggtgctgagaacaacatcgacctggtcttgaatgtggaagactttgatgtggagtccaaatttgaaaggacagttaatgtttctgtaccaaagaaaacgagaaacaatgggacgctgtatgcctacatcttcctccatcacgctggggtcctgccgtggcacgacgggaagcaggtgcacctggtcagtcctctgaccacctacatggtccccaagccagaagaaatcaacctgctcaccggggagtctgatacacagcagatcgaggcggagaagaagccgacgagtgccctggatgagccagtgtcccactggcgaccgcggctggcgctgaacgtgatggcggacaactttgtctttgacgggtcctccctgcctgccgatgtgcatcggtacatgaagatgatccagctggggaaaaccgtgcattacctgcccatcctgttcatcgaccagctcagcaaccgcgtgaaggacctgatggtcataaaccgctccaccaccgagctgcccctcaccgtgtcctacgacaaggtctcactggggcggctgcgcttctggatccacatgcaggacgccgtgtactccctgcagcagttcgggttttcagagaaagatgctgatgaggtgaaaggaatttttgtagataccaacttatacttcctggcgctgaccttctttgtcgcagcgttccatcttctctttgatttcctggcctttaaaaatgacatcagtttctggaagaagaagaagagcatgatcggcatgtccaccaaggcagtgctctggcgctgcttcagcaccgtggtcatctttctgttcctgctggacgagcagacgagcctgctggtgctggtcccggcgggtgttggagccgccattgagctgtggaaagtgaagaaggcattgaagatgactattttttggagaggcctgatgcccgaatttcagtttggcacttacagcgaatctgagaggaaaaccgaggagtacgatactcaggccatgaagtacttgtcatacctgctgtaccctctctgtgtcgggggtgctgtctattcactcctgaatatcaaatataagagctggtactcctggttaatcaacagcttcgtcaacggggtctatgcctttggtttcctcttcatgctgccccagctctttgtgaactacaagttgaagtcagtggcacatctgccctggaaggccttcacctacaaggctttcaacaccttcattgatgacgtctttgccttcatcatcaccatgcccacgtctcaccggctggcctgcttccgggacgacgtggtgtttctggtctacctgtaccagcggtggctttatcctgtggataaacgcagagtgaacgagtttggggagtcctacgaggagaaggccacgcgggcgccccacacggactgaaggccgcccgggctgccgccagccaagtgcaacttgaattgtcaatgagtatttttggaagcatttggaggaattcctagacattgcgttttctgtgttgccaaaatcccttcggacatttctcagacatctcccaagttcccatcacgtcagatttggagctggtagcgcttacgatgcccccacgtgtgaacatctgtcttggtcacagagctgggtgctgccggtcaccttgagctgtggtggctcccggcacacgagtgtccggggttcggccatgtcctcacgcgggcaggggtgggagccctcacaggcaagggggctgttggatttccatttcaggtggttttctaagtgctccttatgtgaatttcaaacacgtatggaattcattccgcatggactctgggatcaaaggctctttcctcttttgtttgagagttggttgttttaaagcttaatgtatgtttctattttaaaataaatttttctggctgtggca

SEQ ID NO: 439269 - DNA, 2522 bp, Homo sapiens
cgcgtccacttccggcaggcggcggggcccggaagcggcgcgcggggccggcgaatcccgcggcgccaggtgggagcggggccggagcatgcggggcggccggcggtctgcggcgcgcggcgcattcgttcccccgcggcggtggcggtggcgcgcggcggctctccagtgagcggcggagcccggagcggcgggctgggcgccgggcgggcggggctcgcggctgagaggcgggcgggccgggggcgccgggcgcggggccgccatgtggagcggccgcagctccttcaccagcttggtggtgggcgtgttcgtggtctacgtggtgcacacctgctgggtcatgtacggcatcgtctacacccgcccgtgctccggcgacgccaactgcatccagccctacctggcgcggcggcccaagctgcagctgagcgtgtacaccacgacgaggtcccacctgggtgctgagaacaacatcgacctggtcttgaatgtggaagactttgatgtggagtccaaatttgaaaggacagttaatgtttctgtaccaaagaaaacgagaaacaatgggacgctgtatgcctacatcttcctccatcacgctggggtcctgccgtggcacgacgggaagcaggtgcacctggtcagtcctctgaccacctacatggtccccaagccagaagaaatcaacctgctcaccggggagtctgatacacagcagatcgaggcggagaagaagccgacgagtgccctggatgagccagtgtcccactggcgaccgcggctggcgctgaacgtgatggcggacaactttgtctttgacgggtcctccctgcctgccgatgtgcatcggtacatgaagatgatccagctggggaaaaccgtgcattacctgcccatcctgttcatcgaccagctcagcaaccgcgtgaaggacctgatggtcataaaccgctccaccaccgagctgcccctcaccgtgtcctacgacaaggtctcactggggcggctgcgcttctggatccacatgcaggacgccgtgtactccctgcagcagttcgggttttcagagaaagatgctgatgaggtgaaaggaatttttgtagataccaacttatacttcctggcgctgaccttctttgtcgcagcgttccatcttctctttgatttcctggcctttaaaaatgacatcagtttctggaagaagaagaagagcatgatcggcatgtccaccaaggcagtgctctggcgctgcttcagcaccgtggtcatctttctgttcctgctggacgagcagacgagcctgctggtgctggtcccggcgggtgttggagccgccattgagctgtggaaagtgaagaaggcattgaagatgactattttttggagaggcctgatgcccgaatttcagtttggcacttacagcgaatctgagaggaaaaccgaggagtacgatactcaggccatgaagtacttgtcatacctgctgtaccctctctgtgtcgggggtgctgtctattcactcctgaatatcaaatataagagctggtactcctggttaatcaacagcttcgtcaacggggtctatgcctttggtttcctcttcatgctgccccagctctttgtgaactacaagttgaagtcagtggcacatctgccctggaaggccttcacctacaaggctttcaacaccttcattgatgacgtctttgccttcatcatcaccatgcccacgtctcaccggctggcctgcttccgggacgacgtggtgtttctggtctacctgtaccagcggtggctttatcctgtggataaacgcagagtgaacgagtttggggagtcctacgaggagaaggccacgcgggcgccccacacggactgaaggccgcccgggctgccgccagccaagtgcaacttgaattgtcaatgagtatttttggaagcatttggaggaattcctagacattgcgttttctgtgttgccaaaatcccttcggacatttctcagacatctcccaagttcccatcacgtcagatttggagctggtagcgcttacgatgcccccacgtgtgaacatctgtcttggtcacagagctgggtgctgccggtcaccttgagctgtggtggctcccggcacacgagtgtccggggttcggccatgtcctcacgcgggcaggggtgggagccctcacaggcaagggggctgttggatttccatttcaggtggttttctaagtgctccttatgtgaatttcaaacacgtatggaattcattccgcatggactctgggatcaaaggctctttcctcttttgtttgagagttggttgttttaaagcttaatgtatgtttctattttaaaataaatttttctggctgtggcatttttcttgacctggtataatgaaagtatttcagatatttgagtttaacccttttccagaaagtaatacatgatatggatttatttatgcattaaaagagcaaatttaaagagcaaaaaaaaaaataaaaaaataaaa

SEQ ID NO: 439270 - DNA, 2276 bp, Homo sapiens
atggcggacaactttgtctttgacgggtcctccctgcctgccgatgtgcatcggtacatgaagatgatccagctggggaaaaccgtgcattacctgcccatcctgttcatcgaccagctcagcaaccgcgtgaaggacctgatggtcataaaccgctccggcggtctgcggcgcgcggcgcattcgttcccccgcggcggtggcggtggcgcgcggcggctctccagtgagcggcggagcccggagcggcgggctgggcgccgggcgggcggggctcgcggctgagaggcgggcgggccgggggcgccgggcgcggggccgccatgtggagcggccgcagctccttcacctgggtgctgagaacaacatcgacctggtcttgaatgtggaagactttgatgtggagtccaaatttgaaaggacagttaatgtttctgtaccaaagaaaacgagaaacaatgggacgctgtatgcctacatcttcctccatcacgctggggtcctgccgtggcacgacgggaagcaggtgcacctggtcagtcctctgaccacctacatggtccccaagccagaagaaatcaacctgctcaccggggagtctgatacacagcagatcgaggcggagaagaagccgacgagtgccctggatgagccagtgtcccactggcgaccgcggctggcgctgaacgtgatggcggacaactttgtctttgacgggtcctccctgcctgccgatgtgcatcggtacatgaagatgatccagctggggaaaaccgtgcattacctgcccatcctgttcatcgaccagctcagcaaccgcgtgaaggacctgatggtcataaaccgctccaccaccgagctgcccctcaccgtgtcctacgacaaggtctcactggggcggctgcgcttctggatccacatgcaggacgccgtgtactccctgcagcagttcgggttttcagagaaagatgctgatgaggtgaaaggaatttttgtagataccaacttatacttcctggcgctgaccttctttgtcgcagcgttccatcttctctttgatttcctggcctttaaaaatgacatcagtttctggaagaagaagaagagcatgatcggcatgtccaccaaggcagtgctctggcgctgcttcagcaccgtggtcatctttctgttcctgctggacgagcagacgagcctgctggtgctggtcccggcgggtgttggagccgccattgagctgtggaaagtgaagaaggcattgaagatgactattttttggagaggcctgatgcccgaatttcagtttggcacttacagcgaatctgagaggaaaaccgaggagtacgatactcaggccatgaagtacttgtcatacctgctgtaccctctctgtgtcgggggtgctgtctattcactcctgaatatcaaatataagagctggtactcctggttaatcaacagcttcgtcaacggggtctatgcctttggtttcctcttcatgctgccccagctctttgtgaactacaagttgaagtcagtggcacatctgccctggaaggccttcacctacaaggctttcaacaccttcattgatgacgtctttgccttcatcatcaccatgcccacgtctcaccggctggcctgcttccgggacgacgtggtgtttctggtctacctgtaccagcggtggctttatcctgtggataaacgcagagtgaacgagtttggggagtcctacgaggagaaggccacgcgggcgccccacacggactgaaggccgcccgggctgccgccagccaagtgcaacttgaattgtcaatgagtatttttggaagcatttggaggaattcctagacattgcgttttctgtgttgccaaaatcccttcggacatttctcagacatctcccaagttcccatcacgtcagatttggagctggtagcgcttacgatgcccccacgtgtgaacatctgtcttggtcacagagctgggtgctgccggtcaccttgagctgtggtggctcccggcacacgagtgtccggggttcggccatgtcctcacgcgggcaggggtgggagccctcacaggcaagggggctgttggatttccatttcaggtggttttctaagtgctccttatgtgaatttcaaacacgtatggaattcattccgcatggactctgggatcaaaggctctttcctcttttgtttgagagttggttgttttaaagcttaatgtatgtttctattttaaaataaatttttctggctgtggca

SEQ ID NO: 439271 - DNA, 2468 bp, Homo sapiens
cgcgtccacttccggcaggcggcggggcccggaagcggcgcgcggggccggcgaatcccgcggcgccaggtgggagcggggccggagcatgcggggcggccggcggtctgcggcgcgcggcgcattcgttcccccgcggcggtggcggtggcgcgcggcggctctccagtgagcggcggagcccggagcggcgggctgggcgccgggcgggcggggctcgcggctgagaggcgggcgggccgggggcgccgggcgcggggccgccatgtggagcggccgcagctccttcaccagcttggtggtgggcgtgttcgtggtctacgtggtgcacacctgctgggtcatgtacggcatcgtctacacccgcccgtgctccggcgacgccaactgcatccagccctacctggcgcggcggcccaagctgcagctgagcgtgtacaccacgacgaggtcccacctgggtgctgagaacaacatcgacctggtcttgaatgtggaagactttgatgtggagtccaaatttgaaaggacagttaatgtttctgtaccaaagaaaacgagaaacaatgggacgctgtatgcctacatcttcctccatcacgctggggtcctgccgtggcacgacgggaagcaggtgcacctggtcagtcctctgaccacctacatggtccccaagccagaagaaatcaacctgctcaccggggagtctgatacacagcagatcgaggcggagaagaagccgacgagtgccctggatgagccagtgtcccactggcgaccgcggctggcgctgaacgtgatggcggacaactttgtctttgacgggtcctccctgcctgccgatgtgcatcggtacatgaagatgatccagctggggaaaaccgtgcattacctgcccatcctgttcatcgaccagctcagcaaccgcgtgaaggacctgatggtcataaaccgctccaccaccgagctgcccctcaccgtgtcctacgacaaggtctcactggggcggctgcgcttctggatccacatgcaggacgccgtgtactccctgcagcagttcgggttttcagagaaagatgctgatgaggtgaaaggaatttttgtagataccaacttatacttcctggcgctgaccttctttgtcgcagcgttccatcttctctttgatttcctggcctttaaaaatgacatcagtttctggaagaagaagaagagcatgatcggcatgtccaccaaggcagtgctctggcgctgcttcagcaccgtggtcatctttctgttcctgctggacgagcagacgagcctgctggtgctggtcccggcgggtgttggagccgccattgagctgtggaaagtgaagaaggcattgaagatgactattttttggagaggcctgatgcccgaatttcagtttggcacttacagcgaatctgagaggaaaaccgaggagtacgatactcaggccatgaagtacttgtcatacctgctgtaccctctctgtgtcgggggtgctgtctattcactcctgaatatcaaatataagagctggtactcctggttaatcaacagcttcgtcaacggggtctatgcctttggtttcctcttcatgctgccccagctctttgtgaactacaaggtaaggcggtgtgtgctgcccgcggcccggcccccgtctcctgtgctgcccacagctgacctgggcctgtctctcctgtttcagttgaagtcagtggcacatctgccctggaaggccttcacctacaaggctttcaacaccttcattgatgacgtctttgccttcatcatcaccatgcccacgtctcaccggctggcctgcttccgggacgacgtggtgtttctggtctacctgtaccagcggtggctttatcctgtggataaacgcagagtgaacgagtttggggagtcctacgaggagaaggccacgcgggcgccccacacggactgaaggccgcccgggctgccgccagccaagtgcaacttgaattgtcaatgagtatttttggaagcatttggaggaattcctagacattgcgttttctgtgttgccaaaatcccttcggacatttctcagacatctcccaagttcccatcacgtcagatttggagctggtagcgcttacgatgcccccacgtgtgaacatctgtcttggtcacagagctgggtgctgccggtcaccttgagctgtggtggctcccggcacacgagtgtccggggttcggccatgtcctcacgcgggcaggggtgggagccctcacaggcaagggggctgttggatttccatttcaggtggttttctaagtgctccttatgtgaatttcaaacacgtatggaattcattccgcatggactctgggatcaaaggctctttcctcttttgtttgagagttggttgttttaaagcttaatgtatgtttctattttaaaataaatttttctggctgtggca

SEQ ID NO: 439272 - DNA, 2326 bp, Homo sapiens
cgcgtccacttccggcaggcggcggggcccggaagcggcgcgcggggccggcgaatcccgcggcgccaggtgggagcggggccggagcatgcggggcggccggcggtctgcggcgcgcggcgcattcgttcccccgcggcggtggcggtggcgcgcggcggctctccagtgagcggcggagcccggagcggcgggctgggcgccgggcgggcggggctcgcggctgagaggcgggcgggccgggggcgccgggcgcggggccgccatgtggagcggccgcagctccttcaccagcttggtggtgggcgtgttcgtggtctacgtggtgcacacctgctgggtcatgtacggcatcgtctacacccgcccgtgctccggcgacgccaactgcatccagccctacctggcgcggcggcccaagctgcagctgagcgtgtacaccacgacgaggtcccacctgggtgctgagaacaacatcgacctggtcttgaatgtggaagactttgatgtggagtccaaatttgaaaggacagttaatgtttctgtaccaaagaaaacgagaaacaatgggacgctgtatgcctacatcttcctccatcacgctggggtcctgccgtggcacgacgggaagcaggtgcacctggtcagtcctctgaccacctacatggtccccaagccagaagaaatcaacctgctcaccggggagtctgatacacagcagatcgaggcggagaagaagccgacgagtgccctggatgagccagtgtcccactggcgaccgcggctggcgctgaacgtgatggcggacaactttgtctttgacgggtcctccctgcctgccgatgtgcatcggtacatgaagatgatccagctggggaaaaccgtgcattacctgcccatcctgttcatcgaccagctcagcaaccgcgtgaaggacctgatggtcataaaccgctccaccaccgagctgcccctcaccgtgtcctacgacaaggtctcactggggcggctgcgcttctggatccacatgcaggacgccgtgtactccctgcagcagttcgggttttcagagaaagatgctgatgaggtgaaaggaatttttgtagataccaacttatacttcctggcgctgaccttctttgtcgcagcgttccatcttctctttgatttcctggcctttaaaaatgacatcagtttctggaagaagaagaagagcatgatcggcatgtccaccaaggcagtgctctggcgctgcttcagcaccgtggtcatctttctgttcctgctggacgagcagacgagcctgctggtgctggtcccggcgggtgttggagccgccattgagctgtggaaagtgaagaaggcattgaagatgactattttttggagaggcctgatgcccgaatttcagtttggcacttacagcgaatctgagaggaaaaccgaggagtacgatactcaggccatgaagtacttgtcatacctgctgtaccctctctgtgtcgggggtgctgtctattcactcctgaatatcaaatataagagctggtactcctggttaatcaacagcttcgtcaacggggtctatgcctttggtttcctcttcatgctgccccagctctttgtgaactacaagttgaagtcagtggcacatctgccctggaaggccttcacctacaaggctttcaacaccttcattgatgacgtctttgccttcatcatcaccatgcccacgtctcaccggctggcctgcttccgggacgacgtggtgtttctggtctacctgtaccagcggtggctttatcctgtggataaacgcagagtgaacgagtttggggagtcctacgaggagaaggccacgcgggcgccccacacggactgaaggccgcccgggctgccgccagccaagtgcaacttgaattgtcaatgagtatttttggaagcatttggaggaattcctagacattgcgttttctgtgttgccaaaatcccttcggacatttctcagacatctcccaagttcccatcacgtcagatttggagctggtagcgcttacgatgcccccacgtgtgaacatctgtcttggtcacagagctgggtgctgccggtcaccttgagctgtggtggctcccggcacacgagtgtccggggttcggccatgtcctcacgcgggcaggggtgggagccctcacaggcaagggggctgttggatttccatttcaggtggttttctaagtgctccttatgtgaatttcaaacacgtatggaattcattccgcatggactctgggaaatggacctaaatggacaatggacctaaatgga

SEQ ID NO: 439273 - DNA, 2113 bp, Homo sapiens
cgcgtccacttccggcaggcggcggggcccggaagcggcgcgcggggccggcgaatcccgcggcgccaggtgggagcggggccggagcatgcggggcggccggcggtctgcggcgcgcggcgcattcgttcccccgcggcggtggcggtggcgcgcggcggctctccagtgagcggcggagcccggagcggcgggctgggcgccgggcgggcggggctcgcggctgagaggcgggcgggccgggggcgccgggcgcggggccgccatgtggagcggccgcagctccttcaccagcttggtggtgggcgtgttcgtggtctacgtggtgcacacctgctgggtcatgtacggcatcgtctacacccgcccgtgctccggcgacgccaactgcatccagccctacctggcgcggcggcccaagctgcagctgagcgtgtacaccacgacgaggtcccacctgggtgctgagaacaacatcgacctggtcttgaatgtggaagactttgatgtggagtccaaatttgaaaggacagttaatgtttctgtaccaaagaaaacgagaaacaatgggacgctgtatgcctacatcttcctccatcacgctggggtcctgccgtggcacgacgggaagcaggtgcacctggtcagtcctctgaccacctacatggtccccaagccagaagaaatcaacctgctcaccggggagtctgatacacagcagatcgaggcggagaagaagccgacgagtgccctggatgagccagtgtcccactggcgaccgcggctggcgctgaacgtgatggcggacaactttgtctttgacgggtcctccctgcctgccgatgtgcatcggtacatgaagatgatccagctggggaaaaccgtgcattacctgcccatcctgttcatcgaccagctcagcaaccgcgtgaaggacctgatggtcataaaccgctccaccaccgagctgcccctcaccgtgtcctacgacaaggtctcactggggcggctgcgcttctggatccacatgcaggacgccgtgtactccctgcagcagttcgggttttcagagaaagatgctgatgaggtgaaaggaatttttgtagataccaacttatacttcctggcgctgaccttctttgtcgcagcgttccatcttctctttgatttcctggcctttaaaaatgacatcagtttctggaagaagaagaagagcatgatcggcatgtccaccaaggcagtgctctggcgctgcttcagcaccgtggtcatctttctgttcctgctggacgagcagacgagcctgctggtgctggtcccggcgggtgttggagccgccattgagctgtggaaagtgaagaaggcattgaagatgactattttttggagaggcctgatgcccgaatttcagtttggcacttacagcgaatctgagaggaaaaccgaggagtacgatactcaggccatgaagtacttgtcatacctgctgtaccctctctgtgtcgggggtgctgtctattcactcctgaatatcaaatataagagctggtactcctggttaatcaacagcttcgtcaacggggtctatgcctttggtttcctcttcatgctgccccagctctttgtgaactacaagttgaagtcagtggcacatctgccctggaaggccttcacctacaaggctttcaacaccttcattgatgacgtctttgccttcatcatcaccatgcccacgtctcaccggctggcctgcttccgggacgacgtggtgtttctggtctacctgtaccagcggtggctttatcctgtggataaacgcagagtgaacgagtttggggagtcctacgaggagaaggccacgcgggcgccccacacggactgaaggccgcccgggctgccgccagccaagtgcaacttgaattgtcaatgagtatttttggatttccatttcaggtggttttctaagtgctccttatgtgaatttcaaacacgtatggaattcattccgcatggactctgggatcaaaggctctttcctcttttgtttgagagttggttgttttaaagcttaatgtatgtttctattttaaaataaatttttctggctgtggca

SEQ ID NO: 439274 - DNA, 1545 bp, Homo sapiens
atatgtccctgtagaggaggagctggatgaaatgtccccgtagaggaggagctggatggaatgtccccgtagaggaggagctggatggaatgtccctgtagaggaggagctggatgaaatgtgtctgtagaggaggagctggatgaaatgtgtctgtagaggaggagctggatgaaatgtgtctgtagaggaggagctggatggaatgtgtctagaggaggagctggatgaaatgtgtcggtagaggaggagctggatggaatgtccctgtagaggaggagctggatgaaatgtgtctgtggaggaggagctggatgaaatgaaatgtgtctgtcgaggaggagctggatgaaatgtgtctgtagaggaggagctggatgaaatgtgtctgtagaggaggagctgcatggaatgtgtctgtagaggaggagctggatggaatgtccctgtagaggaggagctggatgaaatgacgctggagctccacaggcagggtccctccatagctgtggaaagtgaagaaggcattgaagatgactattttttggagaggcctgatgcccgaatttcagtttggcacttacagcgaatctgagaggaaaaccgaggagtacgatactcaggccatgaagtacttgtcatacctgctgtaccctctctgtgtcgggggtgctgtctattcactcctgaatatcaaatataagagctggtactcctggttaatcaacagcttcgtcaacggggtctatgcctttggtttcctcttcatgctgccccagctctttgtgaactacaagttgaagtcagtggcacatctgccctggaaggccttcacctacaaggctttcaacaccttcattgatgacgtctttgccttcatcatcaccatgcccacgtctcaccggctggcctgcttccgggacgacgtggtgtttctggtctacctgtaccagcggtggctttatcctgtggataaacgcagagtgaacgagtttggggagtcctacgaggagaaggccacgcgggcgccccacacggactgaaggccgcccgggctgccgccagccaagtgcaacttgaattgtcaatgagtatttttggaagcatttggaggaattcctagacattgcgttttctgtgttgccaaaatcccttcggacatttctcagacatctcccaagttcccatcacgtcagatttggagctggtagcgcttacgatgcccccacgtgtgaacatctgtcttggtcacagagctgggtgctgccggtcaccttgagctgtggtggctcccggcacacgagtgtccggggttcggccatgtcctcacgcgggcaggggtgggagccctcacaggcaagggggctgttggatttccatttcaggtggttttctaagtgctccttatgtgaatttcaaacacgtatggaattcattccgcatggactctgggatcaaaggctctttcctcttttgtttgagagttggttgttttaaagcttaatgtatgtttctattttaaaataaatttttctggctgtggca

SEQ ID NO: 439275 - DNA, 1698 bp, Homo sapiens
cgcgtccacttccggcaggcggcggggcccggaagcggcgcgcggggccggcgaatcccgcggcgccaggtgggagcggggccggagcatgcggggcggccggcggtctgcggcgcgcggcgcattcgttcccccgcggcggtggcggtggcgcgcggcggctctccagtgagcggcggagcccggagcggcgggctgggcgccgggcgggcggggctcgcggctgagaggcgggcgggccgggggcgccgggcgcggggccgccatgtggagcggccgcagctccttcaccagcttggtggtgggcgtgttcgtggtctacgtggtgcacacctgctgggtcatgtacggcatcgtctacacccgcccgtgctccggcgacgccaactgcatccagccctacctggcgcggcggcccaagctgcagctgagcgtgtacaccacgacgaggtcccacctgggtgctgagaacaacatcgacctggtcttgaatgtggaagactttgatgtggagtccaaatttgaaaggacagttaatgtttctgtaccaaagaaaacgagaaacaatgggacgctgtatgcctacatcttcctccatcacgctggggtcctgccgtggcacgacgggaagcaggtgcacctggtcagtcctctgaccacctacatggtccccaagccagaagaaatcaacctgctcaccggggagtctgatacacagcagatcgaggcggagaagaagccgacgagtgccctggatgagccagtgtcccactggcgaccgcggctggcgctgaacgtgatggcggacaactttgtctttgacgggtcctccctgcctgccgatgtgcatcggtacatgaagatgatccagctggggaaaaccgtgcattacctgcccatcctgttcatcgaccagctcagcaaccgcgtgaaggacctgatggtcataaaccgctccaccaccgagctgcccctcaccgtgtcctacgacaaggtctcactggggcggctgcgcttctggatccacatgcaggacgccgtgtactccctgcagcagttcgggttttcagagaaagatgctgatgaggtgaaaggaatttttgtagataccaacttatacttcctggcgctgaccttctttgtcgcagcgttccatcttctctttgatttcctggcctttaaaaatgacatcagtttctggaagaagaagaagagcatgatcggcatgtccaccaaggcagtgctctggcgctgcttcagcaccgtggtcatctttctgttcctgctggacgagcagacgagcctgctggtgctggtcccggcgggtgttggagccgccattgagctgtggaaagtgaagaaggcattgaagatgactattttttggagaggcctgatgcccgaatttcagtttggcacttacagcgaatctgagaggaaaaccgaggagtacgatactcaggccatgaagtacttgtcatacctgctgtaccctctctgtgtcgggggtgctgtctattcactcctgaatatcaaatataagagctggtactcctggttaatcaacagcttcgtcaacggggtctatgtctaggaattcctccagatgccttccaaaaatactcatcgacgagttcagttgcacccggctggcggcagtcccggccggccgttcagtccagatgtggggcgcccgcg

SEQ ID NO: 439276 - DNA, 1605 bp, Homo sapiens
cgcgtccacttccggcaggcggcggggcccggaagcggcgcgcggggccggcgaatcccgcggcgccaggtgggagcggggccggagcatgcggggcggccggcggtctgcggcgcgcggcgcattcgttcccccgcggcggtggcggtggcgcgcggcggctctccagtgagcggcggagcccggagcggcgggctgggcgccgggcgggcggggctcgcggctgagaggcgggcgggccgggggcgccgggcgcggggccgccatgtggagcggccgcagctccttcaccagcttggtggtgggcgtgttcgtggtctacgtggtgcacacctgctgggtcatgtacggcatcgtctacacccgcccgtgctccggcgacgccaactgcatccagccctacctggcgcggcggcccaagctgcagctgagcgtgtacaccacgacgaggtcccacctgggtgctgagaacaacatcgacctggtcttgaatgtggaagactttgatgtggagtccaaatttgaaaggacagttaatgtttctgtaccaaagaaaacgagaaacaatgggacgctgtatgcctacatcttcctccatcacgctggggtcctgccgtggcacgacgggaagcaggtgcacctggtcagtcctctgaccacctacatggtccccaagccagaagaaatcaacctgctcaccggggagtctgatacacagcagatcgaggcggagaagaagccgacgagtgccctggatgagccagtgtcccactggcgaccgcggctggcgctgaacgtgatggcggacaactttgtctttgacgggtcctccctgcctgccgatgtgcatcggtacatgaagatgatccagctggggaaaaccgtgcattacctgcccatcctgttcatcgaccagctcagcaaccgcgtgaaggacctgatggtcataaaccgctccaccaccgagctgcccctcaccgtgtcctacgacaaggtctcactggggcggctgcgcttctggatccacatgcaggacgccgtgtactccctgcagcagttcgggttttcagagaaagatgctgatgaggtgaaaggaatttttgtagataccaacttatacttcctggcgctgaccttctttgtcgcagcgttccatcttctctttgatttcctggcctttaaaaatgacatcagtctgtgttgccaaaatcccttcggacatttctcagacatctcccaagttcccatcacgtcagatttggagctggtagcgcttacgatgcccccacgtgtgaacatctgtcttggtcacagagctgggtgctgccggtcaccttgagctgtggtggctcccggcacacgagtgtccggggttcggccatgtcctcacgcgggcaggggtgggagccctcacaggcaagggggctgttggatttccatttcaggtggttttctaagtgctccttatgtgaatttcaaacacgtatggaattcattccgcatggactctgggatcaaaggctctttcctcttttgtttgagagttggttgttttaaagcttaatgtatgtttctattttaaaataaatttttctggctgtggca

SEQ ID NO: 439277 - DNA, 1819 bp, Homo sapiens
cgcgtccacttccggcaggcggcggggcccggaagcggcgcgcggggccggcgaatcccgcggcgccaggtgggagcggggccggagcatgcggggcggccggcggtctgcggcgcgcggcgcattcgttcccccgcggcggtggcggtggcgcgcggcggctctccagtgagcggcggagcccggagcggcgggctgggcgccgggcgggcggggctcgcggctgagaggcgggcgggccgggggcgccgggcgcggggccgccatgtggagcggccgcagctccttcaccagcttggtggtgggcgtgttcgtggtctacgtggtgcacacctgctgggtcatgtacggcatcgtctacacccgcccgtgctccggcgacgccaactgcatccagccctacctggcgcggcggcccaagctgcagctgagcgtgtacaccacgacgaggtcccacctgggtgctgagaacaacatcgacctggtcttgaatgtggaagactttgatgtggagtccaaatttgaaaggacagttaatgtttctgtaccaaagaaaacgagaaacaatgggacgctgtatgcctacatcttcctccatcacgctggggtcctgccgtggcacgacgggaagcaggtgcacctggtcagtcctctgaccacctacatggtccccaagccagaagaaatcaacctgctcaccggggagtctgatacacagcagatcgaggcggagaagaagccgacgagtgccctggatgagccagtgtcccactggcgaccgcggctggcgctgaacgtgatggcggacaactttgtctttgacgggtcctccctgcctgccgatgtgcatcggtacatgaagatgatccagctggggaaaaccgtgcattacctgcccatcctgttcatcgaccagctcagcaaccgcgtgaaggacctgatggtcataaaccgctccaccaccgagctgcccctcaccgtgtcctacgacaaggtctcactggggcggctgcgcttctggatccacatgcaggacgccgtgtactccctgcagcagttcgggttttcagagaaagatgctgatgaggtgaaaggaatttttgtagataccaacttatacttcctggcgctgaccttctttgtcgcagcgttccatcttctctttgatttcctggcctttaaaaatgacatcagtttctggaagaagaagaagagcatgatcggcatgtccaccaaggcagtgctctggcgctgcttcagcaccgtggtcatctttctgttcctgctggacgagcagacgagcctgctggtgctggtcccggcgggtgttggagccgccattgagctgtggaaagtgaagaaggcattgaagatgactattttttggagaggcctgatgcccgaatttcagtttggcacttacagcgaatctgagaggaaaaccgaggagtacgatactcaggtaagtcacttgtgattcagggcacgtgcatgccaggcaaatccaacaccctcaaagacgggtcttttactgtcattgctcagtgcggaagtctccttggagtacgggtcagcccgccttgagcagggatcccaagagtgaacacataaaacccaaatttcttactgggaagggcgggggctcgcagagactcatttcccagtccttacaggcacagcctgcctgtgtcaccgtatagtagggatattttcatcgtttgtaagtcacattcgccaggcagctgacgcaggccatggtgtctgctgtggttgctgggaacgcacttgccgtcaccaaggccataatggccgcggccgc

SEQ ID NO: 439278 - DNA, 1371 bp, Homo sapiens
  misc_feature (1071)..(1071): n is a, c, g, or t
  misc_feature (1145)..(1145): n is a, c, g, or t
atggcggacaactttgtctttgacgggtcctccctgcctgccgatgtgcatcggtacatgaagatgatccagctggggaaaaccgtgcattacctgcccatcctgttcatcgaccagctcagcaaccgcgtgaaggacctgatggtcataaaccgctccggcggtctgcggcgcgcggcgcattcgttcccccgcggcggtggcggtggcgcgcggcggctctccagtgagcggcggagcccggagcggcgggctgggcgccgggcgggcggggctcgcggctgagaggcgggcgggccgggggcgccgggcgcggggccgccatgtggagcggccgcagctccttcaccagcttggtggtgggcgtgttcgtggtctacgtggtgcacacctgctgggtcatgtacggcatcgtctacacccgcccgtgctccggcgacgccaactgcatccagccctacctggcgcggcggcccaagctgcagctgagcgtgtacaccacgacgaggtcccacctgggtgctgagaacaacatcgacctggtcttgaatgtggaagactttgatgtggagtccaaatttgaaaggacagttaatgtttctgtaccaaagaaaacgagaaacaatgggacgctgtatgcctacatcttcctccatcacgttctggaagaagaagaagagcatgatcggcatgtccaccaaggcagtgctctggcgctgcttcagcaccgtggtcatctttctgttcctgctggacgagcagacgagcctgctggtgctggtcccggcgggtgttggagccgccattgagctgtggaaagtgaagaaggcattgaagatgactattttttggagaggcctgatgcccgaatttcagtttggcacttacagcgaatctgagaggaaaaccgaggagtacgatactcaggccatgaagtacttgtcatacctgctgtaccctctctgtgtcgggggtgctgtctattcactcctgaatatcaaatataagagctggtactcctggttaatcaacaggcttcccccccgctcaacggggggtcctatggccctnttggctttcctcttcatgctgccccagctctttgtgaactacaagttgaagtcagtggcacattcttggccccnccttgggggcaaaaaagggggggcccccccttttttttccaaaacgctttaaccaaaaggggcgttttttcaaacaagctttcaacaccttcattgatgacgtctttgccttcatcatcaccatgcccacgtctcaccggctggcctgcttccgggacgacgtgggttgtttttcccttggggttcctaaacctgggggtaacccaaggggggggtttatcctgtg

SEQ ID NO: 439279 - DNA, 378 bp, Homo sapiens
cggccgccgccgtttgatggatccgaggatcgcctggtttcagccagagcagctcggaccgtccaacagtctgtggatgcagatctgggagacgacccaggggctgaggaacctctacttcaaccaccactgtcacagcagcggcggcgcgagcggcggcggcggcagcagcagcagcagcagcacggccaccggcgggagcggcagcagcaccggcagccccggcggcgcggcctcggccccggccccggccccggccggcatgtatcgctccggggagcgcctgctgggcagccacgcgctgcccgcggagcagcgggacttcctgcccctagagacgaccaacaacaacaacaaccaccaccagcccggggcctg

SEQ ID NO: 439280 - DNA, 3651 bp, Homo sapiens
gacatcgacctagtggtgtttgggaagtgggagaacctacccctctggactctggaagaagctcttcggaaacacaaagtcgcagatgaggattcggtgaaagttttagacaaagcaactgtacctattattaaattaacagattcttttactgaagtgaaagttgatatcagctttaatgtacagaatggcgtgagagcagctgacctcatcaaagattttaccaagaaatatcctgtattgccatacttggttttagtattgaaacaattcctattgcagagggaccttaatgaagtatttacaggtggaattggttcttatagtctctttttaatggcagtcagtttccttcagttacatcccagggaagatgcttgcatccccaatacaaactatggtgttctcttaatagaattttttgaattatatggacgacacttcaattatttaaagactggcatccggataaaggatggtggttcatatgtggccaaagatgaagtacagaaaaatatgctagatggctacaggccatcaatgctttatatcgaagatcctttacaaccaggtaacgatgttggaaggagttcatatggggccatgcaagtgaagcaggcctttgattatgcctacgttgttttgagtcatgctgtatcaccaatagcaaagtactatcccaacaatgaaacagaaagcatactaggtagaataattagagtaacagatgaagttgccacatatagagattggatatcaaagcagtggggcttgaagaatagacctgagccttcatgcaatgtcaaactcttcatcaggtccagtgtcgtcctcttctgccacacagtccagctctagtgatgtagattccgatgcaacaccatgcaaaaccccgaaacagctgctttgccgtccgtccactgggaaccgagtagggtcgcaagatgtatccttggagtcctctcaggcagttgggaaaatgcaaagcacccaaaccactaacacatccaacagcaccaacaaatctcagcatggatcagcaaggctctttcgttcttccagcaaaggcttccaaggtacaactcaaacaagccatggttccttgatgacaaacaaacaacatcaaggcaaatccaataatcagtattaccatggcaaaaagaggaaacacaagagggacgcgcccctctcagacctctgtagatagtcagcgctgcgcggtggactgtcttctctgtgcaatgatctcatgctcaggacagttgcgcagggactcctgggagatattcaggagcctcacactgttcagacgttgacttagcaactgcgttttttcccagctcgccacagaatggatcatgaagactgacaactgcaaaaaaaacaaaacaaaacaaaaaaaaaagcaagcaaaaaagagggaaaaaaaaggctgcttatttgataagtcatatgctacaacagggtcattttaagatttaaagcttgaatgtaaaataaatatatttctcattggctttatgcagagttatagggaatagtattcagtgttggtagggtgatagaaacaaaaaacagtatcagaggatgaggtggggaaggaaaacaaaggtatctgataggaagtccagattccaaaggggaaagtgatctgtgcatgttttttttttaaatatttttgccatatatttaccattttattgtgtgtatatatagaagaccatataggaaattgatatttgtaatagtggatttgttaataatactttttacataacattactgtttaaattgtaaacagattttttctcaggattagtttgaaaaataatctaaattgtcatcttaacatccatatatagggaagtgattagttctattactcaatttgtttttctcagcattgaaatgacttaatagaacccttgtgtcctgctgcaaaaatttttcctctctaaagaaaaggtttatggtggcaaatgatgtttattttattttgtaaaaaaaaaaaaatgtactatgtacttttgtgtaaacactgaaaaatctctggtcatctccgagaattaacttgcaactgttttctatagtgctgtcgtcttgggcaatgggcaattacatgactttgtgtttgcttcctttgcagtcttttttttttccccccatttcttcctaataggaaaaaaaaaaaaaaaaaaggtcacccatgtctggtctcattcctgttgcagtgaaacttcgagttccacagactttgcatgctggcttctctaaccctgtgtgctgcgtgtgcctgtttctcatctcttattctttttaaaattcatgcttaactactgtgggagaataactgtaaacagctttaattaaatcatacttataaaaaactattttcttatattccactctatgcttttggtattgttgatctttacaaattaaatggtctttgataatggatctattttgtattgccttattaagaccaaatacttcttgtcatcccattctttatcctcttctttcatggaattgttatcgttaattaaaacttttttaaacattggcttgtttcaatcatactgtaaattttggttgtagtcagctttgagtgcaatgagatgtataattctgttatcattacctgttgagtttgaaactcagttgggaatatttaatataatagaatgtaagtgacatttctgaaaatgctttctttcagggtgaaagctcttatgtttagcatcaatgtgtatggctctgttaaatgcagccatttctgagacgagattcttttatatatatatacatataaagtactattggcttttaggagtttcttttatatacatttatgaaatactgaagaccaatcagaccattaatggacacttagtgtaactttttataaagaaaataatgctaaagtaagaccaaaactgatgtcatcactgaaattaacaattttcaatatgttcatattttaattcacaatggaaaaatgtgttccttattttgacaatgttttaaattttagagtcacattttattctgatcagaatttttattgagatgttgagcttttgtttttgaaactagtttgtcataacattgtgcataatcacagtatttattttctaggacaattgtgaatgtgtagacttatgtttactgctaagggaacaattatttataaaataatattaaatccagtattagctgcctatttcagacacttaatacttgcagagatctatgttacatttaccacactgaagttttttttgttgttttttgtttgtttttaaagaatcaccctcattgttgaaagtaaatgtactcttagggtgcgaatattagtgttccaataagcatgtgattatattaaggtggtggtagcgggaagataattctgattccattgggaatcttaggttttcgtaaatttattgggaaaatagtttttcctgtactgctgaagtttctttttggtaaacagtatctttctaaaagaaaaaagcatgaaggagaaattgaggtgtgtatacatttcctcaaatgaccagcattgtattcgtgaatactgtgtatcttgcagtgaacagtgtggaagctgttcatttttcaatctgaagtaaaatactttcaaga

SEQ ID NO: 439281 - DNA, 3594 bp, Homo sapiens
gacatcgacctagtggtgtttgggaagtgggagaacctacccctctggactctggaagaagctcttcggaaacacaaagtcgcagatgaggattcggtgaaagttttagacaaagcaactgtacctattattaaattaacagattcttttactgaagtgaaagttgatatcagctttaatgtacagaatggcgtgagagcagctgacctcatcaaagattttaccaagaaatatcctgtattgccatacttggttttagtattgaaacaattcctattgcagagggaccttaatgaagtatttacaggtggaattggttcttatagtctctttttaatggcagtcagtttccttcagttacatcccagggaagatgcttgcatccccaatacaaactatggtgttctcttaatagaattttttgaattatatggacgacacttcaattatttaaagactggcatccggataaaggatggtggttcatatgtggccaaagatgaagtacagaaaaatatgctagatggctacaggccatcaatgctttatatcgaagatcctttacaaccaggtaacgatgttggaaggagttcatatggggccatgcaagtgaagcaggcctttgattatgcctacgttgttttgagtcatgctgtatcaccaatagcaaagtactatcccaacaatgaaacagaaagcatactaggtagaataattagagtaacagatgaagttgccacatatagagattggatatcaaagcagtggggcttgaagaatagacctgagccttcatgcaatgtcaaactcttcatcaggtccagtgtcgtcctcttctgccacacagtccagctctagtgatgtagattccgatgcaacaccatgcaaaaccccgaaacagctgctttgccgtccgtccactgggaaccgagtagggtcgcaagatgtatccttggagtcctctcaggcagttgggaaaatgcaaagcacccaaaccactaacacatccaacagcaccaacaaatctcagcatggatcagcaaggctctttcgttcttccagcaaaggcttccaaggtacaactcaaacaagccatggttccttgatgacaaacaaacaacatcaaggcaaatccaataatcagtattaccatggcaaaaagaggaaacacaagagggacgcgcccctctcagacctctgtagatagtcagcgctgcgcggtggactgtcttctctgtgcaatgatctcatgctcaggacagttgcgcagggactcctgggagatattcaggagcctcacactgttcagacgttgacttagcaactgcgttttttcccagctcgccacagaatggatcatgaagactgacaactgcaaaaaaaacaaaacaaaacaaaaaaaaaagcaagcaaaaaagagggaaaaaaaaggctgcttatttgataagtcatatgctacaacagggtcattttaagatttaaagcttgaatgtaaaataaatatatttctcattggctttatgcagagttatagggaatagtattcagtgttggtagggtgatagaaacaaaaaacagtatcagaggatgaggtggggaaggaaaacaaaggtatctgataggaagtccagattccaaaggggaaagtgatctgtgcatgttttttttttaaatatttttgccatatatttaccattttattgtgtgtatatatagaagaccatataggaaattgatatttgtaatagtggatttgttaataatactttttacataacattactgtttaaattgtaaacagattttttctcaggattagtttgaaaaataatctaaattgtcatcttaacatccatatatagggaagtgattagttctattactcaatttgtttttctcagcattgaaatgacttaatagaacccttgtgtcctgctgcaaaaatttttcctctctaaagaaaaggtttatggtggcaaatgatgtttattttattttgtaaaaaaaaaaaaatgtactatgtacttttgtgtaaacactgaaaaatctctggtcatctccgagaattaacttgcaactgttttctatagtgctgtcgtcttgggcaatgggcaattacatgactttgtgtttgcttcctttgcagtcttttttttttccccccatttcttcctaataggaaaaaaaaaaaaaaaaaaggtcacccatgtctggtctcattcctgttgcagtgaaacttcgagttccacagactttgcatgctggcttctctaaccctgtgtgctgcgtgtgcctgtttctcatctcttattctttttaaaattcatgcttaactactgtgggagaataactgtaaacagctttaattaaatcatacttataaaaaactattttcttatattccactctatgcttttggtattgttgatctttacaaattaaatggtctttgataatggatctattttgtattgccttattaagaccaaatacttcttgtcatcccattctttatcctcttctttcatggaattgttatcgttaattaaaacttttttaaacattggcttgtttcaatcatactgtaaattttggttgtagtcagctttgagtgcaatgagatgtataattctgttatcattacctgttgagtttgaaactcagttgggaatatttaatataatagaatgtaagtgacattttctgttaaatgcagccatttctgagacgagattcttttatatatatatacatataaagtactattggcttttaggagtttcttttatatacatttatgaaatactgaagaccaatcagaccattaatggacacttagtgtaactttttataaagaaaataatgctaaagtaagaccaaaactgatgtcatcactgaaattaacaattttcaatatgttcatattttaattcacaatggaaaaatgtgttccttattttgacaatgttttaaattttagagtcacattttattctgatcagaatttttattgagatgttgagcttttgtttttgaaactagtttgtcataacattgtgcataatcacagtatttattttctaggacaattgtgaatgtgtagacttatgtttactgctaagggaacaattatttataaaataatattaaatccagtattagctgcctatttcagacacttaatacttgcagagatctatgttacatttaccacactgaagttttttttgttgttttttgtttgtttttaaagaatcaccctcattgttgaaagtaaatgtactcttagggtgcgaatattagtgttccaataagcatgtgattatattaaggtggtggtagcgggaagataattctgattccattgggaatcttaggttttcgtaaatttattgggaaaatagtttttcctgtactgctgaagtttctttttggtaaacagtatctttctaaaagaaaaaagcatgaaggagaaattgaggtgtgtatacatttcctcaaatgaccagcattgtattcgtgaatactgtgtatcttgcagtgaacagtgtggaagctgttcatttttcaatctgaagtaaaatactttcaaga

SEQ ID NO: 439282 - DNA, 3830 bp, Homo sapiens
gacatcgacctagtggtgtttgggaagtgggagaacctacccctctggactctggaagaagctcttcggaaacacaaagtcgcagatgaggattcggtgaaagttttagacaaagcaactgtacctattattaaattaacagattcttttactgaagtgaaagttgatatcagctttaatgtacagaatggcgtgagagcagctgacctcatcaaagattttaccaagaaatatcctgtattgccatacttggttttagtattgaaacaattcctattgcagagggaccttaatgaagtatttacaggtggaattggttcttatagtctctttttaatggcagtcagtttccttcagttacatcccagggaagatgcttgcatccccaatacaaactatggtgttctcttaatagaattttttgaattatatggacgacacttcaattatttaaagactggcatccggataaaggatggtggttcatatgtggccaaagatgaagtacagaaaaatatgctagatggctacaggccatcaatgctttatatcgaagatcctttacaaccaggtaacgatgttggaaggagttcatatggggccatgcaagtgaagcaggcctttgattatgcctacgttgttttgagtcatgctgtatcaccaatagcaaagtactatcccaacaatgaaacagaaagcatactaggtagaataattagagtaacagatgaagttgccacatatagagattggatatcaaagcagtggggcttgaagaatagacctgagccttcatgcaatggaaatggtgttaccttgatagtagatactcagcagttagataaatgtaataataatctatctgaagaaaatgaagcccttggaaaatgtagaagtaaaacctcggaatctcttagtaaacactcttcaaactcttcatcaggtccagtgtcgtcctcttctgccacacagtccagctctagtgatgtagattccgatgcaacaccatgcaaaaccccgaaacagctgctttgccgtccgtccactgggaaccgagtagggtcgcaagatgtatccttggagtcctctcaggcagttgggaaaatgcaaagcacccaaaccactaacacatccaacagcaccaacaaatctcagcatggatcagcaaggctctttcgttcttccagcaaaggcttccaaggtacaactcaaacaagccatggttccttgatgacaaacaaacaacatcaaggcaaatccaataatcagtattaccatggcaaaaagaggaaacacaagagggacgcgcccctctcagacctctgtagatagtcagcgctgcgcggtggactgtcttctctgtgcaatgatctcatgctcaggacagttgcgcagggactcctgggagatattcaggagcctcacactgttcagacgttgacttagcaactgcgttttttcccagctcgccacagaatggatcatgaagactgacaactgcaaaaaaaacaaaacaaaacaaaaaaaaaagcaagcaaaaaagagggaaaaaaaaggctgcttatttgataagtcatatgctacaacagggtcattttaagatttaaagcttgaatgtaaaataaatatatttctcattggctttatgcagagttatagggaatagtattcagtgttggtagggtgatagaaacaaaaaacagtatcagaggatgaggtggggaaggaaaacaaaggtatctgataggaagtccagattccaaaggggaaagtgatctgtgcatgttttttttttaaatatttttgccatatatttaccattttattgtgtgtatatatagaagaccatataggaaattgatatttgtaatagtggatttgttaataatactttttacataacattactgtttaaattgtaaacagattttttctcaggattagtttgaaaaataatctaaattgtcatcttaacatccatatatagggaagtgattagttctattactcaatttgtttttctcagcattgaaatgacttaatagaacccttgtgtcctgctgcaaaaatttttcctctctaaagaaaaggtttatggtggcaaatgatgtttattttattttgtaaaaaaaaaaaaatgtactatgtacttttgtgtaaacactgaaaaatctctggtcatctccgagaattaacttgcaactgttttctatagtgctgtcgtcttgggcaatgggcaattacatgactttgtgtttgcttcctttgcagtcttttttttttccccccatttcttcctaataggaaaaaaaaaaaaaaaaaaggtcacccatgtctggtctcattcctgttgcagtgaaacttcgagttccacagactttgcatgctggcttctctaaccctgtgtgctgcgtgtgcctgtttctcatctcttattctttttaaaattcatgcttaactactgtgggagaataactgtaaacagctttaattaaatcatacttataaaaaactattttcttatattccactctatgcttttggtattgttgatctttacaaattaaatggtctttgataatggatctattttgtattgccttattaagaccaaatacttcttgtcatcccattctttatcctcttctttcatggaattgttatcgttaattaaaacttttttaaacattggcttgtttcaatcatactgtaaattttggttgtagtcagctttgagtgcaatgagatgtataattctgttatcattacctgttgagtttgaaactcagttgggaatatttaatataatagaatgtaagtgacatttctgaaaatgctttctttcagggtgaaagctcttatgtttagcatcaatgtgtatggctctgttaaatgcagccatttctgagacgagattcttttatatatatatacatataaagtactattggcttttaggagtttcttttatatacatttatgaaatactgaagaccaatcagaccattaatggacacttagtgtaactttttataaagaaaataatgctaaagtaagaccaaaactgatgtcatcactgaaattaacaattttcaatatgttcatattttaattcacaatggaaaaatgtgttccaaaactggaaactcatagtactcgtgtaaactgtggaagatttcaaatgtgatgttattttgacaatgttttaaattttagagtcacattttattctgatcagaatttttattgagatgttgagcttttgtttttgaaactagtttgtcataacattgtgcataatcacagtatttattttctaggacaattgtgaatgtgtagacttatgtttactgctaagggaacaattatttataaaataatattaaatccagtattagctgcctatttcagacacttaatacttgcagagatctatgttacatttaccacactgaagttttttttgttgttttttgtttgtttttaaagaatcaccctcattgttgaaagtaaatgtactcttagggtgcgaatattagtgttccaataagcatgtgattatattaaggtggtggtagcgggaagataattctgattccattgggaatcttaggttttcgtaaatttattgggaaaatagtttttcctgtactgctgaagtttctttttggtaaacagtatctttctaaaagaaaaaagcatgaaggagaaattgaggtgtgtatacatttcctcaaatgaccagcattgtattcgtgaatactgtgtatcttgcagtgaacagtgtggaagctgttcatttttcaatctgaagtaaaatactttcaaga

SEQ ID NO: 439283 - DNA, 3584 bp, Homo sapiens
gacatcgacctagtggtgtttgggaagtgggagaacctacccctctggactctggaagaagctcttcggaaacacaaagtcgcagatgaggattcggtgaaagttttagacaaagcaactgtacctattattaaattaacagattcttttactgaagtgaaagttgatatcagctttaatgtacagaatggcgtgagagcagctgacctcatcaaagattttaccaagaaatatcctgtattgccatacttggttttagtattgaaacaattcctattgcagagggaccttaatgaagtatttacaggtggaattggttcttatagtctctttttaatggcagtcagtttccttcagttacatcccagggaagatgcttgcatccccaatacaaactatggtgttctcttaatagaattttttgaattatatggacgacacttcaattatttaaagactggcatccggataaaggatggtggttcatatgtggccaaagatgaagtacagaaaaatatgctagatggctacaggccatcaatgctttatatcgaagatcctttacaaccaggtaacgatgttggaaggagttcatatggggccatgcaagtgaagcaggcctttgattatgcctacgttgttttgagtcatgctgtatcaccaatagcaaagtactatcccaacaatgaaacagaaagcatactaggtagaataattagagtaacagatgaagttgccacatatagagattggatatcaaagcagtggggcttgaagaatagacctgagccttcatgcaatgtcaaactcttcatcaggtccagtgtcgtcctcttctgccacacagtccagctctagtgatgtagattccgatgcaacaccatgcaaaaccccgaaacagctgctttgccgtccgtccactgggaaccgagtagggtcgcaagatgtatccttggagtcctctcaggcagttgggaaaatgcaaagcacccaaaccactaacacatccaacagcaccaacaaatctcagcatggatcagcaaggctctttcgttcttccagcaaaggcttccaaggtacaactcaaacaagccatggttccttgatgacaaacaaacaacatcaaggcaaatccaataatcagtattaccatggcaaaaagaggaaacacaagagggacgcgcccctctcagacctctgtagatagtcagcgctgcgcggtggactgtcttctctgtgcaatgatctcatgctcaggacagttgcgcagggactcctgggagatattcaggagcctcacactgttcagacgttgacttagcaactgcgttttttcccagctcgccacagaatggatcatgaagactgacaactgcaaaaaaaacaaaacaaaacaaaaaaaaaagcaagcaaaaaagagggaaaaaaaaggctgcttatttgataagtcatatgctacaacagggtcattttaagatttaaagcttgaatgtaaaataaatatatttctcattggctttatgcagagttatagggaatagtattcagtgttggtagggtgatagaaacaaaaaacagtatcagaggatgaggtggggaaggaaaacaaaggtatctgataggaagtccagattccaaaggggaaagtgatctgtgcatgttttttttttaaatatttttgccatatatttaccattttattgtgtgtatatatagaagaccatataggaaattgatatttgtaatagtggatttgttaataatactttttacataacattactgtttaaattgtaaacagattttttctcaggattagtttgaaaaataatctaaattgtcatcttaacatccatatatagggaagtgattagttctattactcaatttgtttttctcagcattgaaatgacttaatagaacccttgtgtcctgctgcaaaaatttttcctctctaaagaaaaggtttatggtggcaaatgatgtttattttattttgtaaaaaaaaaaaaatgtactatgtacttttgtgtaaacactgaaaaatctctggtcatctccgagaattaacttgcaactgttttctatagtgctgtcgtcttgggcaatgggcaattacatgactttgtgtttgcttcctttgcagtcttttttttttccccccatttcttcctaataggaaaaaaaaaaaaaaaaaaggtcacccatgtctggtctcattcctgttgcagtgaaacttcgagttccacagactttgcatgctggcttctctaaccctgtgtgctgcgtgtgcctgtttctcatctcttattctttttaaaattcatgcttaactactgtgggagaataactgtaaacagctttaattaaatcatacttataaaaaactattttcttatattccactctatgcttttggtattgttgatctttacaaattaaatggtctttgataatggatctattttgtattgccttattaagaccaaatacttcttgtcatcccattctttatcctcttctttcatggaattgttatcgttaattaaaacttttttaaacattggcttgtttcaatcatactgtaaattttggttgtagtcagctttgagtgcaatgagatgtataattctgttatcattacctgttgagtttgaaactcagttgggaatatttaatataatagaatgtaagtgacatttctgaaaatgctttctttcagggtgaaagctcttatgtttagcatcaatgtgtatggctctgttaaatgcagccatttctgagacgagattcttttatatatatatacatataaagtactattggcttttaggagtttcttttatatacatttatgaaatactgaagaccaatcagaccattaatggacacttagtgtaactttttataaagaaaataatgctaaagtaagaccaaaactgatgtcatcactgaaattaacaattttcaatatgttcatattttaattcacaatggaaaaatgtgttccaaaactggaaactcatagtactcgtgtaaactgtggaagatttcaaatgtgatgttattttgacaatgttttaaattttagagtcacattttattctgatcagaatttttattgagatgttgagcttttgtttttgaaactagtttgtcataacattgtgcataatcacagtatttattttctaggacaattgtgaatgtgtagacttatgtttactgctaagggaacaattatttataaaataatattaaatccagtattagctgcctatttcagacacttaatacttgcagagatctatgttacatttaccacactgaagtagacaggcggcaccggccggaacgaagaaatcacctacatggagaaggataaagtaacctaggggacgaacgacgatgtcccaacaggctgctccagacatacagggggtggcacaggcaccacaagggtccaaggaaacaccgcccgcaacctcggcacacgaaccgacagtagaaatcgacgaggagaagaccagagaaaacaacgacgaacaggggagaaacacgagcaaacacgagtactcacaagc

SEQ ID NO: 439284 - DNA, 2422 bp, Homo sapiens
  misc_feature (2203)..(2203): n is a, c, g, or t
  misc_feature (2216)..(2216): n is a, c, g, or t
  misc_feature (2230)..(2230): n is a, c, g, or t
  misc_feature (2245)..(2245): n is a, c, g, or t
  misc_feature (2381)..(2381): n is a, c, g, or t
gacatcgacctagtggtgtttgggaagtgggagaacctacccctctggactctggaagaagctcttcggaaacacaaagtcgcagatgaggattcggtgaaagttttagacaaagcaactgtacctattattaaattaacagattcttttactgaagtgaaagttgatatcagctttaatgtacagaatggcgtgagagcagctgacctcatcaaagattttaccaagaaatatcctgtattgccatacttggttttagtattgaaacaattcctattgcagagggaccttaatgaagtatttacaggtggaattggttcttatagtctctttttaatggcagtcagtttccttcagttacatcccagggaagatgcttgcatccccaatacaaactatggtgttctcttaatagaattttttgaattatatggacgacacttcaattatttaaagactggcatccggataaaggatggtggttcatatgtggccaaagatgaagtacagaaaaatatgctagatggctacaggccatcaatgctttatatcgaagatcctttacaaccaggtaacgatgttggaaggagttcatatggggccatgcaagtgaagcaggcctttgattatgcctacgttgttttgagtcatgctgtatcaccaatagcaaagtactatcccaacaatgaaacagaaagcatactaggtagaataattagagtaacagatgaagttgccacatatagagattggatatcaaagcagtggggcttgaagaatagacctgagccttcatgcaatgtcaaactcttcatcaggtccagtgtcgtcctcttctgccacacagtccagctctagtgatgtagattccgatgcaacaccatgcaaaaccccgaaacagctgctttgccgtccgtccactgggaaccgagtagggtcgcaagatgtatccttggagtcctctcaggcagttgggaaaatgcaaagcacccaaaccactaacacatccaacagcaccaacaaatctcagcatggatcagcaaggctctttcgttcttccagcaaaggcttccaaggtacaactcaaacaagccatggttccttgatgacaaacaaacaacatcaaggcaaatccaataatcagtattaccatggcaaaaagaggaaacacaagagggacgcgcccctctcagacctctgtagatagtcagcgctgcgcggtggactgtcttctctgtgcaatgatctcatgctcaggacagttgcgcagggactcctgggagatattcaggagcctcacactgttcagacgttgacttagcaactgcgttttttcccagctcgccacagaatggatcatgaagactgacaactgcaaaaaaaacaaaacaaaacaaaaaaaaaagcaagcaaaaaagagggaaaaaaaaggctgcttatttgataagtcatatgctacaacagggtcattttaagatttaaagcttgaatgtaaaataaatatatttctcattggctttatgcagagttatagggaatagtattcagtgttggtagggtgatagaaacaaaaaacagtatcagaggatgaggtggggaaggaaaacaaaggtatctgataggaagtccagattccaaaggggaaagtgatctgtgcatgttttttttttaaatatttttgccatatatttaccattttattgtgtgtatatatagaagaccatataggaaattgatatttgtaatagtggatttgttaataatactttttacataacattactgtttaaattgtaaacagattttttctcaggattagtttgaaaaataatctaaattgtcatcttaacatccatatatagggaagtgattagttctattactcaatttgtttttctcagcattgaaatgacttaatagaacccttgtgtcctgctgcaaaaatttttcctctctaaagaaaaggtttatggtggcaaatgatgtttattttattttgtaaaaaaaaaaaaatgtactatgtacttttgtgtaaacactgaaaaatctctggtcatctccgagaattaacttgcaactgttttctatagtgctgtcgtcttgggcaatgggcaattacatgactttgtgtttgcttcctttgcagtcttttttttttccccccatttcttcctaataggaaaaaaaaaggggccccccttgnggggcccattccngggggcgggaaacnttggggtcccaaaantttggctggcgggtttttaaacccgggggggcgggggggcccggttccaaacccttattttttttaaaaatccagcctaacctccgggggggaaaaacctgaaaccggctttatttaattcttccttataaaaacntttttttttatttccccctctagcctctgggtttggggaac

SEQ ID NO: 439285 - DNA, 2513 bp, Homo sapiens
cggccgccgccgtttgatggatccgaggatcgcctggtttcagccagagcagctcggaccgtccaacagtctgtggatgcagatctgggagatattcaggagcctcacactgttcagacgttgacttagcaactgcgttttttcccagctcgccacagaatggatcatgaagactgacaactgcaaaaaaaacaaaacaaaacaaaaaaaaaagcaagcaaaaaagagggaaaaaaaaggctgcttatttgataagtcatatgctacaacagggtcattttaagatttaaagcttgaatgtaaaataaatatatttctcattggctttatgcagagttatagggaatagtattcagtgttggtagggtgatagaaacaaaaaacagtatcagaggatgaggtggggaaggaaaacaaaggtatctgataggaagtccagattccaaaggggaaagtgatctgtgcatgttttttttttaaatatttttgccatatatttaccattttattgtgtgtatatatagaagaccatataggaaattgatatttgtaatagtggatttgttaataatactttttacataacattactgtttaaattgtaaacagattttttctcaggattagtttgaaaaataatctaaattgtcatcttaacatccatatatagggaagtgattagttctattactcaatttgtttttctcagcattgaaatgacttaatagaacccttgtgtcctgctgcaaaaatttttcctctctaaagaaaaggtttatggtggcaaatgatgtttattttattttgtaaaaaaaaaaaaatgtactatgtacttttgtgtaaacactgaaaaatctctggtcatctccgagaattaacttgcaactgttttctatagtgctgtcgtcttgggcaatgggcaattacatgactttgtgtttgcttcctttgcagtcttttttttttccccccatttcttcctaataggaaaaaaaaaaaaaaaaaaggtcacccatgtctggtctcattcctgttgcagtgaaacttcgagttccacagactttgcatgctggcttctctaaccctgtgtgctgcgtgtgcctgtttctcatctcttattctttttaaaattcatgcttaactactgtgggagaataactgtaaacagctttaattaaatcatacttataaaaaactattttcttatattccactctatgcttttggtattgttgatctttacaaattaaatggtctttgataatggatctattttgtattgccttattaagaccaaatacttcttgtcatcccattctttatcctcttctttcatggaattgttatcgttaattaaaacttttttaaacattggcttgtttcaatcatactgtaaattttggttgtagtcagctttgagtgcaatgagatgtataattctgttatcattacctgttgagtttgaaactcagttgggaatatttaatataatagaatgtaagtgacatttctgaaaatgctttctttcagggtgaaagctcttatgtttagcatcaatgtgtatggctctgttaaatgcagccatttctgagacgagattcttttatatatatatacatataaagtactattggcttttaggagtttcttttatatacatttatgaaatactgaagaccaatcagaccattaatggacacttagtgtaactttttataaagaaaataatgctaaagtaagaccaaaactgatgtcatcactgaaattaacaattttcaatatgttcatattttaattcacaatggaaaaatgtgttccaaaactggaaactcatagtactcgtgtaaactgtggaagatttcaaatgtgatgttattttgacaatgttttaaattttagagtcacattttattctgatcagaatttttattgagatgttgagcttttgtttttgaaactagtttgtcataacattgtgcataatcacagtatttattttctaggacaattgtgaatgtgtagacttatgtttactgctaagggaacaattatttataaaataatattaaatccagtattagctgcctatttcagacacttaatacttgcagagatctatgttacatttaccacactgaagttttttttgttgttttttgtttgtttttaaagaatcaccctcattgttgaaagtaaatgtactcttagggtgcgaatattagtgttccaataagcatgtgattatattaaggtggtggtagcgggaagataattctgattccattgggaatcttaggttttcgtaaatttattgggaaaatagtttttcctgtactgctgaagtttctttttggtaaacagtatctttctaaaagaaaaaagcatgaaggagaaattgaggtgtgtatacatttcctcaaatgaccagcattgtattcgtgaatactgtgtatcttgcagtgaacagtgtggaagctgttcatttttcaatctgaagtaaaatactttcaaga

SEQ ID NO: 439286 - DNA, 1600 bp, Homo sapiens
tggtcaccacctcctggctcggggaaccgctctggccctttggacagccatggccccgatttccgaatcggggcccggacccccaaaaaaaaaggtcacccatgtctggtctcattcctgttgcagtgaaacttcgagttccacagactttgcatgctggcttctctaaccctgtgtgctgcgtgtgcctgtttctcatctcttattctttttaaaattcatgcttaactactgtgggagaataactgtaaacagctttaattaaatcatacttataaaaaactattttcttatattccactctatgcttttggtattgttgatctttacaaattaaatggtctttgataatggatctattttgtattgccttattaagaccaaatacttcttgtcatcccattctttatcctcttctttcatggaattgttatcgttaattaaaacttttttaaacattggcttgtttcaatcatactgtaaattttggttgtagtcagctttgagtgcaatgagatgtataattctgttatcattacctgttgagtttgaaactcagttgggaatatttaatataatagaatgtaagtgacatttctgaaaatgctttctttcagggtgaaagctcttatgtttagcatcaatgtgtatggctctgttaaatgcagccatttctgagacgagattcttttatatatatatacatataaagtactattggcttttaggagtttcttttatatacatttatgaaatactgaagaccaatcagaccattaatggacacttagtgtaactttttataaagaaaataatgctaaagtaagaccaaaactgatgtcatcactgaaattaacaattttcaatatgttcatattttaattcacaatggaaaaatgtgttccaaaactggaaactcatagtactcgtgtaaactgtggaagatttcaaatgtgatgttattttgacaatgttttaaattttagagtcacattttattctgatcagaatttttattgagatgttgagcttttgtttttgaaactagtttgtcataacattgtgcataatcacagtatttattttctaggacaattgtgaatgtgtagacttatgtttactgctaagggaacaattatttataaaataatattaaatccagtattagctgcctatttcagacacttaatacttgcagagatctatgttacatttaccacactgaagttttttttgttgttttttgtttgtttttaaagaatcaccctcattgttgaaagtaaatgtactcttagggtgcgaatattagtgttccaataagcatgtgattatattaaggtggtggtagcgggaagataattctgattccattgggaatcttaggttttcgtaaatttattgggaaaatagtttttcctgtactgctgaagtttctttttggtaaacagtatctttctaaaagaaaaaagcatgaaggagaaattgaggtgtgtatacatttcctcaaatgaccagcattgtattcgtgaatactgtgtatcttgcagtgaacagtgtggaagctgttcatttttcaatctgaagtaaaatactttcaaga

SEQ ID NO: 439287 - DNA, 1554 bp, Homo sapiens
  misc_feature (23)..(23): n is a, c, g, or t
ctatatcgcactggggccgcccncagagagagcgctctgtgtgtgtgtgtgtgtgtgtgtgtgtgtgtgtgtcggcctcagagcgcgctgtgtgtgtgtgtgtgtgtgtcagcctcagagcgcgcctgtgtgctgcgtgtgcctgtttctcatctcttattctttttaaaattcatgcttaactactgtgggagaataactgtaaacagctttaattaaatcatacttataaaaaactattttcttatattccactctatgcttttggtattgttgatctttacaaattaaatggtctttgataatggatctattttgtattgccttattaagaccaaatacttcttgtcatcccattctttatcctcttctttcatggaattgttatcgttaattaaaacttttttaaacattggcttgtttcaatcatactgtaaattttggttgtagtcagctttgagtgcaatgagatgtataattctgttatcattacctgttgagtttgaaactcagttgggaatatttaatataatagaatgtaagtgacatttctgaaaatgctttctttcagggtgaaagctcttatgtttagcatcaatgtgtatggctctgttaaatgcagccatttctgagacgagattcttttatatatatatacatataaagtactattggcttttaggagtttcttttatatacatttatgaaatactgaagaccaatcagaccattaatggacacttagtgtaactttttataaagaaaataatgctaaagtaagaccaaaactgatgtcatcactgaaattaacaattttcaatatgttcatattttaattcacaatggaaaaatgtgttccaaaactggaaactcatagtactcgtgtaaactgtggaagatttcaaatgtgatgttattttgacaatgttttaaattttagagtcacattttattctgatcagaatttttattgagatgttgagcttttgtttttgaaactagtttgtcataacattgtgcataatcacagtatttattttctaggacaattgtgaatgtgtagacttatgtttactgctaagggaacaattatttataaaataatattaaatccagtattagctgcctatttcagacacttaatacttgcagagatctatgttacatttaccacactgaagttttttttgttgttttttgtttgtttttaaagaatcaccctcattgttgaaagtaaatgtactcttagggtgcgaatattagtgttccaataagcatgtgattatattaaggtggtggtagcgggaagataattctgattccattgggaatcttaggttttcgtaaatttattgggaaaatagtttttcctgtactgctgaagtttctttttggtaaacagtatctttctaaaagaaaaaagcatgaaggagaaattgaggtgtgtatacatttcctcaaatgaccagcattgtattcgtgaatactgtgtatcttgcagtgaacagtgtggaagctgttcatttttcaatctgaagtaaaatactttcaaga

SEQ ID NO: 439288 - DNA, 3705 bp, Homo sapiens
gacatcgacctagtggtgtttgggaagtgggagaacctacccctctggactctggaagaagctcttcggaaacacaaagtcgcagatgaggattcggtgaaagttttagacaaagcaactgtacctattattaaattaacagattcttttactgaagtgaaagttgatatcagctttaatgtacagaatggcgtgagagcagctgacctcatcaaagattttaccaagaaatatcctgtattgccatacttggttttagtattgaaacaattcctattgcagagggaccttaatgaagtatttacaggtggaattggttcttatagtctctttttaatggcagtcagtttccttcagttacatcccagggaagatgcttgcatccccaatacaaactatggtgttctcttaatagaattttttgaattatatggacgacacttcaattatttaaagactggcatccggataaaggatggtggttcatatgtggccaaagatgaagtacagaaaaatatgctagatggctacaggccatcaatgctttatatcgaagatcctttacaaccaggtaacgatgttggaaggagttcatatggggccatgcaagtgaagcaggcctttgattatgcctacgttgttttgagtcatgctgtatcaccaatagcaaagtactatcccaacaatgaaacagaaagcatactaggtagaataattagagtaacagatgaagttgccacatatagagattggatatcaaagcagtggggcttgaagaatagacctgagccttcatgcaatgtcaaactcttcatcaggtccagtgtcgtcctcttctgccacacagtccagctctagtgatgtagattccgatgcaacaccatgcaaaaccccgaaacagctgctttgccgtccgtccactgggaaccgagtagggtcgcaagatgtatccttggagtcctctcaggcagttgggaaaatgcaaagcacccaaaccactaacacatccaacagcaccaacaaatctcagcatggatcagcaaggctctttcgttcttccagcaaaggcttccaaggtacaactcaaacaagccatggttccttgatgacaaacaaacaacatcaaggcaaatccaataatcagtattaccatggcaaaaagaggaaacacaagagggacgcgcccctctcagacctctgtagatagtcagcgctgcgcggtggactgtcttctctgtgcaatgatctcatgctcaggacagttgcgcagggactcctgggagatattcaggagcctcacactgttcagacgttgacttagcaactgcgttttttcccagctcgccacagaatggatcatgaagactgacaactgcaaaaaaaacaaaacaaaacaaaaaaaaaagcaagcaaaaaagagggaaaaaaaaggctgcttatttgataagtcatatgctacaacagggtcattttaagatttaaagcttgaatgtaaaataaatatatttctcattggctttatgcagagttatagggaatagtattcagtgttggtagggtgatagaaacaaaaaacagtatcagaggatgaggtggggaaggaaaacaaaggtatctgataggaagtccagattccaaaggggaaagtgatctgtgcatgttttttttttaaatatttttgccatatatttaccattttattgtgtgtatatatagaagaccatataggaaattgatatttgtaatagtggatttgttaataatactttttacataacattactgtttaaattgtaaacagattttttctcaggattagtttgaaaaataatctaaattgtcatcttaacatccatatatagggaagtgattagttctattactcaatttgtttttctcagcattgaaatgacttaatagaacccttgtgtcctgctgcaaaaatttttcctctctaaagaaaaggtttatggtggcaaatgatgtttattttattttgtaaaaaaaaaaaaatgtactatgtacttttgtgtaaacactgaaaaatctctggtcatctccgagaattaacttgcaactgttttctatagtgctgtcgtcttgggcaatgggcaattacatgactttgtgtttgcttcctttgcagtcttttttttttccccccatttcttcctaataggaaaaaaaaaaaaaaaaaaggtcacccatgtctggtctcattcctgttgcagtgaaacttcgagttccacagactttgcatgctggcttctctaaccctgtgtgctgcgtgtgcctgtttctcatctcttattctttttaaaattcatgcttaactactgtgggagaataactgtaaacagctttaattaaatcatacttataaaaaactattttcttatattccactctatgcttttggtattgttgatctttacaaattaaatggtctttgataatggatctattttgtattgccttattaagaccaaatacttcttgtcatcccattctttatcctcttctttcatggaattgttatcgttaattaaaacttttttaaacattggcttgtttcaatcatactgtaaattttggttgtagtcagctttgagtgcaatgagatgtataattctgttatcattacctgttgagtttgaaactcagttgggaatatttaatataatagaatgtaagtgacatttctgaaaatgctttctttcagggtgaaagctcttatgtttagcatcaatgtgtatggctctgttaaatgcagccatttctgagacgagattcttttatatatatatacatataaagtactattggcttttaggagtttcttttatatacatttatgaaatactgaagaccaatcagaccattaatggacacttagtgtaactttttataaagaaaataatgctaaagtaagaccaaaactgatgtcatcactgaaattaacaattttcaatatgttcatattttaattcacaatggaaaaatgtgttccaaaactggaaactcatagtactcgtgtaaactgtggaagatttcaaatgtgatgttattttgacaatgttttaaattttagagtcacattttattctgatcagaatttttattgagatgttgagcttttgtttttgaaactagtttgtcataacattgtgcataatcacagtatttattttctaggacaattgtgaatgtgtagacttatgtttactgctaagggaacaattatttataaaataatattaaatccagtattagctgcctatttcagacacttaatacttgcagagatctatgttacatttaccacactgaagttttttttgttgttttttgtttgtttttaaagaatcaccctcattgttgaaagtaaatgtactcttagggtgcgaatattagtgttccaataagcatgtgattatattaaggtggtggtagcgggaagataattctgattccattgggaatcttaggttttcgtaaatttattgggaaaatagtttttcctgtactgctgaagtttctttttggtaaacagtatctttctaaaagaaaaaagcatgaaggagaaattgaggtgtgtatacatttcctcaaatgaccagcattgtattcgtgaatactgtgtatcttgcagtgaacagtgtggaagctgttcatttttcaatctgaagtaaaatactttcaaga

SEQ ID NO: 439289 - DNA, 3597 bp, Homo sapiens
gacatcgacctagtggtgtttgggaagtgggagaacctacccctctggactctggaagaagctcttcggaaacacaaagtcgcagatgaggattcggtgaaagttttagacaaagcaactgtacctattattaaattaacagattcttttactgaagtgaaagttgatatcagctttaatgtacagaatggcgtgagagcagctgacctcatcaaagattttaccaagaaatatcctgtattgccatacttggttttagtattgaaacaattcctattgcagagggaccttaatgaagtatttacaggtggaattggttcttatagtctctttttaatggcagtcagtttccttcagttacatcccagggaagatgcttgcatccccaatacaaactatggtgttctcttaatagaattttttgaattatatggacgacacttcaattatttaaagactggcatccggataaaggatggtggttcatatgtggccaaagatgaagtacagaaaaatatgctagatggctacaggccatcaatgctttatatcgaagatcctttacaaccaggtaacgatgttggaaggagttcatatggggccatgcaagtgaagcaggcctttgattatgcctacgttgttttgagtcatgctgtatcaccaatagcaaagtactatcccaacaatgaaacagaaagcatactaggtagaataattagagtaacagatgaagttgccacatatagagattggatatcaaagcagtggggcttgaagaatagacctgagccttcatgcaatgtcaaactcttcatcaggtccagtgtcgtcctcttctgccacacagtccagctctagtgatgtagattccgatgcaacaccatgcaaaaccccgaaacagctgctttgccgtccgtccactgggaaccgagtagggtcgcaagatgtatccttggagtcctctcaggcagttgggaaaatgcaaagcacccaaaccactaacacatccaacagcaccaacaaatctcagcatggatcagcaaggctctttcgttcttccagcaaaggcttccaaggtacaactcaaacaagccatggttccttgatgacaaacaaacaacatcaaggcaaatccaataatcagtattaccatggcaaaaagaggaaacacaagagggacgcgcccctctcagacctctgtagatagtcagcgctgcgcggtggactgtcttctctgtgcaatgatctcatgctcaggacagttgcgcagggactcctgggagatattcaggagcctcacactgttcagacgttgacttagcaactgcgttttttcccagctcgccacagaatggatcatgaagactgacaactgcaaaaaaaacaaaacaaaacaaaaaaaaaagcaagcaaaaaagagggaaaaaaaaggctgcttatttgataagtcatatgctacaacagggtcattttaagatttaaagcttgaatgtaaaataaatatatttctcattggctttatgcagagttatagggaatagtattcagtgttggtagggtgatagaaacaaaaaacagtatcagaggatgaggtggggaaggaaaacaaaggtatctgataggaagtccagattccaaaggggaaagtgatctgtgcatgttttttttttaaatatttttgccatatatttaccattttattgtgtgtatatatagaagaccatataggaaattgatatttgtaatagtggatttgttaataatactttttacataacattactgtttaaattgtaaacagattttttctcaggattagtttgaaaaataatctaaattgtcatcttaacatccatatatagggaagtgattagttctattactcaatttgtttttctcagcattgaaatgacttaatagaacccttgtgtcctgctgcaaaaatttttcctctctaaagaaaaggtttatggtggcaaatgatgtttattttattttgtaaaaaaaaaaaaatgtactatgtacttttgtgtaaacactgaaaaatctctggtcatctccgagaattaacttgcaactgttttctatagtgctgtcgtcttgggcaatgggcaattacatgactttgtgtttgcttcctttgcagtcttttttttttccccccatttcttcctaataggaaaaaaaaaaaaaaaaaaggtcacccatgtctggtctcattcctgttgcagtgaaacttcgagttccacagactttgcatgctggcttctctaaccctgtgtgctgcgtgtgcctgtttctcatctcttattctttttaaaattcatgcttaactactgtgggagaataactgtaaacagctttaattaaatcatacttataaaaaactattttcttatattccactctatgcttttggtattgttgatctttacaaattaaatggtctttgataatggatctattttgtattgccttattaagaccaaatacttcttgtcatcccattctttatcctcttctttcatggaattgttatcgttaatttcagctttgagtgcaatgagatgtataattctgttatcattacctgttgagtttgaaactcagttgggaatatttaatataatagaatgtaagtgacatttctgaaaatgctttctttcagggtgaaagctcttatgtttagcatcaatgtgtatggctctgttaaatgcagccatttctgagacgagattcttttatatatatatacatataaagtactattggcttttaggagtttcttttatatacatttatgaaatactgaagaccaatcagaccattaatggacacttagtgtaactttttataaagaaaataatgctaaagtaagaccaaaactgatgtcatcactgaaattaacaattttcaatatgttcatattttaattcacaatggaaaaatgtgttccttattttgacaatgttttaaattttagagtcacattttattctgatcagaatttttattgagatgttgagcttttgtttttgaaactagtttgtcataacattgtgcataatcacagtatttattttctaggacaattgtgaatgtgtagacttatgtttactgctaagggaacaattatttataaaataatattaaatccagtattagctgcctatttcagacacttaatacttgcagagatctatgttacatttaccacactgaagttttttttgttgttttttgtttgtttttaaagaatcaccctcattgttgaaagtaaatgtactcttagggtgcgaatattagtgttccaataagcatgtgattatattaaggtggtggtagcgggaagataattctgattccattgggaatcttaggttttcgtaaatttattgggaaaatagtttttcctgtactgctgaagtttctttttggtaaacagtatctttctaaaagaaaaaagcatgaaggagaaattgaggtgtgtatacatttcctcaaatgaccagcattgtattcgtgaatactgtgtatcttgcagtgaacagtgtggaagctgttcatttttcaatctgaagtaaaatactttcaaga

SEQ ID NO: 439290 - DNA, 4239 bp, Homo sapiens
gacatcgacctagtggtgtttgggaagtgggagaacctacccctctggactctggaagaagctcttcggaaacacaaagtcgcagatgaggattcggtgaaagttttagacaaagcaactgtacctattattaaattaacagattcttttactgaagtgaaagttgatatcagctttaatgtacagaatggcgtgagagcagctgacctcatcaaagattttaccaagaaatatcctgtattgccatacttggttttagtattgaaacaattcctattgcagagggaccttaatgaagtatttacaggtggaattggttcttatagtctctttttaatggcagtcagtttccttcagttacatcccagggaagatgcttgcatccccaatacaaactatggtgttctcttaatagaattttttgaattatatggacgacacttcaattatttaaagactggcatccggataaaggatggtggttcatatgtggccaaagatgaagtacagaaaaatatgctagatggctacaggccatcaatgctttatatcgaagatcctttacaaccaggtaacgatgttggaaggagttcatatggggccatgcaagtgaagcaggcctttgattatgcctacgttgttttgagtcatgctgtatcaccaatagcaaagtactatcccaacaatgaaacagaaagcatactaggtagaataattagagtaacagatgaagttgccacatatagagattggatatcaaagcagtggggcttgaagaatagacctgagccttcatgcaatgtcaaactcttcatcaggtccagtgtcgtcctcttctgccacacagtccagctctagtgatgtagattccgatgcaacaccatgcaaaaccccgaaacagctgctttgccgtccgtccactgggaaccgagtagggtcgcaagatgtatccttggagtcctctcaggcagttgggaaaatgcaaagcacccaaaccactaacacatccaacagcaccaacaaatctcagcatggatcagcaaggctctttcgttcttccagcaaaggcttccaaggtacaactcaaacaagccatggttccttgatgacaaacaaacaacatcaaggcaaatccaataatcagtattaccatggcaaaaagaggaaacacaagagggacgcgcccctctcagacctctgtagatagtcagcgctgcgcggtggactgtcttctctgtgcaatgatctcatgctcaggacagttgcgcagggactcctgggagatattcaggagcctcacactgttcagacgttgacttagcaactgcgttttttcccagctcgccacagaatggatcatgaagactgacaactgcaaaaaaaacaaaacaaaacaaaaaaaaaagcaagcaaaaaagagggaaaaaaaaggctgcttatttgataagtcatatgctacaacagggtcattttaagatttaaagcttgaatgtaaaataaatatatttctcattggctttatgcagagttatagggaatagtattcagtgttggtagggtgatagaaacaaaaaacagtatcagaggatgaggtggggaaggaaaacaaaggtatctgataggaagtccagattccaaaggggaaagtgatctgtgcatgttttttttttaaatatttttgccatatatttaccattttattgtgtgtatatatagaagaccatataggaaattgatatttgtaatagtggatttgttaataatactttttacataacattactgtttaaattgtaaacagattttttctcaggattagtttgaaaaataatctaaattgtcatcttaacatccatatatagggaagtgattagttctattactcaatttgtttttctcagcattgaaatgacttaatagaacccttgtgtcctgctgcaaaaatttttcctctctaaagaaaaggtttatggtggcaaatgatgtttattttattttgtaaaaaaaaaaaaatgtactatgtacttttgtgtaaacactgaaaaatctctggtcatctccgagaattaacttgcaactgttttctatagtgctgtcgtcttgggcaatgggcaattacatgactttgtgtttgcttcctttgcagtcttttttttttccccccatttcttcctaataggaaaaaaaaaaaaaaaaaaggtcacccatgtctggtctcattcctgttgcagtgaaacttcgagttccacagactttgcatgctggcttctctaaccctgtgtgctgcgtgtgcctgtttctcatctcttattctttttaaaattcatgcttaactactgtgggagaataactgtaaacagctttaattaaatcatacttataaaaaactattttcttatattccactctatgcttttggtattgttgatctttacaaattaaatggtctttgataatggatctattttgtattgccttattaagaccaaatacttcttgtcatcccattctttatcctcttctttcatggaattgttatcgttaattaaaacttttttaaacattggcttgtttcaatcatactgtaaattttggttgtagtcagctttgagtgcaatgagatgtataattctgttatcattacctgttgagtttgaaactcagttgggaatatttaatataatagaatgtaagtgacatttctgaaaatgctttctttcagggtgaaagctcttatgtttagcatcaatgtgtatggctctgttaaatgcagccatttctgagacgagattcttttatatatatatacatataaagtactattggcttttaggagtttcttttatatacatttatgaaatactgaagaccaatcagaccattaatggacacttagtgtaactttttataaagaaaataatgctaaagtaagaccaaaactgatgtcatcactgaaattaacaattttcaatatgttcatattttaattcacaatggaaaaatgtgttccaaaactggaaactcatagtactcgtgtaaactgtggaagatttcaaatgtgatgttattttgacaatgttttaaattttagagtcacattttattctgatcagaatttttattgagatgttgagcttttgtttttgaaactagtttgtcataacattgtgcataatcacagtatttattttctaggacaattgtgaatgtgtagacttatgtttactgctaagggaacaattatttataaaataatattaaatccagtattagctgcctatttcagacacttaatacttgcagagatctatgttacatttaccacactgaagttttttttgttgttttttgtttgtttttaaagaatcaccctcattgttgaaagtaaatgtactcttagggtgcgaatattagtgttccaataagcatgtgattatattaaggtggtggtagcgggaagataattctgattccattgggaatcttaggttttcgtaaatttattgggaaaatagtttttcctgtactgctgaagtttctttttggtaaacagtatctttctaaaagaaaaaagcatgaaggagaaattgaggtgtgtatacatttcctcaaatgaccagcattgtattcgtgaatactgtgtatcttgcagtgaacagtgtggaagctgttcatttttcaatctgaagtaaaatactttcaagaacttttagtttgcctgctcatttgttttatacatttcatctatttgactcctatcttatttcttttttgagttttaatacttcctatattttgtgaatatatcagaaatgtgtcatttatatattagagtccattcatatccatgaatcataaccttcctttgctaatacttgttgaatgggattttacaaattctccctcactctggtgacatttctcaggcagtcatgtatgtgtacctggccattagaaatattaatatttaaagactgttttttagaggagctgatgggttggtgaggtgtcagcacaaaatcttactggttatgttttgatgataaaagtatatccattttttccctccagctttaaggtgactgtgaaggtgcctggttttgaatgtctttgtttggtttggagatgtcgcactcagttttcaaatctagcttggatctgtaggacctatgttttttacaagtaattgccctccagtcttcaacagttgattctgttttatttttatcctgttttgag

SEQ ID NO: 439291 - DNA, 3651 bp, Homo sapiens
gacatcgacctagtggtgtttgggaagtgggagaacctacccctctggactctggaagaagctcttcggaaacacaaagtcgcagatgaggattcggtgaaagttttagacaaagcaactgtacctattattaaattaacagattcttttactgaagtgaaagttgatatcagctttaatgtacagaatggcgtgagagcagctgacctcatcaaagattttaccaagaaatatcctgtattgccatacttggttttagtattgaaacaattcctattgcagagggaccttaatgaagtatttacaggtggaattggttcttatagtctctttttaatggcagtcagtttccttcagttacatcccagggaagatgcttgcatccccaatacaaactatggtgttctcttaatagaattttttgaattatatggacgacacttcaattatttaaagactggcatccggataaaggatggtggttcatatgtggccaaagatgaagtacagaaaaatatgctagatggctacaggccatcaatgctttatatcgaagatcctttacaaccaggtaacgatgttggaaggagttcatatggggccatgcaagtgaagcaggcctttgattatgcctacgttgttttgagtcatgctgtatcaccaatagcaaagtactatcccaacaatgaaacagaaagcatactaggtagaataattagagtaacagatgaagttgccacatatagagattggatatcaaagcagtggggcttgaagaatagacctgagccttcatgcaatgtcaaactcttcatcaggtccagtgtcgtcctcttctgccacacagtccagctctagtgatgtagattccgatgcaacaccatgcaaaaccccgaaacagctgctttgccgtccgtccactgggaaccgagtagggtcgcaagatgtatccttggagtcctctcaggcagttgggaaaatgcaaagcacccaaaccactaacacatccaacagcaccaacaaatctcagcatggatcagcaaggctctttcgttcttccagcaaaggcttccaaggtacaactcaaacaagccatggttccttgatgacaaacaaacaacatcaaggcaaatccaataatcagtattaccatggcaaaaagaggaaacacaagagggacgcgcccctctcagacctctgtagatagtcagcgctgcgcggtggactgtcttctctgtgcaatgatctcatgctcaggacagttgcgcagggactcctgggagatattcaggagcctcacactgttcagacgttgacttagcaactgcgttttttcccagctcgccacagaatggatcatgaagactgacaactgcaaaaaaaacaaaacaaaacaaaaaaaaaagcaagcaaaaaagagggaaaaaaaaggctgcttatttgataagtcatatgctacaacagggtcattttaagatttaaagcttgaatgtaaaataaatatatttctcattggctttatgcagagttatagggaatagtattcagtgttggtagggtgatagaaacaaaaaacagtatcagaggatgaggtggggaaggaaaacaaaggtatctgataggaagtccagattccaaaggggaaagtgatctgtgcatgttttttttttaaatatttttgccatatatttaccattttattgtgtgtatatatagaagaccatataggaaattgatatttgtaatagtggatttgttaataatactttttacataacattactgtttaaattgtaaacagattttttctcaggattagtttgaaaaataatctaaattgtcatcttaacatccatatatagggaagtgattagttctattactcaatttgtttttctcagcattgaaatgacttaatagaacccttgtgtcctgctgcaaaaatttttcctctctaaagaaaaggtttatggtggcaaatgatgtttattttattttgtaaaaaaaaaaaaatgtactatgtacttttgtgtaaacactgaaaaatctctggtcatctccgagaattaacttgcaactgttttctatagtgctgtcgtcttgggcaatgggcaattacatgactttgtgtttgcttcctttgcagtcttttttttttccccccatttcttcctaataggaaaaaaaaaaaaaaaaaaggtcacccatgtctggtctcattcctgttgcagtgaaacttcgagttccacagactttgcatgctggcttctctaaccctgtgtgctgcgtgtgcctgtttctcatctcttattctttttaaaattcatgcttaactactgtgggagaataactgtaaacagctttaattaaatcatacttataaattaaatggtctttgataatggatctattttgtattgccttattaagaccaaatacttcttgtcatcccattctttatcctcttctttcatggaattgttatcgttaattaaaacttttttaaacattggcttgtttcaatcatactgtaaattttggttgtagtcagctttgagtgcaatgagatgtataattctgttatcattacctgttgagtttgaaactcagttgggaatatttaatataatagaatgtaagtgacatttctgaaaatgctttctttcagggtgaaagctcttatgtttagcatcaatgtgtatggctctgttaaatgcagccatttctgagacgagattcttttatatatatatacatataaagtactattggcttttaggagtttcttttatatacatttatgaaatactgaagaccaatcagaccattaatggacacttagtgtaactttttataaagaaaataatgctaaagtaagaccaaaactgatgtcatcactgaaattaacaattttcaatatgttcatattttaattcacaatggaaaaatgtgttccaaaactggaaactcatagtactcgtgtaaactgtggaagatttcaaatgtgatgttattttgacaatgttttaaattttagagtcacattttattctgatcagaatttttattgagatgttgagcttttgtttttgaaactagtttgtcataacattgtgcataatcacagtatttattttctaggacaattgtgaatgtgtagacttatgtttactgctaagggaacaattatttataaaataatattaaatccagtattagctgcctatttcagacacttaatacttgcagagatctatgttacatttaccacactgaagttttttttgttgttttttgtttgtttttaaagaatcaccctcattgttgaaagtaaatgtactcttagggtgcgaatattagtgttccaataagcatgtgattatattaaggtggtggtagcgggaagataattctgattccattgggaatcttaggttttcgtaaatttattgggaaaatagtttttcctgtactgctgaagtttctttttggtaaacagtatctttctaaaagaaaaaagcatgaaggagaaattgaggtgtgtatacatttcctcaaatgaccagcattgtattcgtgaatactgtgtatcttgcagtgaacagtgtggaagctgttcatttttcaatctgaagtaaaatactttcaaga

SEQ ID NO: 439292 - DNA, 1362 bp, Homo sapiens
  misc_feature (1299)..(1299): n is a, c, g, or t
gacatcgacctagtggtgtttgggaagtgggagaacctacccctctggactctggaagaagctcttcggaaacacaaagtcgcagatgaggattcggtgaaagttttagacaaagcaactgtacctattattaaattaacagattcttttactgaagtgaaagttgatatcagctttaatgtacagaatggcgtgagagcagctgacctcatcaaagattttaccaagaaatatcctgtattgccatacttggttttagtattgaaacaattcctattgcagagggaccttaatgaagtatttacaggtggaattggttcttatagtctctttttaatggcagtcagtttccttcagttacatcccagggaagatgcttgcatccccaatacaaactatggtgttctcttaatagaattttttgaattatatggacgacacttcaattatttaaagactggcatccggataaaggatggtggttcatatgtggccaaagatgaagtacagaaaaatatgctagatggctacaggccatcaatgctttatatcgaagatcctttacaaccaggtaacgatgttggaaggagttcatatggggccatgcaagtgaagcaggcctttgattatgcctacgttgttttgagtcatgctgtatcaccaatagcaaagtactatcccaacaatgaaacagaaagcatactaggtagaataattagagtaacagatgaagttgccacatatagagattggatatcaaagcagtggggcttgaagaatagacctgagccttcatgcaatggaaatggtgttaccttgatagtagatactcagcagttagataaatgtaataataatctatctgaagaaaatgaagcccttggaaaatgtagaagtaaaacctcggaatctcttagtaaacactcttcaaactcttcatcaggtccagtgtcgtcctcttctgccacacagtccagctctagtgatgtagattccgatgcaacaccatgcaaaaccccgaaacagctgctttgccgtccgtccactgggaaccgagtagggtcgcaagatgtatccttggagtcctctcaggcagttgggaaaatgcaaagcacccaaaccactaacacatccaacagcaccaacaaatctcagcatggatcagcaaggctctttcgttcttccagcaaaggcttccaaggtacaactcaaacaagccatggttccttgatgacaaacaaacaacatcaaggcaaatccaataatcagtattaccatggcacagagaagacagtccancgcgcagcgctgactatctacagaggtctgagaggggcgcgtccctcttgtgtttcctctttt

SEQ ID NO: 439293 - DNA, 929 bp, Homo sapiens
  misc_feature (879)..(879): n is a, c, g, or t
tcaggtggagatcgcagggctgaacacagacctgcagcaggagtacacccggcagcgggagcacctggagaggaacctggccactctcaagaagaaggtggtcaaggagggcgagctgcaccgcacagactacgtccgcatcatgcaggaaaatgtctctctgatcaaggaaattaatgagctccgcagggagctgaagttcactcggtcccaagtctatgaccttgaagcagctctgaaactgaccaagaaagtccgaccacaagaagtttcagagacagaacccagcagggacatgctcagcacagctcccaccgcaaggttgaatgagcaagaagaaactgggaggatcattgaaatgcagcgcctagaaatccagcgcctcagagaccagatccaagagcaagagcaggtcacagggttccacaccctcgctggagttcggcttccttccctctccaactccgaggtagacttagaggtgaagaccaactgaccccctctggtgagccatctccagccacagccagaagaaacacagcatgtctgtccccaagccagacttgcggttggagtctgtatggtccctgcagcactgaccccagcaacctctttctcttgccctggggaatttgggacacagaataaaggatgatcccggcgttccctttaatgagggttattcttgaacctcctcaactgctcttgcgctcggtcgatccctcagcaagtcgataatctactcatagcggaatacgttttcacgaatgagggatacccatgaaaactggggccaaggcataaatgccagaacctaaaagccggttttgggatttcctagctccccccctacaagatcaaaaataagccttagttgtncggggaacccgccggcttaaaatccccacaaaccctgaaccccttccact

SEQ ID NO: 439294 - DNA, 785 bp, Homo sapiens
gggaggccgggtctcccaggttaacaatgggaagtccaagagtttgttaggagctccccccacggcttatctcggtaagtagaggattagatcgtagtaaatcaaagacttatttcagtagtcaagttacctgacatgataattatttctgcaggataattgatgttttatgttcttttttggactttatcttcttgcaaaaatttctacaaaaattgttttcttcatccttgtggtgcttattcatctgagccgtctccacagtcccaatgcctctgctttttgttttacttttgtagcataaggtttttgcttttgctttgccttaagagttccctagggagttaccagggcttttcgttttgtgtagcttttgcagcatggatcaaacattggcttactgtgctaatgtgtgaagagaaaaaattctctaaagcaggtgagctttaatgaacaaatgtttttgggttttttttttttttttgtaattatatgaagaaagtccagttctcataaatattgatcacttaaaaaacttactctttcttgaaaaggtacacatgtaaaatttaggaaaataactaaagtaggggctggaaccataagaagaatgtttatcagcacgttcatttattattttggatttggaacttggctttgtttttcaatagtgacaagaatggttcagttctaggaatgttctggaagatgctgttaattttactttaaaatgagaatctggtgttactgtattttatcgttttcaataaaacttcttaagtgtt

SEQ ID NO: 439295 - DNA, 3939 bp, Homo sapiens
ttctagaaggcgtgacgtggggtcgagagcgggatccgaggctggcgggttttggcagtagctgtggctgcggctgccgggcctggggacgcgggcggccgaggccgccgtcgcagcctcctcgtctcgccggctatggctgcgctcggccggcccttcagcggcctccctctgagcggcggctcggacttcctgcagccgccgcagccggccttccccggccgggccttcccgccgggggctgacggcgccgagttggccccgcggccgggacctcgcgcagtccctagcagtcccgctgggagtgcggcgcgcggacgtgtttctgttcactgtaaaaagaaacacaagcgagaggaggaggaggatgatgattgtccagtaagaaagaaaaggataactgaagcagagctctgtgctggtcctaatgactggattctttgtgcacatcaggatgtagaggggcatggagtaaatcccagtgttagtggcctttccatacctgggatattagatgttatttgtgaagaaatggatcagacaactggagaaccacagtgtgaagttgcccgaaggaagcttcaggagattgaggacaggataattgatgaagatgaagaagttgaagctgacagaaatgttaaccatctccccagtcttgtcctttctgataccatgaaaacaggtttgaagagggaatttgatgaagtttttacaaagaaaatgattgagtctatgagccgtccttccatggagcttgttctctggaaacccctccctgaactcctttctgataagccaaagccatcctctaatactaagaactatacaggagagagccaagctaagcatgtagctgctggcactgccttccctcagagaactgaactgttttcggaacctcggccaacagggatgtctctttataatagtttggagacagctactagcacagaagaagagatggaactctagaaaccaatttctacactaaagttgtcaaatgttagaagaatcctgtgttcagttatgagactctttgcatagtatagggacttgaaagttttatgagacgggtgtaataatatctccacctgtgatttgggggtgggactcttattttgggtagccatttattgacttcacctttttgccaaggacgtttgtctcaagggaaaagcagttttctgtggggcttattaaaggaatgttggtttacattgtcttcaaagacaagtatagaagctgtatgtgtaagggtgacttaaatcatatgtcacattgtctaaactattcagacacttggagaatattctccttgaattaaaaaagatgattaagaaggatgctcctacaactgtatcctgacagttaagtcacagcttaatgtgtagatatgagctgtttacagtggtgactatatataattggggagaagaagggaagagagcagcagtagcttaagcctgttgctaagaaatttaatttcttagcaacttgtaatttagttatcaattcaatatagctctgttgattaaatagccgatagtattgtggctctcctctttgactatgaaaatatagagaaagttttttctttaaggcttttttgccttgtgccactgttgctccttggtttcccttgcgtaattgataagcccagttattcagtaatgtttacaaattaattgactttgatagttaaaagattatgaggtaacccatctgcaatttgcctgtgggagaagcatcctttagttcatcttaaggaagtgctttatcagctaaacccaacattgataactttggtaatttttttaaaaagttatacttgtattagcaagtttttttttttttcccccaccgcaacctccatctcccgggttcaagcaattctcctgcctcaccctcccaagtagctgggattacaggtgcccacctccacgcccagctaatttttgtatttttaatagagaccggttttgccatgttggccaggctggtctcgaactcctgacctcaggtgatctgcccaccccagcctcccaaaatgctgggattacaggcgtgagccacggcacgcagccagcaagttgtttttaaatgttaatatagaaaacagtgaaggattagctgaaaatatatgagcaggtgacattgaggtttactgaaatagccaatttgactggtgcttagactattgtgcagtaaacctaaaaggtagtggagaattgcttcctgctagcaggaagccttcatcttcttgagtacccaaaccaggcttcaggtgtcctttgaggatagccaggtttgaaatttttagtttctcaggaagagctcttctatgtggcaggggctgatagggcaaaataaaatgacaatttctttattgctacagagtatcctctataagttattaaacgagtgtaatggtataatgcccttccatcacacaacaggacaccaccccagttttgttttctgggtttcttccccctttgtaggaatcagataccttttgtagaaaaaaatggcttatgccacgtaaaggtgaatttttagaaaccaccttctaggcgtttttggaacccttactgaaatccctccccttgttacagatggcgtagaagtcacaagtctgttaattggactgttgcttctttgcctgttcctgctttctctttctgtctggatagtcaggaaaagatttaatgtttaatatttaaacaaaatatttaatgtctatacagtaaaattattcaaacttcaaaccagtattgaaagcagttggaaaccagctaatagtttcttaatctcagatttcgagatgaatgtaaactgtattcttttgaaatgtgcaagtgtttgattcatgccatttgataaacttctgccttgtagtcattgtttgatgggaccaacttgtaaagtatgagccttaaataaatctccatgctgaaaaatgtgttctaatgcaacacaaaaacatgaagtgactgcccagaggtagagttagtgtttaggtggaaagggagatgacagctttccaaagaaggacctaaaacacaccaagattgtcttctacaggaattgctgggcaggtctccgactaaaggtcttatgatgaaaaggaagaaacaagcccccaacacaaggctctgatactactggtaaatgtaggagagaattaagaatctgttaattaaaatccaaacagagcttatttcagtagtcaagttacctgacatgataattatttctgcaggataattgatgttttatgttcttttttggactttatcttcttgcaaaaatttctacaaaaattgttttcttcatccttgtggtgcttattcatctgagccgtctccacagtcccaatgcctctgctttttgttttacttttgtagcataaggtttttgcttttgctttgccttaagagttccctagggagttaccagggcttttcgttttgtgtagcttttgcagcatggatcaaacattggcttactgtgctaatgtgtgaagagaaaaaattctctaaagcaggtgagctttaatgaacaaatgtgtattttatctgagtttgagtagggtgcgttgtggattttgttttttgggttttttttttttttttgtaattatatgaagaaagtccagttctcataaatattgatcacttaaaaaacttactctttcttgaaaaggtacacatgtaaaatttaggaaaataactaaagtaggggctggaaccataagaagaatgtttatcagcacgttcatttattattttggatttggaacttggctttgtttttcaatagtgacaagaatggttcagttctaggaatgttctggaagatgctgttaattttactttaaaatgagaatctggtgttactgtattttatcgttttcaataaaacttcttaagtgtt

SEQ ID NO: 439296 - DNA, 4312 bp, Homo sapiens
ttctagaaggcgtgacgtggggtcgagagcgggatccgaggctggcgggttttggcagtagctgtggctgcggctgccgggcctggggacgcgggcggccgaggccgccgtcgcagcctcctcgtctcgccggctatggctgcgctcggccggcccttcagcggcctccctctgagcggcggctcggacttcctgcagccgccgcagccggccttccccggccgggccttcccgccgggggctgacggcgccgagttggccccgcggccgggacctcgcgcagtccctagcagtcccgctgggagtgcggcgcgcggacgtgtttctgttcactgtaaaaagaaacacaagcgagaggaggaggaggatgatgattgtccagtaagaaagaaaaggataactgaagcagagctctgtgctggtcctaatgactggattctttgtgcacatcaggatgtagaggggcatggagtaaatcccagtgttagtggcctttccatacctgggatattagatgttatttgtgaagaaatggatcagacaactggagaaccacagtgtgaagttgcccgaaggaagcttcaggagattgaggacaggataattgatgaagatgaagaagttgaagctgacagaaatgttaaccatctccccagtcttgtcctttctgataccatgaaaacaggtttgaagagggaatttgatgaagtttttacaaagaaaatgattgagtctatgagccgtccttccatggagcttgttctctggaaacccctccctgaactcctttctgataagccaaagccatcctctaatactaagaactatacaggagagagccaagctaagcatgtagctgctggcactgccttccctcagagaactgaactgttttcggaacctcggccaacagggatgtctctttataatagtttggagacagctactagcacagaagaagagatggaactctagaaaccaatttctacactaaagttgtcaaatgttagaagaatcctgtgttcagttatgagactctttgcatagtatagggacttgaaagttttatgagacgggtgtaataatatctccacctgtgatttgggggtgggactcttattttgggtagccatttattgacttcacctttttgccaaggacgtttgtctcaagggaaaagcagttttctgtggggcttattaaaggaatgttggtttacattgtcttcaaagacaagtatagaagctgtatgtgtaagggtgacttaaatcatatgtcacattgtctaaactattcagacacttggagaatattctccttgaattaaaaaagatgattaagaaggatgctcctacaactgtatcctgacagttaagtcacagcttaatgtgtagatatgagctgtttacagtggtgactatatataattggggagaagaagggaagagagcagcagtagcttaagcctgttgctaagaaatttaatttcttagcaacttgtaatttagttatcaattcaatatagctctgttgattaaatagccgatagtattgtggctctcctctttgactatgaaaatatagagaaagttttttctttaaggcttttttgccttgtgccactgttgctccttggtttcccttgcgtaattgataagcccagttattcagtaatgtttacaaattaattgactttgatagttaaaagattatgaggtaacccatctgcaatttgcctgtgggagaagcatcctttagttcatcttaaggaagtgctttatcagctaaacccaacattgataactttggtaatttttttaaaaagttatacttgtattagcaagtttttttttttttcccccaccgcaacctccatctcccgggttcaagcaattctcctgcctcaccctcccaagtagctgggattacaggtgcccacctccacgcccagctaatttttgtatttttaatagagaccggttttgccatgttggccaggctggtctcgaactcctgacctcaggtgatctgcccaccccagcctcccaaaatgctgggattacaggcgtgagccacggcacgcagccagcaagttgtttttaaatgttaatatagaaaacagtgaaggattagctgaaaatatatgagcaggtgacattgaggtttactgaaatagccaatttgactggtgcttagactattgtgcagtaaacctaaaaggtagtggagaattgcttcctgctagcaggaagccttcatcttcttgagtacccaaaccaggcttcaggtgtcctttgaggatagccaggtttgaaatttttagtttctcaggaagagctcttctatgtggcaggggctgatagggcaaaataaaatgacaatttctttattgctacagagtatcctctataagttattaaacgagtgtaatggtataatgcccttccatcacacaacaggacaccaccccagttttgttttctgggtttcttccccctttgtaggaatcagataccttttgtagaaaaaaatggcttatgccacgtaaaggtgaatttttagaaaccaccttctaggcgtttttggaacccttactgaaatccctccccttgttacagatggcgtagaagtcacaagtctgttaattggactgttgcttctttgcctgttcctgctttctctttctgtctggatagtcaggaaaagatttaatgtttaatatttaaacaaaatatttaatgtctatacagtaaaattattcaaacttcaaaccagtattgaaagcagttggaaaccagctaatagtttcttaatctcagatttcgagatgaatgtaaactgtattcttttgaaatgtgcaagtgtttgattcatgccatttgataaacttctgccttgtagtcattgtttgatgggaccaacttgtaaagtatgagccttaaataaatctccatgctgaaaaatgtgttctaatgcaacacaaaaacatgaagtgactgcccagaggtagagttagtgtttaggtggaaagggagatgacagctttccaaagaaggacctaaaacacaccaagattgtcttctacaggaattgctgggcaggtctccgactaaaggtcttatgatgaaaaggaagaaacaagcccccaacacaaggctctgatactactggtaaatgtaggagagaattaagaatctgttaattaaaatccaaacagagcttatttcagtagtcaagttacctgacatgataattatttctgcaggataattgatgttttatgttcttttttggactttatcttcttgcaaaaatttctacaaaaattgttttcttcatccttgtggtgcttattcatctgagccgtctccacagtcccaatgcctctgctttttgttttacttttgtagcataaggtttttgcttttgctttgccttaagagttccctagggagttaccagggcttttcgttttgtgtagcttttgcagcatggatcaaacattggcttactgtgctaatgtgtgaagagaaaaaattctctaaagcaggtgagctttaatgaacaaatgtgtattttatctgagtttgagtagggtgcgttgtggattttgttttttgggttttttttttttttttgtaattatatgaagaaagtccagttctcataaatattgatcacttaaaaaacttactctttcttgaaaaggtacacatgtaaaatttaggaaaataactaaagtaggggctggaaccataagaagaatgtttatcagcacgttcatttattattttggatttggaacttggctttgtttttcaatagtgacaagaatggttcagttctaggaatgttctggaagatgctgttaattttactttaaaatgagaatctggtgttactgtattttatcgttttcaataaaacttcttaagtgttttggacttttgagatatttgtattactccacttaaataatgaaatcagatatctcctttcctctgaattgtagttgaagcagcattcatatcagtgaaggacttaaatttatcctgaagggatgattatgttgggataaagctaagtatcatatttgaattagctgttcccacaataggcaggccatgtgttgctattctaaaacccatagactgctttccactcagagcagttcactgctattgttagtatttagatggcagtggtaactgtgtattcaaaaatgttaaaatgggctaggtacgatggtgcacacctgtgccagcactttgtgagactgaggcaggaggatcacttaagctgaggagagacc

SEQ ID NO: 439297 - DNA, 2708 bp, Homo sapiens
  misc_feature (2526)..(2526): n is a, c, g, or t
  misc_feature (2537)..(2537): n is a, c, g, or t
  misc_feature (2539)..(2539): n is a, c, g, or t
  misc_feature (2541)..(2541): n is a, c, g, or t
  misc_feature (2543)..(2543): n is a, c, g, or t
ttctagaaggcgtgacgtggggtcgagagcgggatccgaggctggcgggttttggcagtagctgtggctgcggctgccgggcctggggacgcgggcggccgaggccgccgtcgcagcctcctcgtctcgccggctatggctgcgctcggccggcccttcagcggcctccctctgagcggcggctcggacttcctgcagccgccgcagccggccttccccggccgggccttcccgccgggggctgacggcgccgagttggccccgcggccgggacctcgcgcagtccctagcagtcccgctgggagtgcggcgcgcggacgtgtttctgttcactgtaaaaagaaacacaagcgagaggaggaggaggatgatgattgtccagtaagaaagaaaaggataactgaagcagagctctgtgctggtcctaatgactggattctttgtgcacatcaggatgtagaggggcatggagtaaatcccagtgttagtggcctttccatacctgggatattagatgttatttgtgaagaaatggatcagacaactggagaaccacagtgtgaagttgcccgaaggaagcttcaggagattgaggacaggataattgatgaagatgaagaagttgaagctgacagaaatgttaaccatctccccagtcttgtcctttctgataccatgaaaacaggtttgaagagggaatttgatgaagtttttacaaagaaaatgattgagtctatgagccgtccttccatggagcttgttctctggaaacccctccctgaactcctttctgataagccaaagccatcctctaatactaagaactatacaggagagagccaagctaagcatgtagctgctggcactgccttccctcagagaactgaactgttttcggaacctcggccaacagggatgtctctttataatagtttggagacagctactagcacagaagaagagatggaactctagaaaccaatttctacactaaagttgtcaaatgttagaagaatcctgtgttcagttatgagactctttgcatagtatagggacttgaaagttttatgagacgggtgtaataatatctccacctgtgatttgggggtgggactcttattttgggtagccatttattgacttcacctttttgccaaggacgtttgtctcaagggaaaagcagttttctgtggggcttattaaaggaatgttggtttacattgtcttcaaagacaagtatagaagctgtatgtgtaagggtgacttaaatcatatgtcacattgtctaaactattcagacacttggagaatattctccttgaattaaaaaagatgattaagaaggatgctcctacaactgtatcctgacagttaagtcacagcttaatgtgtagatatgagctgtttacagtggtgactatatataattggggagaagaagggaagagagcagcagtagcttaagcctgttgctaagaaatttaatttcttagcaacttgtaatttagttatcaattcaatatagctctgttgattaaatagccgatagtattgtggctctcctctttgactatgaaaatatagagaaagttttttctttaaggcttttttgccttgtgccactgttgctccttggtttcccttgcgtaattgataagcccagttattcagtaatgtttacaaattaattgactttgatagttaaaagattatgaggtaacccatctgcaatttgcctgtgggagaagcatcctttagttcatcttaaggaagtgctttatcagctaaacccaacattgataactttggtaatttttttaaaaagttatacttgtattagcaagtttttttttttttcccccaccgcaacctccatctcccgggttcaagcaattctcctgcctcaccctcccaagtagctgggattacaggtgcccacctccacgcccagctaatttttgtatttttaatagagaccggttttgccatgttggccaggctggtctcgaactcctgacctcaggtgatctgcccaccccagcctcccaaaatgctgggattacaggcgtgagccacggcacgcagccagcaagttgtttttaaatgttaatatagaaaacagtgaaggattagctgaaaatatatgagcaggtgacattgaggtttactgaaatagccaatttgactggtgcttagactattgtgcagtaaacctaaaaggtagtggagaattgcttcctgctagcaggaagccttcatcttcttgagtacccaaaccaggcttcaggtgtcctttgaggatagccaggtttgaaatttttagtttctcaggaagagctcttctatgtggcaggggctgatagggcaaaataaaatgacaatttctttattgctacagagtatcctctataagttattaaacgagtgtaatggtataatgcccttccatcacacaacaggacaccaccccagttttgttttctgggtttcttccccctttgtaggaatcagataccttttgaaaanctactgaatcntncntngtcagatgcgaaagtacaagctgtaatgactgtgctcttgctgtctgcttcttttgctgatgcggaaagattatgtatataacaatattatgcatcagaaatatcaactcaacagatgagcatggacagtatgtctattcgatcgagattactgtcttaagtgaa

SEQ ID NO: 439298 - DNA, 1576 bp, Homo sapiens
ttctagaaggcgtgacgtggggtcgagagcgggatccgaggctggcgggttttggcagtagctgtggctgcggctgccgggcctggggacgcgggcggccgaggccgccgtcgcagcctcctcgtctcgccggctatggctgcgctcggccggcccttcagcggcctccctctgagcggcggctcggacttcctgcagccgccgcagccggccttccccggccgggccttcccgccgggggctgacggcgccgagttggccccgcggccgggacctcgcgcagtccctagcagtcccgctgggagtgcggcgcgcggacgtgtttctgttcactgtaaaaagaaacacaagcgagaggaggaggaggatgatgattgtccagtaagaaagaaaaggataactgaagcagagctctgtgctggtcctaatgactggattctttgtgcacatcaggatgtagaggggcatggagtaaatcccagtgttagtggcctttccatacctgggatattagatgttatttgtgaagaaatggatcagacaactggagaaccacagtgtgaagttgcccgaaggaagcttcaggagattgaggacaggataattgatgaagatgaagaagttgaagctgacagaaatgttaaccatctccccagtcttgtcctttctgataccatgaaaacaggtttgaagagggaatttgatgaagtttttacaaagaaaatgattgagtctatgagccgtccttccatggagcttgttctctggaaacccctccctgaactcctttctgataagccaaagccatcctctaatactaagaactatacaggagagagccaagctaagcatgtagctgctggcactgccttccctcagagaactgaactgttttcggaacctcggccaacagggatgtctctttataatagtttggagacagctactagcacagaagaagagatggaactctagaaaccaatttctacactaaagttgtcaaatgttagaagaatcctgtgttcagttatgagactctttgcatagtatagggacttgaaagttttatgagacgggtgtaataatatctccacctgtgatttgggggtgggactcttattttgggtagccatttattgacttcacctttttgccaaggacgtttgtctcaagggaaaagcagttttctgtggggcttattaaaggaatgttggtttacattgtcttcaaagacaagtatagaagctgtatgtgtaagggtgacttaaatcatatgtcacattgtctaaactattcagacacttggagaatattctccttgaattaaaaaagatgattaaaaaaaaaaaaaaaaaaaaaaaaaaaaaaaaaaaaaaaaaaaaaaaaaaaaaaaaaaaaaaaagaaaaaaaaaaaaaaaaaaaaaaaaaaaaagaacaaaaaagaaaaaacataataaagaaaacatagaaagaaatagagcgcgcggcgccggcggcccaccagcacgcattcaacagcgcggccacacaacacctccactcacaccgcgcccccgcccggacaaccgaaccacgc

SEQ ID NO: 439299 - DNA, 3885 bp, Homo sapiens
ttctagaaggcgtgacgtggggtcgagagcgggatccgaggctggcgggttttggcagtagctgtggctgcggctgccgggcctggggacgcgggcggccgaggccgccgtcgcagcctcctcgtctcgccggctatggctgcgctcggccggcccttcagcggcctccctctgagcggcggctcggacttcctgcagccgccgcagccggccttccccggccgggccttcccgccgggggctgacggcgccgagttggccccgcggccgggacctcgcgcagtccctagcagtcccgctgggagtgcggcgcgcggacgtgtttctgttcactgtaaaaagaaacacaagcgagaggaggaggaggatgatgattgtccagtaagaaagaaaaggataactgaagcagagctctgtgctggtcctaatgactggattctttgtgcacatcaggatgtagaggggcatggagtaaatcccagtgttagtggcctttccatacctgggatattagatgttatttgtgaagaaatggatcagacaactggagaaccacagtgtgaagttgcccgaaggaagcttcaggagattgaggacaggataattgatgaagatgaagaagttgaagctgacagaaatgttaaccatctccccagtcttgtcctttctgataccatgaaaacaggtttgaagagggaatttgatgaagtttttacaaagaaaatgattgagtctatgagccgtccttccatggagcttgttctctggaaacccctccctgaactcctttctgataagccaaagccatcctctaatactaagaactatacaggagagagccaagctaagcatgtagctgctggcactgccttccctcagagaactgaactgttttcggaacctcggccaacagggatgtctctttataatagtttggagacagctactagcacagaagaagagatggaactctagaaaccaatttctacactaaagttgtcaaatgttagaagaatcctgtgttcagttatgagactctttgcatagtatagggacttgaaagttttatgagacgggtgtaataatatctccacctgtgatttgggggtgggactcttattttgggtagccatttattgacttcacctttttgccaaggacgtttgtctcaagggaaaagcagttttctgtggggcttattaaaggaatgttggtttacattgtcttcaaagacaagtatagaagctgtatgtgtaagggtgacttaaatcatatgtcacattgtctaaactattcagacacttggagaatattctccttgaattaaaaaagatgattaagaaggatgctcctacaactgtatcctgacagttaagtcacagcttaatgtgtagatatgagctgtttacagtggtgactatatataattggggagaagaagggaagagagcagcagtagcttaagcctgttgctaagaaatttaatttcttagcaacttgtaatttagttatcaattcaatatagctctgttgattaaatagccgatagtattgtggctctcctctttgactatgaaaatatagagaaagttttttctttaaggcttttttgccttgtgccactgttgctccttggtttcccttgcgtaattgataagcccagttattcagtaatgtttacaaattaattgactttgatagttaaaagattatgaggtaacccatctgcaatttgcctgtgggagaagcatcctttagttcatcttaaggaagtgctttatcagctaaacccaacattgataactttggtaatttttttaaaaagttatacttgtattagcaagtttttttttttttcccccaccgcaacctccatctcccgggttcaagcaattctcctgcctcaccctcccaagtagctgggattacaggtgcccacctccacgcccagctaatttttgtatttttaatagagaccggttttgccatgttggccaggctggtctcgaactcctgacctcaggtgatctgcccaccccagcctcccaaaatgctgggattacaggcgtgagccacggcacgcagccagcaagttgtttttaaatgttaatatagaaaacagtgaaggattagctgaaaatatatgagcaggtgacattgaggtttactgaaatagccaatttgactggtgcttagactattgtgcagtaaacctaaaaggtagtggagaattgcttcctgctagcaggaagccttcatcttcttgagtacccaaaccaggcttcaggtgtcctttgaggatagccaggtttgaaatttttagtttctcaggaagagctcttctatgtggcaggggctgatagggcaaaattgtaatggtataatgcccttccatcacacaacaggacaccaccccagttttgttttctgggtttcttccccctttgtaggaatcagataccttttgtagaaaaaaatggcttatgccacgtaaaggtgaatttttagaaaccaccttctaggcgtttttggaacccttactgaaatccctccccttgttacagatggcgtagaagtcacaagtctgttaattggactgttgcttctttgcctgttcctgctttctctttctgtctggatagtcaggaaaagatttaatgtttaatatttaaacaaaatatttaatgtctatacagtaaaattattcaaacttcaaaccagtattgaaagcagttggaaaccagctaatagtttcttaatctcagatttcgagatgaatgtaaactgtattcttttgaaatgtgcaagtgtttgattcatgccatttgataaacttctgccttgtagtcattgtttgatgggaccaacttgtaaagtatgagccttaaataaatctccatgctgaaaaatgtgttctaatgcaacacaaaaacatgaagtgactgcccagaggtagagttagtgtttaggtggaaagggagatgacagctttccaaagaaggacctaaaacacaccaagattgtcttctacaggaattgctgggcaggtctccgactaaaggtcttatgatgaaaaggaagaaacaagcccccaacacaaggctctgatactactggtaaatgtaggagagaattaagaatctgttaattaaaatccaaacagagcttatttcagtagtcaagttacctgacatgataattatttctgcaggataattgatgttttatgttcttttttggactttatcttcttgcaaaaatttctacaaaaattgttttcttcatccttgtggtgcttattcatctgagccgtctccacagtcccaatgcctctgctttttgttttacttttgtagcataaggtttttgcttttgctttgccttaagagttccctagggagttaccagggcttttcgttttgtgtagcttttgcagcatggatcaaacattggcttactgtgctaatgtgtgaagagaaaaaattctctaaagcaggtgagctttaatgaacaaatgtgtattttatctgagtttgagtagggtgcgttgtggattttgttttttgggttttttttttttttttgtaattatatgaagaaagtccagttctcataaatattgatcacttaaaaaacttactctttcttgaaaaggtacacatgtaaaatttaggaaaataactaaagtaggggctggaaccataagaagaatgtttatcagcacgttcatttattattttggatttggaacttggctttgtttttcaatagtgacaagaatggttcagttctaggaatgttctggaagatgctgttaattttactttaaaatgagaatctggtgttactgtattttatcgttttcaataaaacttcttaagtgtt

SEQ ID NO: 439300 - DNA, 3484 bp, Homo sapiens
ttctagaaggcgtgacgtggggtcgagagcgggatccgaggctggcgggttttggcagtagctgtggctgcggctgccgggcctggggacgcgggcggccgaggccgccgtcgcagcctcctcgtctcgccggctatggctgcgctcggccggcccttcagcggcctccctctgagcggcggctcggacttcctgcagccgccgcagccggccttccccggccgggccttcccgccgggggctgacggcgccgagttggccccgcggccgggacctcgcgcagtccctagcagtcccgctgggagtgcggcgcgcggacgtgtttctgttcactgtaaaaagaaacacaagcgagaggaggaggaggatgatgattgtccagtaagaaagaaaaggataactgaagcagagctctgtgctggtcctaatgactggattctttgtgcacatcaggatgtagaggggcatggagtaaatcccagtgttagtggcctttccatacctgggatattagatgttatttgtgaagaaatggatcagacaactggagaaccacagtgtgaagttgcccgaaggaagcttcaggagattgaggacaggataattgatgaagatgaagaagttgaagctgacagaaatgttaaccatctccccagtcttgtcctttctgataccatgaaaacaggtttgaagagggaatttgatgaagtttttacaaagaaaatgattgagtctatgagccgtccttccatggagcttgttctctggaaacccctccctgaactcctttctgataagccaaagccatcctctaatactaagaactatacaggagagagccaagctaagcatgtagctgctggcactgccttccctcagagaactgaactgttttcggaacctcggccaacagggatgtctctttataatagtttggagacagctactagcacagaagaagagatggaactctagaaaccaatttctacactaaagttgtcaaatgttagaagaatcctgtgttcagttatgagactctttgcatagtatagggacttgaaagttttatgagacgggtgtaataatatctccacctgtgatttgggggtgggactcttattttgggtagccatttattgacttcacctttttgccaaggacgtttgtctcaagggaaaagcagttttctgtggggcttattaaaggaatgttggtttacattgtcttcaaagacaagtatagaagctgtatgtgtaagggtgacttaaatcatatgtcacattgtctaaactattcagacacttggagaatattctccttgaattaaaaaagatgattaagaaggatgctcctacaactgtatcctgacagttaagtcacagcttaatgtgtagatatgagctgtttacagtggtgactatatataattggggagaagaagggaagagagcagcagtagcttaagcctgttgctaagaaatttaatttcttagcaacttgtaatttagttatcaattcaatatagctctgttgattaaatagccgatagtattgtggctctcctctttgactatgaaaatatagagaaagttttttctttaaggcttttttgccttgtgccactgttgctccttggtttcccttgcgtaattgataagcccagttattcagtaatgtttacaaattaattgactttgatagttaaaagattatgaggtaacccatctgcaatttgcctgtgggagaagcatcctttagttcatcttaaggaagtgctttatcagctaaacccaacattgataactttggtaatttttttaaaaagttatacttgtattagcaagtttttttttttttcccccaccgcaacctccatctcccgggttcaagcaattctcctgcctcaccctcccaagtagctgggattacaggtgcccacctccacgcccagctaatttttgtatttttaatagagaccggttttgccatgttggccaggctggtctcgaactcctgacctcaggtgatctgcccaccccagcctcccaaaatgctgggattacaggcgtgagccacggcacgcagccagcaagttgtttttaaatgttaatatagaaaacagtgaaggattagctgaaaatatatgagcaggtgacattgaggtttactgaaatagccaatttgactggtgcttagactattgtgcagtaaacctaaaaggtagtggagaattgcttcctgctagcaggaagccttcatcttcttgagtacccaaaccaggcttcaggtgtcctttgaggatagccaggtttgaaatttttagtttctcaggaagagctcttctatgtggcaggggctgatagggcaaaataaaatgacaatttctttattgctacagagtatcctctataagttattaaacgagtgtaatggtataatgcccttccatcacacaacaggacaccaccccagttttgttttctgggtttcttccccctttgtaggaatcagataccttttgtagaaaaaaatggcttatgccacgtaaaggtgaatttttagaaaccaccttctaggcgtttttggaacccttactgaaatccctccccttgttacagatggcgtagaagtcacaagtctgttaattggactgttgcttctttgcctgttcctgctttctctttctgtctggatagtcaggaaaagatttaatgtttaatatttaaacaaaatatttaatgtctatacagtaaaattattcaaacttcaaaccagtattgaaagcagttggaaaccagctaatagtttcttaatctcagatttcgagatgaatgtaaactgtattcttttgaaatgtgcaagtgtttgattcatgccatttgataaacttctgccttgtagtcattgtttgatgggaccaacttgtaaagtatgagccttaaataaatctccatgctgaaaaatgtgttctaatgcaacacaaaaacatgaagtgactgcccagaggtagagttagtgtttaggtggaaagggagatgacagctttccaaagaaggacctaaaacacaccaagattgtcttctacaggaattgctgggcaggtctccgactaaaggtcttatgatgaaaaggaagaaacaagcccccaacacaaggctctgatactactggtaaatgtaggagagaattaagaatctgttaattaaaatccaaacagagcttatttcagtagtcaagttacctgacatgataattatttctgcaggataattgatgttttatgttcttttttggactttatcttcttgcaaaaatttctacaaaaattgttttcttccagaacattcctagaactgaaccattcttgtcactattgaaaaacaaagccaagttccaaatccaaaataataaatgaacgtgctgataaacattcttcttatggttccagcccctactttagttattttcctaaattttacgtcga

SEQ ID NO: 439301 - DNA, 881 bp, Homo sapiens
  misc_feature (664)..(664): n is a, c, g, or t
taaactgtagagatagcatggcaagacatgtacagatgcaaccttttacatttatatactcttttacatttatataaatgtaaaagagtgtataaactgtagagatagcattggcaagacattgtacagatgcaaccttttacacaacatcattgtgtaatttgtaaagattcacgtgtagttctttattatagtgattttgggctttgtacccactgaatgccattttttgtgtttttaaattattttctttatcttgttacaaaaactgagatgtggggttttttttttttcagttcacttatcattagaatgtctgaacttttatgtaacatttttgtgtgcatctctcaatgctaacaccacatgtttgcctatgacaagtttatagagtgaaaggtatcttctgggttgaaataattcacaaattggtgaatgtcatcttgcaacacaccctgtacagtcttccttaaaggaacactacagtatatttttagtatctacatgctgaatgactgaatacagacctaagcacagcagtggtcctggtacagtatttaagtgtcggcatacacaggcgtaatccctgtataaagtagtgccaaactgatttcagttgtgtaactagtttaaaacccaataaatggattctttttaaaaaaanaaacacacagacaaaacaagccaaacaaataaacaagagcaaaaagagacgcagacacaacacacgacacacgcagaacaagcagcaaaacaaacaagagcagacaaagaaaaaacaaggagggggggcggcgcacaaataaaacacacgagaggaggacacaagacagcacacacgagagaacattacgaagcagacgacgagacaccgcgacgcg

SEQ ID NO: 439302 - DNA, 580 bp, Homo sapiens
actcatctccccaaacttagcatctagttagagttcattaaaagtgccttctaatgctttctatccatgaagctctaatatttttttctatgcgtatgataaatatgaactcttactatataggaatatggttgtttatgctggtgtggaagagcagcctaagcttggcagaagcagggaggatatgacagaggtaagcattccatttcaccatggttcaaatgcatcttgttttgggccactgatttatctcaacctcacttcagttcttcttcttcttttttttcttaatacaatttgtgtttttctgtatagcactgcataaatattggtgactatgtaatccattctcctcaaccccttcatactagtgccagttgacatagatgttgatgtatctaagactgagttactaccccattcagccctccgttggctactgctttatgtaatttgctgctcatttcttgtatcagttctgatacaagcgttttgaaggaaaagttaatgactgatttttagttttctattgcatataaattatgggatctccgtaaatgcatgttggtagatttcagtt

SEQ ID NO: 439303 - DNA, 399 bp, Homo sapiens
atttttaatgttactcgactaactttataagtatctgctcaaagagatgctattgttctttttgataattgttgctggccttaaagtgcctgggagggttatcgaactctcatcaattggttgtgaaagctaatttctgatggaaacacccagattttggtctgtctgctgcttgtgttttgatgtaaaagtattttagtaaaaattatttgaagttttaagccactgtgttgataaatatggtgtgtggtcattgctgcctaccttgtaaagactgaaaacaatttgttcttttcccagtgtaacctttttttccctttagttcataccagagacagcgaaatgagggcaaaggaaagagtagattaaggagtttaggtagttaatccttgcagttcc

SEQ ID NO: 439304 - DNA, 6451 bp, Homo sapiens
accgtagaggatcccctagtgtggaaagcgagtgagaggtgtcggggatggttgctctttgtccagagggctggacccttagctctgtcctcgctggagctgtccccgagcggtgatcccagggtcgtgacagagcctgtgaagtactcaagccgtcctccctgccactttcctacgggacttcccgggtctttaccatccctctacgtcgctccctagaggtagttggagagctaggggtaccgagcgcgagttcggagtcggggtcgtgggggttcgctgtgtagaaatggattgccgtaaacaagctgctgccctacgcggagcggctagacgccgagtccgacttgcagctggcccagatcaaatgcaacctgggccgggccgtgcagctccaagagctgtggcccgggggcctcttctggaccaggaaactctccacatatattcgactttatgggagaaaatttagcaaagaagatcatgttctttttattaagttattgtatgagctggtatcaattccaaaactggaaatcagcatgatgcagggatttgcccgccttttgatcaacttgttaaagaaaaaggaacttctttcaagagctgatttggagttaccctggagaccactttatgacatggtagaaagaatattatattccaagacagagcacctaggattaaattggtttcctaattctgtagaaaatattctcaaaacactcgtgaaaagctgccgaccatattttccagcagatgccaccgctgagatgctagaagaatggcgacctttaatgtgcccttttgatgtaaccatgcaaaaggccatcacttattttgaaatatttcttcctacctcccttcctccagaacttcatcataaaggttttaaactttggtttgatgaattaattggcctttgggtttcagtgcaaaatctcccacaatgggaggggcaactagtaaatctctttgctcgattggctacagataatatagggtacatagattgggatccatatgtaccaaagatatttacaagaattctgagaagcttgaacctcccagtgggaagcagtcaagtgttagtcccaagatttttaacaaatgcttatgatataggacatgctgtaatatggatcaccgccatgatgggtggaccaagtaagctagtgcaaaaacacttagctggtttgtttaacagcatcacatctttttaccatccttcaaataatgggcgctggctgaacaagttaatgaaactacttcagcggttgccaaacagtgttgttagaagattgcatcgtgaaagatacaagaagccctcttggttaactcctgtgcctgatagccacaagcttactgatcaagatgttacagactttgtacaatgcattattcagcctgtcctcttggctatgtttagcaaaaccggtagtctagaagcagcccaggctttgcagaatcttgcactcatgagacctgaattggtaataccccctgtacttgaaagaacatatcctgcattagagacattaacagaacctcaccagctcacagctactttaagttgtgtaattggagtagcccgcagtttggtatcaggaggcagatggtttcctgaaggtcctacacatatgctacctctgttgatgagagcattgcctggggtggatccaaatgactttagtaaatgcatgatcacattccagttcatagcaacattttctactctggtgcctttagtagattgttcatctgtactacaagaaagaaatgacctcacagaagtggaacgagaactttgttcagccacagctgaatttgaggatttcgtcttacagtttatggacagatgttttggacttatagaaagtagcacattggagcaaacaagagaagagacagaaactgagaaaatgacacacttggagagtttggtcgaattaggtctgtcttctacgtttagtacaatcctcacccaatgttccaaagaaatatttatggtggcccttcagaaggtttttaatttttctacttcacatatatttgaaacaagagtagcaggtcgcatggtggcagacatgtgccgcgctgctgtaaagtgctgcccagaagaatctttgaagctctttgttccccactgctgcagtgttataactcagcttacaatgaatgatgatgtattaaatgatgaagagctagacaaggaattactatggaatcttcaacttttgtctgagattactcgagtggatggaaggaagttgcttctttatagggagcagcttgtaaagattctccaaagaaccctacatttaacctgtaagcagggttacactctgtcttgtaaccttttgcatcatcttctccgttctaccacacttatctaccctacagaatactgcagtgtgccaggtggctttgacaagcctccttctgaatactttcctatcaaggactggggcaaacccggggacttgtggaatctgggaatccagtggcatgttccttcttcagaagaagtgtcttttgccttttatcttttggactcctttcttcagcctgagctcgtcaaactccagcattgtggggatggaaaacttgaaatgtctagagatgatattctacagagtctgactatagtgcacaactgtttaattggctctggaaacctcctacctccgttgaaaggagagccagttactaacttagtaccaagtatggtgtccttggaagagacaaagttgtatactggacttgaatatgatctgtctcgagagaaccaccgagaagtaattgctacagttataaggaaacttcttaaccacatacttgataattcagaagatgatactaagtcattgtttcttattataaagattattggagaccttttacaattccaaggatctcacaagcatgaatttgactcccgatggaaaagcttcaacttagtaaagaaatcaatggaaaatcggctccatgggaaaaaacaacatatcagagcactgttgattgatagagtaatgttacagcatgagctacggacactaactgttgagggttgtgaatacaaaaagatacatcaagatatgatcagagatcttcttcgtttatctacaagttcatacagtcaggtgagaaataaggctcagcaaacattttttgctgccttgggagcatataacttctgttgcagagatatcattcccttggttttggagttcttaaggcctgatagacaaggtgttacacagcaacaattcaagggtgccttgtactgtctccttggaaatcacagtggtgtgtgcttggcaaaccttcatgattgggactgtattgtacagacgtggccagcgattgtttcttcagggcttagccaagcaatgtccctggaaaagccatcaatagtgagattgtttgatgatcttgcagaaaagattcataggcagtatgaaacaattggcttggacttcacaattccaaagtcatgtgttgaaatagcggaattacttcaacagtcaaaaaacccctctatcaaccagatattgcttagcccagaaaaaattaaggaaggaattaaacgccaacaggaaaagaatgccgatgccctaaggaactatgaaaatttggtagacaccttgctagatggtgtggagcaaagaaacctgccctggaaatttgaacatataggcattgggcttctgtctctactgctgagagatgaccgagtgttgcctcttcgtgccatacggttttttgttgagaatctcaaccatgatgcaattgtagttcgaaagatggctatctcagctgttgctggtatccttaaacagctaaaaagaacccacaaaaagctgaccattaacccctgtgaaatcagtggatgccctaaacccacccaaattattgctggtgataggcctgataatcattggttgcattatgacagcaaaactataccaagaactaaaaaagaatgggagtcaagttgctttgtggaaaaaactcactggggatactacacctggccaaagaatatggttgtttatgctggtgtggaagagcagcctaagcttggcagaagcagggaggatatgacagaggcagaacagattatatttgatcatttttctgatcctaaatttgttgagcagttaattacttttctatcattagaagacagaaaaggaaaagataagtttaatccacgacgtttttgcctctttaagggtatattcaggaattttgatgatgccttcctgccagttctgaagccccatttagaacatttggttgcagattcacatgaaagcacccagcgatgtgttgcagaaattatagctggtttaatcagaggttctaagcactggacatttgaaaaggtggagaagctttgggagcttctgtgccctctgcttagaacagcactgtccaatattaccgtagaaacttataatgactggggagcttgtatagcaacatcctgtgaaagcagagatccccggaaacttcactggctttttgaactgctgttggaatcaccattgagtggtgaaggaggatcctttgtagatgcatgtcgactttatgtactacaaggtggccttgcccagcaagaatggagagtgcctgaactattgcacagactactgaagtacttggaacccaaactcacccaggtttacaaaaatgtcagagaaagaataggaagtgtgctgacctacatattcatgatagatgtatctttgccaaataccacaccaaccatatcgcctcatgtccctgagtttactgctcgaattctggagaaattgaaacctctcatggatgtggatgaagaaattcagaaccatgttatggaagaaaatggaattggtgaagaagatgagcgaactcagggcattaaactcttgaaaaccatattgaaatggctgatggcaagtgcaggaagatccttttctacagcagttacagaacaacttcagcttctacctttgtttttcaagattgccccagtggaaaatgacaatagctacgatgaactgaaaagagatgcaaagttatgtttatcattaatgtctcaggggttgctttaccctcatcaagtgcctttggtacttcaggtgctaaaacaaacagcaagaagcagttcttggcatgcacgatacacagtactgacctacctccagaccatggtattttataacctctttattttcctaaacaatgaagatgcagttaaagatatcaggtggctggttataagtcttttggaggacgaacaactggaggttcgagaaatggctgctactaccttaagcggtctgctacagtgtaactttcttaccatggacagtcctatgcagattcattttgagcaactttgcaaaacaaaactacctaagaaaagaaagcgagaccctggttctgtaggagataccattccttctgcagagttggtcaaacgccatgctggggtgctaggacttggtgcatgtgttctttctagtccttacgatgttcccacctggatgccccagctcctcatgaatctcagtgcacatctaaatgatcctcagcctattgagatgactgtaaaaaaaaccttatccaatttccgaaggactcaccatgacaactggcaggaacataaacagcaattcactgatgaccaactgcttgttctcaccgatcttcttgtgtcaccatgctattatgcatagaaagatgactagtcctcacttcaggctcttttcatcaaaaattccacaccctcaggtaccatctgtggtggctctctgcaagttttaaaactgcctctgctgagctctcatcattttggtggtttctgtgttagatctcgttagtctgcattccacagcttctcagttgccatttgatttcccaacttgtccggaagtgtttccagaatactgatcactttttttttttgaggcatctgacaaagtcacaaagtctcagactagaaataattacccagtatgatcatggcatccaagaccagagtctcagaactcattaagaaacagtttacttggaatggagaatacccatctgtaatacaggtcctgtcatttcattcatctcaaattattttgaattcttcccaaatggctgctggatttaggtggtaataggggctgtgggccataaatctgaagccttgagaaccttgggtctggagagccatgaagagggaaggaaaagagggcaagtcctgaacctaaccaatgacctgatggattgctcgaccaagacacagaagtgaagtctgtgtctgtgcacttcccacagactggagtttttggtgctgaatagagccagttgctaaaaaattgggggtttggtgaagaaatctgattgttgtgtgtattcaatgtgtgattttaaaaataaacagcaacaacaataaaaaccctga

SEQ ID NO: 439305 - DNA, 6431 bp, Homo sapiens
  misc_feature (57)..(57): n is a, c, g, or t
  misc_feature (76)..(76): n is a, c, g, or t
taggcggaagtgacgtgagaggttcggggatggttgcctttgtccagagggctgganccttagctctgtcctcgcnggagctgtcccgagcggtgatcccagggtcgtgacagagcctgtgaagtactcaagccgtcctccctgccactttcctacgggacttcccgggtctttaccatccctctacgtcgctccctagggagagtcggagagcccccggagccgggcgggcgtcccgagccgggcccgcggggcttcgtcccgcagaaggagatcgtctacaacaagctgctgccctacgcggagcggctagacgccgagtccgacttgcagctggcccagatcaaatgcaacctgggccgggccgtgcagctccaagagctgtggcccgggggcctcttctggaccaggaaactctccacatatattcgactttatgggagaaaatttagcaaagaagatcatgttctttttattaagttattgtatgagctggtatcaattccaaaactggaaatcagcatgatgcagggatttgcccgccttttgatcaacttgttaaagaaaaaggaacttctttcaagagctgatttggagttaccctggagaccactttatgacatggtagaaagaatattatattccaagacagagcacctaggattaaattggtttcctaattctgtagaaaatattctcaaaacactcgtgaaaagctgccgaccatattttccagcagatgccaccgctgagatgctagaagaatggcgacctttaatgtgcccttttgatgtaaccatgcaaaaggccatcacttattttgaaatatttcttcctacctcccttcctccagaacttcatcataaaggttttaaactttggtttgatgaattaattggcctttgggtttcagtgcaaaatctcccacaatgggaggggcaactagtaaatctctttgctcgattggctacagataatatagggtacatagattgggatccatatgtaccaaagatatttacaagaattctgagaagcttgaacctcccagtgggaagcagtcaagtgttagtcccaagatttttaacaaatgcttatgatataggacatgctgtaatatggatcaccgccatgatgggtggaccaagtaagctagtgcaaaaacacttagctggtttgtttaacagcatcacatctttttaccatccttcaaataatgggcgctggctgaacaagttaatgaaactacttcagcggttgccaaacagtgttgttagaagattgcatcgtgaaagatacaagaagccctcttggttaactcctgtgcctgatagccacaagcttactgatcaagatgttacagactttgtacaatgcattattcagcctgtcctcttggctatgtttagcaaaaccggtagtctagaagcagcccaggctttgcagaatcttgcactcatgagacctgaattggtaataccccctgtacttgaaagaacatatcctgcattagagacattaacagaacctcaccagctcacagctactttaagttgtgtaattggagtagcccgcagtttggtatcaggaggcagatggtttcctgaaggtcctacacatatgctacctctgttgatgagagcattgcctggggtggatccaaatgactttagtaaatgcatgatcacattccagttcatagcaacattttctactctggtgcctttagtagattgttcatctgtactacaagaaagaaatgacctcacagaagtggaacgagaactttgttcagccacagctgaatttgaggatttcgtcttacagtttatggacagatgttttggacttatagaaagtagcacattggagcaaacaagagaagagacagaaactgagaaaatgacacacttggagagtttggtcgaattaggtctgtcttctacgtttagtacaatcctcacccaatgttccaaagaaatatttatggtggcccttcagaaggtttttaatttttctacttcacatatatttgaaacaagagtagcaggtcgcatggtggcagacatgtgccgcgctgctgtaaagtgctgcccagaagaatctttgaagctctttgttccccactgctgcagtgttataactcagcttacaatgaatgatgatgtattaaatgatgaagagctagacaaggaattactatggaatcttcaacttttgtctgagattactcgagtggatggaaggaagttgcttctttatagggagcagcttgtaaagattctccaaagaaccctacatttaacctgtaagcagggttacactctgtcttgtaaccttttgcatcatcttctccgttctaccacacttatctaccctacagaatactgcagtgtgccaggtggctttgacaagcctccttctgaatactttcctatcaaggactggggcaaacccggggacttgtggaatctgggaatccagtggcatgttccttcttcagaagaagtgtcttttgccttttatcttttggactcctttcttcagcctgagctcgtcaaactccagcattgtggggatggaaaacttgaaatgtctagagatgatattctacagagtctgactatagtgcacaactgtttaattggctctggaaacctcctacctccgttgaaaggagagccagttactaacttagtaccaagtatggtgtccttggaagagacaaagttgtatactggacttgaatatgatctgtctcgagagaaccaccgagaagtaattgctacagttataaggaaacttcttaaccacatacttgataattcagaagatgatactaagtcattgtttcttattataaagattattggagaccttttacaattccaaggatctcacaagcatgaatttgactcccgatggaaaagcttcaacttagtaaagaaatcaatggaaaatcggctccatgggaaaaaacaacatatcagagcactgttgattgatagagtaatgttacagcatgagctacggacactaactgttgagggttgtgaatacaaaaagatacatcaagatatgatcagagatcttcttcgtttatctacaagttcatacagtcaggtgagaaataaggctcagcaaacattttttgctgccttgggagcatataacttctgttgcagagatatcattcccttggttttggagttcttaaggcctgatagacaaggtgttacacagcaacaattcaagggtgccttgtactgtctccttggaaatcacagtggtgtgtgcttggcaaaccttcatgattgggactgtattgtacagacgtggccagcgattgtttcttcagggcttagccaagcaatgtccctggaaaagccatcaatagtgagattgtttgatgatcttgcagaaaagattcataggcagtatgaaacaattggcttggacttcacaattccaaagtcatgtgttgaaatagcggaattacttcaacagtcaaaaaacccctctatcaaccagatattgcttagcccagaaaaaattaaggaaggaattaaacgccaacaggaaaagaatgccgatgccctaaggaactatgaaaatttggtagacaccttgctagatggtgtggagcaaagaaacctgccctggaaatttgaacatataggcattgggcttctgtctctactgctgagagatgaccgagtgttgcctcttcgtgccatacggttttttgttgagaatctcaaccatgatgcaattgtagttcgaaagatggctatctcagctgttgctggtatccttaaacagctaaaaagaacccacaaaaagctgaccattaacccctgtgaaatcagtggatgccctaaacccacccaaattattgctggtgataggcctgataatcattggttgcattatgacagcaaaactataccaagaactaaaaaagaatgggagtcaagttgctttgtggaaaaaactcactggggatactacacctggccaaagaatatggttgtttatgctggtgtggaagagcagcctaagcttggcagaagcagggaggatatgacagaggcagaacagattatatttgatcatttttctgatcctaaatttgttgagcagttaattacttttctatcattagaagacagaaaaggaaaagataagtttaatccacgacgtttttgcctctttaagggtatattcaggaattttgatgatgccttcctgccagttctgaagccccatttagaacatttggttgcagattcacatgaaagcacccagcgatgtgttgcagaaattatagctggtttaatcagaggttctaagcactggacatttgaaaaggtggagaagctttgggagcttctgtgccctctgcttagaacagcactgtccaatattaccgtagaaacttataatgactggggagcttgtatagcaacatcctgtgaaagcagagatccccggaaacttcactggctttttgaactgctgttggaatcaccattgagtggtgaaggaggatcctttgtagatgcatgtcgactttatgtactacaaggtggccttgcccagcaagaatggagagtgcctgaactattgcacagactactgaagtacttggaacccaaactcacccaggtttacaaaaatgtcagagaaagaataggaagtgtgctgacctacatattcatgatagatgtatctttgccaaataccacaccaaccatatcgcctcatgtccctgagtttactgctcgaattctggagaaattgaaacctctcatggatgtggatgaagaaattcagaaccatgttatggaagaaaatggaattggtgaagaagatgagcgaactcagggcattaaactcttgaaaaccatattgaaatggctgatggcaagtgcaggaagatccttttctacagcagttacagaacaacttcagcttctacctttgtttttcaagattgccccagtggaaaatgacaatagctacgatgaactgaaaagagatgcaaagttatgtttatcattaatgtctcaggggttgctttaccctcatcaagtgcctttggtacttcaggtgctaaaacaaacagcaagaagcagttcttggcatgcacgatacacagtactgacctacctccagaccatggtattttataacctctttattttcctaaacaatgaagatgcagttaaagatatcaggtggctggttataagtcttttggaggacgaacaactggaggttcgagaaatggctgctactaccttaagcggtctgctacagtgtaactttcttaccatggacagtcctatgcagattcattttgagcaactttgcaaaacaaaactacctaagaaaagaaagcgagaccctggttctgtaggagataccattccttctgcagagttggtcaaacgccatgctggggtgctaggacttggtgcatgtgttctttctagtccttacgatgttcccacctggatgccccagctcctcatgaatctcagtgcacatctaaatgatcctcagcctattgagatgactgtaaaaaaaaccttatccaatttccgaaggactcaccatgacaactggcaggaacataaacagcaattcactgatgaccaactgcttgttctcaccgatcttcttgtgtcaccatgctattatgcatagaaagatgactagtcctcacttcaggctcttttcatcaaaaattccacaccctcaggtaccatctgtggtggctctctgcaagttttaaaactgcctctgctgagctctcatcattttggtggtttctgtgttagatctcgttagtctgcattccacagcttctcagttgccatttgatttcccaacttgtccggaagtgtttccagaatactgatcactttttttttttgaggcatctgacaaagtcacaaagtctcagactagaaataattacccagtatgatcatggcatccaagaccagagtctcagaactcattaagaaacagtttacttggaatggagaatacccatctgtaatacaggtcctgtcatttcattcatctcaaattattttgaattcttcccaaatggctgctggatttaggtggtaataggggctgtgggccataaatctgaagccttgagaaccttgggtctggagagccatgaagagggaaggaaaagagggcaagtcctgaacctaaccaatgacctgatggattgctcgaccaagacacagaagtgaagtctgtgtctgtgcacttcccacagactggagtttttggtgctgaatagagccagttgctaaaaaattgggggtttggtgaagaaatctgattgttgtgtgtattcaatgtgtgattttaaaaataaacagcaacaacaataaaaaccctga

SEQ ID NO: 439306 - DNA, 4399 bp, Homo sapiens
gcttaagctcagaaaatgtgtttgatttcaaaaaacaattaattattagaatgcagttaaagtgacaatcctaaaattaattaaagtcatttagagaaacactatgttagtggccaaacattgaactttgcattaatgattggttcttgttcttttaaccgaaatatcttcaactattttttccctccttttagattactcgagtggatggaaggaagttgcttctttatagggagcagcttgtaaagattctccaaagaaccctacatttaacctgtaagcagggttacactctgtcttgtaaccttttgcatcatcttctccgttctaccacacttatctaccctacagaatactgcagtgtgccaggtggctttgacaagcctccttctgaatactttcctatcaaggactggggcaaacccggggacttgtggaatctgggaatccagtggcatgttccttcttcagaagaagtgtcttttgccttttatcttttggactcctttcttcagcctgagctcgtcaaactccagcattgtggggatggaaaacttgaaatgtctagagatgatattctacagagtctgactatagtgcacaactgtttaattggctctggaaacctcctacctccgttgaaaggagagccagttactaacttagtaccaagtatggtgtccttggaagagacaaagttgtatactggacttgaatatgatctgtctcgagagaaccaccgagaagtaattgctacagttataaggaaacttcttaaccacatacttgataattcagaagatgatactaagtcattgtttcttattataaagattattggagaccttttacaattccaaggatctcacaagcatgaatttgactcccgatggaaaagcttcaacttagtaaagaaatcaatggaaaatcggctccatgggaaaaaacaacatatcagagcactgttgattgatagagtaatgttacagcatgagctacggacactaactgttgagggttgtgaatacaaaaagatacatcaagatatgatcagagatcttcttcgtttatctacaagttcatacagtcaggtgagaaataaggctcagcaaacattttttgctgccttgggagcatataacttctgttgcagagatatcattcccttggttttggagttcttaaggcctgatagacaaggtgttacacagcaacaattcaagggtgccttgtactgtctccttggaaatcacagtggtgtgtgcttggcaaaccttcatgattgggactgtattgtacagacgtggccagcgattgtttcttcagggcttagccaagcaatgtccctggaaaagccatcaatagtgagattgtttgatgatcttgcagaaaagattcataggcagtatgaaacaattggcttggacttcacaattccaaagtcatgtgttgaaatagcggaattacttcaacagtcaaaaaacccctctatcaaccagatattgcttagcccagaaaaaattaaggaaggaattaaacgccaacaggaaaagaatgccgatgccctaaggaactatgaaaatttggtagacaccttgctagatggtgtggagcaaagaaacctgccctggaaatttgaacatataggcattgggcttctgtctctactgctgagagatgaccgagtgttgcctcttcgtgccatacggttttttgttgagaatctcaaccatgatgcaattgtagttcgaaagatggctatctcagctgttgctggtatccttaaacagctaaaaagaacccacaaaaagctgaccattaacccctgtgaaatcagtggatgccctaaacccacccaaattattgctggtgataggcctgataatcattggttgcattatgacagcaaaactataccaagaactaaaaaagaatgggagtcaagttgctttgtggaaaaaactcactggggatactacacctggccaaagaatatggttgtttatgctggtgtggaagagcagcctaagcttggcagaagcagggaggatatgacagaggcagaacagattatatttgatcatttttctgatcctaaatttgttgagcagttaattacttttctatcattagaagacagaaaaggaaaagataagtttaatccacgacgtttttgcctctttaagggtatattcaggaattttgatgatgccttcctgccagttctgaagccccatttagaacatttggttgcagattcacatgaaagcacccagcgatgtgttgcagaaattatagctggtttaatcagaggttctaagcactggacatttgaaaaggtggagaagctttgggagcttctgtgccctctgcttagaacagcactgtccaatattaccgtagaaacttataatgactggggagcttgtatagcaacatcctgtgaaagcagagatccccggaaacttcactggctttttgaactgctgttggaatcaccattgagtggtgaaggaggatcctttgtagatgcatgtcgactttatgtactacaaggtggccttgcccagcaagaatggagagtgcctgaactattgcacagactactgaagtacttggaacccaaactcacccaggtttacaaaaatgtcagagaaagaataggaagtgtgctgacctacatattcatgatagatgtatctttgccaaataccacaccaaccatatcgcctcatgtccctgagtttactgctcgaattctggagaaattgaaacctctcatggatgtggatgaagaaattcagaaccatgttatggaagaaaatggaattggtgaagaagatgagcgaactcagggcattaaactcttgaaaaccatattgaaatggctgatggcaagtgcaggaagatccttttctacagcagttacagaacaacttcagcttctacctttgtttttcaagattgccccagtggaaaatgacaatagctacgatgaactgaaaagagatgcaaagttatgtttatcattaatgtctcaggggttgctttaccctcatcaagtgcctttggtacttcaggtgctaaaacaaacagcaagaagcagttcttggcatgcacgatacacagtactgacctacctccagaccatggtattttataacctctttattttcctaaacaatgaagatgcagttaaagatatcaggtggctggttataagtcttttggaggacgaacaactggaggttcgagaaatggctgctactaccttaagcggtctgctacagtgtaactttcttaccatggacagtcctatgcagattcattttgagcaactttgcaaaacaaaactacctaagaaaagaaagcgagaccctggttctgtaggagataccattccttctgcagagttggtcaaacgccatgctggggtgctaggacttggtgcatgtgttctttctagtccttacgatgttcccacctggatgccccagctcctcatgaatctcagtgcacatctaaatgatcctcagcctattgagatgactgtaaaaaaaaccttatccaatttccgaaggactcaccatgacaactggcaggaacataaacagcaattcactgatgaccaactgcttgttctcaccgatcttcttgtgtcaccatgctattatgcatagaaagatgactagtcctcacttcaggctcttttcatcaaaaattccacaccctcaggtaccatctgtggtggctctctgcaagttttaaaactgcctctgctgagctctcatcattttggtggtttctgtgttagatctcgttagtctgcattccacagcttctcagttgccatttgatttcccaacttgtccggaagtgtttccagaatactgatcactttttttttttgaggcatctgacaaagtcacaaagtctcagactagaaataattacccagtatgatcatggcatccaagaccagagtctcagaactcattaagaaacagtttacttggaatggagaatacccatctgtaatacaggtcctgtcatttcattcatctcaaattattttgaattcttcccaaatggctgctggatttaggtggtaataggggctgtgggccataaatctgaagccttgagaaccttgggtctggagagccatgaagagggaaggaaaagagggcaagtcctgaacctaaccaatgacctgatggattgctcgaccaagacacagaagtgaagtctgtgtctgtgcacttcccacagactggagtttttggtgctgaatagagccagttgctaaaaaattgggggtttggtgaagaaatctgattgttgtgtgtattcaatgtgtgattttaaaaataaacagcaacaacaataaaaaccctga

SEQ ID NO: 439307 - DNA, 6407 bp, Homo sapiens
accgtagaggatcccctagtgtggaaagcgagtgagaggtgtcggggatggttgctctttgtccagagggctggacccttagctctgtcctcgctggagctgtccccgagcggtgatcccagggtcgtgacagagcctgtgaagtactcaagccgtcctccctgccactttcctacgggacttcccgggtctttaccatccctctacgtcgctccctagaggtagttggagagctaggggtaccgagcgcgagttcggagtcggggtcgtgggggttcgctgtgtagaaatggattgccgtaaacaagctgctgccctacgcggagcggctagacgccgagtccgacttgcagctggcccagatcaaatgcaacctgggccgggccgtgcagctccaagagctgtggcccgggggcctcttctggaccaggaaactctccacatatattcgactttatgggagaaaatttagcaaagaagatcatgttctttttattaagttattgtatgagctggtatcaattccaaaactggaaatcagcatgatgcagggatttgcccgccttttgatcaacttgttaaagaaaaaggaacttctttcaagagctgatttggagttaccctggagaccactttatgacatggtagaaagaatattatattccaagacagagcacctaggattaaattggtttcctaattctgtagaaaatattctcaaaacactcgtgaaaagctgccgaccatattttccagcagatgccaccgctgagatgctagaagaatggcgacctttaatgtgcccttttgatgtaaccatgcaaaaggccatcacttattttgaaatatttcttcctacctcccttcctccagaacttcatcataaaggttttaaactttggtttgatgaattaattggcctttgggtttcagtgcaaaatctcccacaatgggaggggcaactagtaaatctctttgctcgattggctacagataatatagggtacatagattgggatccatatgtaccaaagatatttacaagaattctgagaagcttgaacctcccagtgggaagcagtcaagtgttagtcccaagatttttaacaaatgcttatgatataggacatgctgtaatatggatcaccgccatgatgggtggaccaagtaagctagtgcaaaaacacttagctggtttgtttaacagcatcacatctttttaccatccttcaaataatgggcgctggctgaacaagttaatgaaactacttcagcggttgccaaacagtgttgttagaagattgcatcgtgaaagatacaagaagccctcttggttaactcctgtgcctgatagccacaagcttactgatcaagatgttacagactttgtacaatgcattattcagcctgtcctcttggctatgtttagcaaaaccggtagtctagaagcagcccaggctttgcagaatcttgcactcatgagacctgaattggtaataccccctgtacttgaaagaacatatcctgcattagagacattaacagaacctcaccagctcacagctactttaagttgtgtaattggagtagcccgcagtttggtatcaggaggcagatggtttcctgaaggtcctacacatatgctacctctgttgatgagagcattgcctggggtggatccaaatgactttagtaaatgcatgatcacattccagttcatagcaacattttctactctggtgcctttagtagattgttcatctgtactacaagaaagaaatgacctcacagaagtggaacgagaactttgttcagccacagctgaatttgaggatttcgtcttacagtttatggacagatgttttggacttatagaaagtagcacattggagcaaacaagagaagagacagaaactgagaaaatgacacacttggagagtttggtcgaattaggtctgtcttctacgtttagtacaatcctcacccaatgttccaaagaaatatttatggtggcccttcagaaggtttttaatttttctacttcacatatatttgaaacaagagtagcaggtcgcatggtggcagacatgtgccgcgctgctgtaaagtgctgcccagaagaatctttgaagctctttgttccccactgctgcagtgttataactcagcttacaatgaatgatgatgtattaaatgatgaagagctagacaaggaattactatggaatcttcaacttttgtctgagattactcgagtggatggaaggaagttgcttctttatagggagcagcttgtaaagattctccaaagaaccctacatttaacctgtaagcagggttacactctgtcttgtaaccttttgcatcatcttctccgttctaccacacttatctaccctacagaatactgcagtgtgccaggtggctttgacaagcctccttctgaatactttcctatcaaggactggggcaaacccggggacttgtggaatctgggaatccagtggcatgttccttcttcagaagaagtgtcttttgccttttatcttttggactcctttcttcagcctgagctcgtcaaactccagcattgtggggatggaaaacttgaaatgtctagagatgatattctacagagtctgactatagtgcacaactgtttaattggctctggaaacctcctacctccgttgaaaggagagccagttactaacttagtaccaagtatggtgtccttggaagagacaaagttgtatactggacttgaatatgatctgtctcgagagaaccaccgagaagtaattgctacagttataaggaaacttcttaaccacatacttgataattcagaagatgatactaagtcattgtttcttattataaagattattggagaccttttacaattccaaggatctcacaagcatgaatttgactcccgatggaaaagcttcaacttagtaaagaaatcaatggaaaatcggctccatgggaaaaaacaacatatcagagcactgttgattgatagagtaatgttacagcatgagctacggacactaactgttgagggttgtgaatacaaaaagatacatcaagatatgatcagagatcttcttcgtttatctacaagttcatacagtcaggtgagaaataaggctcagcaaacattttttgctgccttgggagcatataacttctgttgcagagatatcattcccttggttttggagttcttaaggcctgatagacaaggtgttacacagcaacaattcaagggtgccttgtactgtctccttggaaatcacagtggtgtgtgcttggcaaaccttcatgattgggactgtattgtacagacgtggccagcgattgtttcttcagggcttagccaagcaatgtccctggaaaagccatcaatagtgagattgtttgatgatcttgcagaaaagattcataggcagtatgaaacaattggcttggacttcacaattccaaagtcatgtgttgaaatagcggaattacttcaacagtcaaaaaacccctctatcaaccagatattgcttagcccagaaaaaattaaggaaggaattaaacgccaacaggaaaagaatgccgatgccctaaggaactatgaaaatttggtagacaccttgctagatggtgtggagcaaagaaacctgccctggaaatttgaacatataggcattgggcttctgtctctactgctgagagatgaccgagtgttgcctcttcgtgccatacggttttttgttgagaatctcaaccatgatgcaattgtagttcgaaagatggctatctcagctgttgctggtatccttaaacagctaaaaagaacccacaaaaagctgaccattaacccctgtgaaatcagtggatgccctaaacccacccaaattattgctggtgataggcctgataatcattggttgcattatgacagcaaaactataccaagaactaaaaaagaatgggagtcaagttgctttgtggaaaaaactcactggggatactacacctggccaaagaatatggttgtttatgctggtgtggaagagcagcctaagcttggcagaagcagggaggatatgacagaggcagaacagattatatttgatcatttttctgatcctaaatttgttgagcagttaattacttttctatcattagaagacagaaaaggaaaagataagtttaatccacgacgtttttgcctctttaagggtatattcaggaattttgatgatgccttcctgccagttctgaagccccatttagaacatttggttgcagattcacatgaaagcacccagcgatgtgttgcagaaattatagctggtttaatcagaggttctaagcactggacatttgaaaaggtggagaagctttgggagcttctgtgccctctgcttagaacagcactgtccaatattaccgtagaaacttataatgactggggagcttgtatagcaacatcctgtgaaagcagagatccccggaaacttcactggctttttgaactgctgttggaatcaccattgagtggtgaaggaggatcctttgtagatgcatgtcgactttatgtactacaaggtggccttgcccagcaagaatggagagtgcctgaactattgcacagactactgaagtacttggaacccaaactcacccaggtttacaaaaatgtcagagaaagaataggaagtgtgctgacctacatattcatgatagatgtatctttgccaaataccacaccaaccatatcgcctcatgtccctgagtttactgctcgaattctggagaaattgaaacctctcatggatgtggatgaagaaattcagaaccatgttatggaagaaaatggaattggtgaagaagatgagcgaactcagggcattaaactcttgaaaaccatattgaaatggctgatggcaagtgcaggaagatccttttctacagcagttacagaacaacttcagcttctacctttgtttttcaagattgccccagtggaaaatgacaatagctacgatgaactgaaaagagatgcaaagttatgtttatcattaatgtctcaggggttgctttaccctcatcaagtgcctttggtacttcaggtgctaaaacaactacctccagaccatggtattttataacctctttattttcctaaacaatgaagatgcagttaaagatatcaggtggctggttataagtcttttggaggacgaacaactggaggttcgagaaatggctgctactaccttaagcggtctgctacagtgtaactttcttaccatggacagtcctatgcagattcattttgagcaactttgcaaaacaaaactacctaagaaaagaaagcgagaccctggttctgtaggagataccattccttctgcagagttggtcaaacgccatgctggggtgctaggacttggtgcatgtgttctttctagtccttacgatgttcccacctggatgccccagctcctcatgaatctcagtgcacatctaaatgatcctcagcctattgagatgactgtaaaaaaaaccttatccaatttccgaaggactcaccatgacaactggcaggaacataaacagcaattcactgatgaccaactgcttgttctcaccgatcttcttgtgtcaccatgctattatgcatagaaagatgactagtcctcacttcaggctcttttcatcaaaaattccacaccctcaggtaccatctgtggtggctctctgcaagttttaaaactgcctctgctgagctctcatcattttggtggtttctgtgttagatctcgttagtctgcattccacagcttctcagttgccatttgatttcccaacttgtccggaagtgtttccagaatactgatcactttttttttttgaggcatctgacaaagtcacaaagtctcagactagaaataattacccagtatgatcatggcatccaagaccagagtctcagaactcattaagaaacagtttacttggaatggagaatacccatctgtaatacaggtcctgtcatttcattcatctcaaattattttgaattcttcccaaatggctgctggatttaggtggtaataggggctgtgggccataaatctgaagccttgagaaccttgggtctggagagccatgaagagggaaggaaaagagggcaagtcctgaacctaaccaatgacctgatggattgctcgaccaagacacagaagtgaagtctgtgtctgtgcacttcccacagactggagtttttggtgctgaatagagccagttgctaaaaaattgggggtttggtgaagaaatctgattgttgtgtgtattcaatgtgtgattttaaaaataaacagcaacaacaataaaaaccctga

SEQ ID NO: 439308 - DNA, 7464 bp, Homo sapiens
  misc_feature (7247)..(7247): n is a, c, g, or t
accgtagaggatcccctagtgtggaaagcgagtgagaggtgtcggggatggttgctctttgtccagagggctggacccttagctctgtcctcgctggagctgtccccgagcggtgatcccagggtcgtgacagagcctgtgaagtactcaagccgtcctccctgccactttcctacgggacttcccgggtctttaccatccctctacgtcgctccctagaggtagttggagagctaggggtaccgagcgcgagttcggagtcggggtcgtgggggttcgctgtgtagaaatggattgccgtaaacaagctgctgccctacgcggagcggctagacgccgagtccgacttgcagctggcccagatcaaatgcaacctgggccgggccgtgcagctccaagagctgtggcccgggggcctcttctggaccaggaaactctccacatatattcgactttatgggagaaaatttagcaaagaagatcatgttctttttattaagttattgtatgagctggtatcaattccaaaactggaaatcagcatgatgcagggatttgcccgccttttgatcaacttgttaaagaaaaaggaacttctttcaagagctgatttggagttaccctggagaccactttatgacatggtagaaagaatattatattccaagacagagcacctaggattaaattggtttcctaattctgtagaaaatattctcaaaacactcgtgaaaagctgccgaccatattttccagcagatgccaccgctgagatgctagaagaatggcgacctttaatgtgcccttttgatgtaaccatgcaaaaggccatcacttattttgaaatatttcttcctacctcccttcctccagaacttcatcataaaggttttaaactttggtttgatgaattaattggcctttgggtttcagtgcaaaatctcccacaatgggaggggcaactagtaaatctctttgctcgattggctacagataatatagggtacatagattgggatccatatgtaccaaagatatttacaagaattctgagaagcttgaacctcccagtgggaagcagtcaagtgttagtcccaagatttttaacaaatgcttatgatataggacatgctgtaatatggatcaccgccatgatgggtggaccaagtaagctagtgcaaaaacacttagctggtttgtttaacagcatcacatctttttaccatccttcaaataatgggcgctggctgaacaagttaatgaaactacttcagcggttgccaaacagtgttgttagaagattgcatcgtgaaagatacaagaagccctcttggttaactcctgtgcctgatagccacaagcttactgatcaagatgttacagactttgtacaatgcattattcagcctgtcctcttggctatgtttagcaaaaccggtagtctagaagcagcccaggctttgcagaatcttgcactcatgagacctgaattggtaataccccctgtacttgaaagaacatatcctgcattagagacattaacagaacctcaccagctcacagctactttaagttgtgtaattggagtagcccgcagtttggtatcaggaggcagatggtttcctgaaggtcctacacatatgctacctctgttgatgagagcattgcctggggtggatccaaatgactttagtaaatgcatgatcacattccagttcatagcaacattttctactctggtgcctttagtagattgttcatctgtactacaagaaagaaatgacctcacagaagtggaacgagaactttgttcagccacagctgaatttgaggatttcgtcttacagtttatggacagatgttttggacttatagaaagtagcacattggagcaaacaagagaagagacagaaactgagaaaatgacacacttggagagtttggtcgaattaggtctgtcttctacgtttagtacaatcctcacccaatgttccaaagaaatatttatggtggcccttcagaaggtttttaatttttctacttcacatatatttgaaacaagagtagcaggtcgcatggtggcagacatgtgccgcgctgctgtaaagtgctgcccagaagaatctttgaagctctttgttccccactgctgcagtgttataactcagcttacaatgaatgatgatgtattaaatgatgaagagctagacaaggaattactatggaatcttcaacttttgtctgagattactcgagtggatggaaggaagttgcttctttatagggagcagcttgtaaagattctccaaagaaccctacatttaacctgtaagcagggttacactctgtcttgtaaccttttgcatcatcttctccgttctaccacacttatctaccctacagaatactgcagtgtgccaggtggctttgacaagcctccttctgaatactttcctatcaaggactggggcaaacccggggacttgtggaatctgggaatccagtggcatgttccttcttcagaagaagtgtcttttgccttttatcttttggactcctttcttcagcctgagctcgtcaaactccagcattgtggggatggaaaacttgaaatgtctagagatgatattctacagagtctgactatagtgcacaactgtttaattggctctggaaacctcctacctccgttgaaaggagagccagttactaacttagtaccaagtatggtgtccttggaagagacaaagttgtatactggacttgaatatgatctgtctcgagagaaccaccgagaagtaattgctacagttataaggaaacttcttaaccacatacttgataattcagaagatgatactaagtcattgtttcttattataaagattattggagaccttttacaattccaaggatctcacaagcatgaatttgactcccgatggaaaagcttcaacttagtaaagaaatcaatggaaaatcggctccatgggaaaaaacaacatatcagagcactgttgattgatagagtaatgttacagcatgagctacggacactaactgttgagggttgtgaatacaaaaagatacatcaagatatgatcagagatcttcttcgtttatctacaagttcatacagtcaggtgagaaataaggctcagcaaacattttttgctgccttgggagcatataacttctgttgcagagatatcattcccttggttttggagttcttaaggcctgatagacaaggtgttacacagcaacaattcaagggtgccttgtactgtctccttggaaatcacagtggtgtgtgcttggcaaaccttcatgattgggactgtattgtacagacgtggccagcgattgtttcttcagggcttagccaagcaatgtccctggaaaagccatcaatagtgagattgtttgatgatcttgcagaaaagattcataggcagtatgaaacaattggcttggacttcacaattccaaagtcatgtgttgaaatagcggaattacttcaacagtcaaaaaacccctctatcaaccagatattgcttagcccagaaaaaattaaggaaggaattaaacgccaacaggaaaagaatgccgatgccctaaggaactatgaaaatttggtagacaccttgctagatggtgtggagcaaagaaacctgccctggaaatttgaacatataggcattgggcttctgtctctactgctgagagatgaccgagtgttgcctcttcgtgccatacggttttttgttgagaatctcaaccatgatgcaattgtagttcgaaagatggctatctcagctgttgctggtatccttaaacagctaaaaagaacccacaaaaagctgaccattaacccctgtgaaatcagtggatgccctaaacccacccaaattattgctggtgataggcctgataatcattggttgcattatgacagcaaaactataccaagaactaaaaaagaatgggagtcaagttgctttgtggaaaaaactcactggggatactacacctggccaaagaatatggttgtttatgctggtgtggaagagcagcctaagcttggcagaagcagggaggatatgacagaggcagaacagattatatttgatcatttttctgatcctaaatttgttgagcagttaattacttttctatcattagaagacagaaaaggaaaagataagtttaatccacgacgtttttgcctctttaagggtatattcaggaattttgatgatgccttcctgccagttctgaagccccatttagaacatttggttgcagattcacatgaaagcacccagcgatgtgttgcagaaattatagctggtttaatcagaggttctaagcactggacatttgaaaaggtggagaagctttgggagcttctgtgccctctgcttagaacagcactgtccaatattaccgtagaaacttataatgactggggagcttgtatagcaacatcctgtgaaagcagagatccccggaaacttcactggctttttgaactgctgttggaatcaccattgagtggtgaaggaggatcctttgtagatgcatgtcgactttatgtactacaaggtggccttgcccagcaagaatggagagtgcctgaactattgcacagactactgaagtacttggaacccaaactcacccaggtttacaaaaatgtcagagaaagaataggaagtgtgctgacctacatattcatgatagatgtatctttgccaaataccacaccaaccatatcgcctcatgtccctgagtttactgctcgaattctggagaaattgaaacctctcatggatgtggatgaagaaattcagaaccatgttatggaagaaaatggaattggtgaagaagatgagcgaactcagggcattaaactcttgaaaaccatattgaaatggctgatggcaagtgcaggaagatccttttctacagcagttacagaacaacttcagcttctacctttgtttttcaagattgccccagtggaaaatgacaatagctacgatgaactgaaaagagatgcaaagttatgtttatcattaatgtctcaggggttgctttaccctcatcaagtgcctttggtacttcaggtgctaaaacaaacagcaagaagcagttcttggcatgcacgatacacagtactgacctacctccagaccatggtattttataacctctttattttcctaaacaatgaagatgcagttaaagatatcaggtggctggttataagtcttttggaggacgaacaactggaggttcgagaaatggctgctactaccttaagcggtctgctacagtgtaactttcttaccatggacagtcctatgcagattcattttgagcaactttgcaaaacaaaactacctaagaaaagaaagcgagaccctggttctgtaggagataccattccttctgcagagttggtcaaacgccatgctggggtgctaggacttggtgcatgtgttctttctagtccttacgatgttcccacctggatgccccagctcctcatgaatctcagtgcacatctaaatgatcctcagcctattgagatgactgtaaaaaaaaccttatccaatttccgaaggactcaccatgacaactggcaggaacataaacagcaattcactgatgaccaactgcttgttctcaccgatcttcttgtgtcaccatgctattatgcatagaaagatgactagtcctcacttcaggctcttttcatcaaaaattccacaccctcaggtaccatctgtggtggctctctgcaagttttaaaactgcctctgctgagctctcatcattttggtggtttctgtgttagatctcgttagtctgcattccacagcttctcagttgccatttgatttcccaacttgtccggaagtgtttccagaatactgatcactttttttttttgaggcatctgacaaagtcacaaagtctcagactagaaataattacccagtatgatcatggcatccaagaccagagtctcagaactcattaagaaacagtttacttggaatggagaatacccatctgtaatacaggtcctgtcatttcattcatctcaaattattttgaattcttcccaaatggctgctggatttaggtggtaataggggctgtgggccataaatctgaagccttgagaaccttgggtctggagagccatgaagagggaaggaaaagagggcaagtcctgaacctaaccaatgacctgatggattgctcgaccaagacacagaagtgaagtctgtgtctgtgcacttcccacagactggagtttttggtgctgaatagagccagttgctaaaaaattgggggtttggtgaagaaatctgattgttgtgtgtattcaatgtgtgattttaaaaataaacagcaacaacaataaaaaccctgactggctgttttttccctgtattctttacaactattttttgaccctctgaaaattattatacttcacctaaatggaagactgctgtgtttgtggaaattttgtaattttttaatttattttattctctctccctttttattttgcctgcagaatcgttgagagactaataaggcttaatatttaattgatttgtttaatatgttatataaatgtaaaagagtgtataaactgtagagatagcattggcaagacattgtacagatgcaaccttttacacaacatcattgtgtaatttgtaaagattcacgtgtagttctttattatagtgattttgggctttgtacccactgaatgccattttttgtgtttttaaattattttctttatcttgttacaaaaactgagatgtggggttttttttttttcagttcacttatcattagaatgtctgaacttttatgtaacatttttgtgtgcatctctcaatgctaacaccacatgtttgcctatgacaagtttatagagtgaaaggtatcttctgggttgaaataattcacaaattggtgaatgtcatcttgcaacacaccctgtacagtcttccttaaaggaacactacagtatatttttagtatctacatgctgaatgactgaatacagacctaagcacagcagtggtcctggtacagtatttaagtgtcggcatacacaggcgtaatccctgtataaagtagtgccaaactgatttcagttgtgtaactagtttaaaacccaataaatggattctttttaaaaaaanaaacacacagacaaaacaagccaaacaaataaacaagagcaaaaagagacgcagacacaacacacgacacacgcagaacaagcagcaaaacaaacaagagcagacaaagaaaaaacaaggagggggggcggcgcacaaataaaacacacgagaggaggacacaagacagcacacacgagagaacattacgaagcagacgacgagacaccgcgacgcg

SEQ ID NO: 439309 - DNA, 1885 bp, Homo sapiens
ggacagcatccctaagccaggcaggtgtgttaggcctgggctcacgcgcctgccactcgctcacataagcggccgtcccgcgaaaaggtgacaccgtgtcaggggacctcagtctgagtgtgacagactgtactcatcaaactatactcctaggccaaatccaagtattttaaattttattttgggtgctgttatactgcttcttaataagtgtctaatttatgaagtaacatagatgatatctttcatagcaccgaagagctgtcagagtggctgtatgacaataacattacaatattgttctactttgtggtctgtaaatgaatggcaaagacttactctgcatctttgttttcaaaatagtattgaaatggctgatggcaagtgcaggaagatccttttctacagcagttacagaacaacttcagcttctacctttgtttttcaagattgccccagtggaaaatgacaatagctacgatgaactgaaaagagatgcaaagttatgtttatcattaatgtctcaggggttgctttaccctcatcaagtgcctttggtacttcaggtgctaaaacaaacagcaagaagcagttcttggcatgcacgatacacagtactgacctacctccagaccatggtattttataacctctttattttcctaaacaatgaagatgcagttaaagatatcaggtggctggttataagtcttttggaggacgaacaactggaggttcgagaaatggctgctactaccttaagcggtctgctacagtgtaactttcttaccatggacagtcctatgcagattcattttgagcaactttgcaaaacaaaactacctaagaaaagaaagcgagaccctggttctgtaggagataccattccttctgcagagttggtcaaacgccatgctggggtgctaggacttggtgcatgtgttctttctagtccttacgatgttcccacctggatgccccagctcctcatgaatctcagtgcacatctaaatgatcctcagcctattgagatgactgtaaaaaaaaccttatccaatttccgaaggactcaccatgacaactggcaggaacataaacagcaattcactgatgaccaactgcttgttctcaccgatcttcttgtgtcaccatgctattatgcatagaaagatgactagtcctcacttcaggctcttttcatcaaaaattccacaccctcaggtaccatctgtggtggctctctgcaagttttaaaactgcctctgctgagctctcatcattttggtggtttctgtgttagatctcgttagtctgcattccacagcttctcagttgccatttgatttcccaacttgtccggaagtgtttccagaatactgatcactttttttttttgaggcatctgacaaagtcacaaagtctcagactagaaataattacccagtatgatcatggcatccaagaccagagtctcagaactcattaagaaacagtttacttggaatggagaatacccatctgtaatacaggtcctgtcatttcattcatctcaaattattttgaattcttcccaaatggctgctggatttaggtggtaataggggctgtgggccataaatctgaagccttgagaaccttgggtctggagagccatgaagagggaaggaaaagagggcaagtcctgaacctaaccaatgacctgatggattgctcgaccaagacacagaagtgaagtctgtgtctgtgcacttcccacagactggagtttttggtgctgaatagagccagttgctaaaaaattgggggtttggtgaagaaatctgattgttgtgtgtattcaatgtgtgattttaaaaataaacagcaacaacaataaaaaccctga

SEQ ID NO: 439310 - DNA, 1498 bp, Homo sapiens
gtgtccctcacagaactgttagaaggatgaaatgacatacctgtaaagcagaaagcacagtgattgccccagtggaaaatgacaatagctacgatgaactgaaaagagatgcaaagttatgtttatcattaatgtctcaggggttgctttaccctcatcaagtgcctttggtacttcaggtgctaaaacaaacagcaagaagcagttcttggcatgcacgatacacagtactgacctacctccagaccatggtattttataacctctttattttcctaaacaatgaagatgcagttaaagatatcaggtggctggttataagtcttttggaggacgaacaactggaggttcgagaaatggctgctactaccttaagcggtctgctacagtgtaactttcttaccatggacagtcctatgcagattcattttgagcaactttgcaaaacaaaactacctaagaaaagaaagcgagaccctggttctgtaggagataccattccttctgcagagttggtcaaacgccatgctggggtgctaggacttggtgcatgtgttctttctagtccttacgatgttcccacctggatgccccagctcctcatgaatctcagtgcacatctaaatgatcctcagcctattgagatgactgtaaaaaaaaccttatccaatttccgaaggactcaccatgacaactggcaggaacataaacagcaattcactgatgaccaactgcttgttctcaccgatcttcttgtgtcaccatgctattatgcatagaaagatgactagtcctcacttcaggctcttttcatcaaaaattccacaccctcaggtaccatctgtggtggctctctgcaagttttaaaactgcctctgctgagctctcatcattttggtggtttctgtgttagatctcgttagtctgcattccacagcttctcagttgccatttgatttcccaacttgtccggaagtgtttccagaatactgatcactttttttttttgaggcatctgacaaagtcacaaagtctcagactagaaataattacccagtatgatcatggcatccaagaccagagtctcagaactcattaagaaacagtttacttggaatggagaatacccatctgtaatacaggtcctgtcatttcattcatctcaaattattttgaattcttcccaaatggctgctggatttaggtggtaataggggctgtgggccataaatctgaagccttgagaaccttgggtctggagagccatgaagagggaaggaaaagagggcaagtcctgaacctaaccaatgacctgatggattgctcgaccaagacacagaagtgaagtctgtgtctgtgcacttcccacagactggagtttttggtgctgaatagagccagttgctaaaaaattgggggtttggtgaagaaatctgattgttgtgtgtattcaatgtgtgattttaaaaataaacagcaacaacaataaaaaccctga

SEQ ID NO: 439311 - DNA, 837 bp, Homo sapiens
aggtgaattgctgcttgttctcaccgatcttcttgtgtcatctttctatgcataatagcatggtgacacaagaagatcggtgagaacaagcagttggtcatcatgctattatgcatagaaagatgactagtcctcacttcaggctcttttcatcaaaaattccacaccctcaggtaccatctgtggtggctctctgcaagttttaaaactgcctctgctgagctctcatcattttggtggtttctgtgttagatctcgttagtctgcattccacagcttctcagttgccatttgatttcccaacttgtccggaagtgtttccagaatactgatcactttttttttttgaggcatctgacaaagtcacaaagtctcagactagaaataattacccagtatgatcatggcatccaagaccagagtctcagaactcattaagaaacagtttacttggaatggagaatacccatctgtaatacaggtcctgtcatttcattcatctcaaattattttgaattcttcccaaatggctgctggatttaggtggtaataggggctgtgggccataaatctgaagccttgagaaccttgggtctggagagccatgaagagggaaggaaaagagggcaagtcctgaacctaaccaatgacctgatggattgctcgaccaagacacagaagtgaagtctgtgtctgtgcacttcccacagactggagtttttggtgctgaatagagccagttgctaaaaaattgggggtttggtgaagaaatctgattgttgtgtgtattcaatgtgtgattttaaaaataaacagcaacaacaataaaaaccctga

SEQ ID NO: 439312 - DNA, 5687 bp, Homo sapiens
accgtagaggatcccctagtgtggaaagcgagtgagaggtgtcggggatggttgctctttgtccagagggctggacccttagctctgtcctcgctggagctgtccccgagcggtgatcccagggtcgtgacagagcctgtgaagtactcaagccgtcctccctgccactttcctacgggacttcccgggtctttaccatccctctacgtcgctccctagaggtagttggagagctaggggtaccgagcgcgagttcggagtcggggtcgtgggggttcgctgtgtagaaatggattgccgtaaacaagctgctgccctacgcggagcggctagacgccgagtccgacttgcagctggcccagatcaaatgcaacctgggccgggccgtgcagctccaagagctgtggcccgggggcctcttctggaccaggaaactctccacatatattcgactttatgggagaaaatttagcaaagaagatcatgttctttttattaagttattgtatgagctggtatcaattccaaaactggaaatcagcatgatgcagggatttgcccgccttttgatcaacttgttaaagaaaaaggaacttctttcaagagctgatttggagttaccctggagaccactttatgacatggtagaaagaatattatattccaagacagagcacctaggattaaattggtttcctaattctgtagaaaatattctcaaaacactcgtgaaaagctgccgaccatattttccagcagatgccaccgctgagatgctagaagaatggcgacctttaatgtgcccttttgatgtaaccatgcaaaaggccatcacttattttgaaatatttcttcctacctcccttcctccagaacttcatcataaaggttttaaactttggtttgatgaattaattggcctttgggtttcagtgcaaaatctcccacaatgggaggggcaactagtaaatctctttgctcgattggctacagataatatagggtacatagattgggatccatatgtaccaaagatatttacaagaattctgagaagcttgaacctcccagtgggaagcagtcaagtgttagtcccaagatttttaacaaatgcttatgatataggacatgctgtaatatggatcaccgccatgatgggtggaccaagtaagctagtgcaaaaacacttagctggtttgtttaacagcatcacatctttttaccatccttcaaataatgggcgctggctgaacaagttaatgaaactacttcagcggttgccaaacagtgttgttagaagattgcatcgtgaaagatacaagaagccctcttggttaactcctgtgcctgatagccacaagcttactgatcaagatgttacagactttgtacaatgcattattcagcctgtcctcttggctatgtttagcaaaaccggtagtctagaagcagcccaggctttgcagaatcttgcactcatgagacctgaattggtaataccccctgtacttgaaagaacatatcctgcattagagacattaacagaacctcaccagctcacagctactttaagttgtgtaattggagtagcccgcagtttggtatcaggaggcagatggtttcctgaaggtcctacacatatgctacctctgttgatgagagcattgcctggggtggatccaaatgactttagtaaatgcatgatcacattccagttcatagcaacattttctactctggtgcctttagtagattgttcatctgtactacaagaaagaaatgacctcacagaagtggaacgagaactttgttcagccacagctgaatttgaggatttcgtcttacagtttatggacagatgttttggacttatagaaagtagcacattggagcaaacaagagaagagacagaaactgagaaaatgacacacttggagagtttggtcgaattaggtctgtcttctacgtttagtacaatcctcacccaatgttccaaagaaatatttatggtggcccttcagaaggtttttaatttttctacttcacatatatttgaaacaagagtagcaggtcgcatggtggcagacatgtgccgcgctgctgtaaagtgctgcccagaagaatctttgaagctctttgttccccactgctgcagtgttataactcagcttacaatgaatgatgatgtattaaatgatgaagagctagacaaggaattactatggaatcttcaacttttgtctgagattactcgagtggatggaaggaagttgcttctttatagggagcagcttgtaaagattctccaaagaaccctacatttaacctgtaagcagggttacactctgtcttgtaaccttttgcatcatcttctccgttctaccacacttatctaccctacagaatactgcagtgtgccaggtggctttgacaagcctccttctgaatactttcctatcaaggactggggcaaacccggggacttgtggaatctgggaatccagtggcatgttccttcttcagaagaagtgtcttttgccttttatcttttggactcctttcttcagcctgagctcgtcaaactccagcattgtggggatggaaaacttgaaatgtctagagatgatattctacagagtctgactatagtgcacaactgtttaattggctctggaaacctcctacctccgttgaaaggagagccagttactaacttagtaccaagtatggtgtccttggaagagacaaagttgtatactggacttgaatatgatctgtctcgagagaaccaccgagaagtaattgctacagttataaggaaacttcttaaccacatacttgataattcagaagatgatactaagtcattgtttcttattataaagattattggagaccttttacaattccaaggatctcacaagcatgaatttgactcccgatggaaaagcttcaacttagtaaagaaatcaatggaaaatcggctccatgggaaaaaacaacatatcagagcactgttgattgatagagtaatgttacagcatgagctacggacactaactgttgagggttgtgaatacaaaaagatacatcaagatatgatcagagatcttcttcgtttatctacaagttcatacagtcaggtgagaaataaggctcagcaaacattttttgctgccttgggagcatataacttctgttgcagagatatcattcccttggttttggagttcttaaggcctgatagacaaggtgttacacagcaacaattcaagggtgccttgtactgtctccttggaaatcacagtggtgtgtgcttggcaaaccttcatgattgggactgtattgtacagacgtggccagcgattgtttcttcagggcttagccaagcaatgtccctggaaaagccatcaatagtgagattgtttgatgatcttgcagaaaagattcataggcagtatgaaacaattggcttggacttcacaattccaaagtcatgtgttgaaatagcggaattacttcaacagtcaaaaaacccctctatcaaccagatattgcttagcccagaaaaaattaaggaaggaattaaacgccaacaggaaaagaatgccgatgccctaaggaactatgaaaatttggtagacaccttgctagatggtgtggagcaaagaaacctgccctggaaatttgaacatataggcattgggcttctgtctctactgctgagagatgaccgagtgttgcctcttcgtgccatacggttttttgttgagaatctcaaccatgatgcaattgtagttcgaaagatggctatctcagctgttgctggtatccttaaacagctaaaaagaacccacaaaaagctgaccattaacccctgtgaaatcagtggatgccctaaacccacccaaattattgctggtgataggcctgataatcattggttgcattatgacagcaaaactataccaagaactaaaaaagaatgggagtcaagttgctttgtggaaaaaactcactggggatactacacctggccaaagaatatggttgtttatgctggtgtggaagagcagcctaagcttggcagaagcagggaggatatgacagaggcagaacagattatatttgatcatttttctgatcctaaatttgttgagcagttaattacttttctatcattagaagacagaaaaggaaaagataagtttaatccacgacgtttttgcctctttaagggtatattcaggaattttgatgatgccttcctgccagttctgaagccccatttagaacatttggttgcagattcacatgaaagcacccagcgatgtgttgcagaaattatagctggtttaatcagaggttctaagcactggacatttgaaaaggtggagaagctttgggagcttctgtgccctctgcttagaacagcactgtccaatattaccgtagaaacttataatgactggggagcttgtatagcaacatcctgtgaaagcagagatccccggaaacttcactggctttttgaactgctgttggaatcaccattgagtggtgaaggaggatcctttgtagatgcatgtcgactttatgtactacaaggtggccttgcccagcaagaatggagagtgcctgaactattgcacagactactgaagtacttggaacccaaactcacccaggtttacaaaaatgtcagagaaagaataggaagtgtgctgacctacatattcatgatagatgtatctttgccaaataccacaccaaccatatcgcctcatgtccctgagtttactgctcgaattctggagaaattgaaacctctcatggatgtggatgaagaaattcagaaccatgttatggaagaaaatggaattggtgaagaagatgagcgaactcagggcattaaactcttgaaaaccatattgaaatggctgatggcaagtgcaggaagatccttttctacagcagttacagaacaacttcagcttctacctttgtttttcaagattgccccagtggaaaatgacaatagctacgatgaactgaaaagagatgcaaagttatgtttatcattaatgtctcaggggttgctttaccctcatcaagtgcctttggtacttcaggtgctaaaacaaacagcaagaagcagttcttggcatgcacgatacacagtactgacctacctccagaccatggtattttataacctctttattttcctaaacaatgaagatgcagttaaagatatcaggtggctggttataagtcttttggaggacgaacaactggaggtaaaatttaagttatagaaaacggaaattcagtcaatttaaagaaaccatcatggttccctttttaataagtatttgcggccaggtgcaattgtttatatttataacctcaactctttgagagacgaagtcagtgagatcacttgatgccaggagtttgagaccagcctggacaacgtagcaagactgtctctacaaaaagtaccaaaattagctggacatgatggtgtgcacctgtgatcccagctattcaggaggtcgaggtcggaggatcgcttaagcctggaggttgagcctgcagtgagctgtgattgtaccactgcattcatcctgagcagcagagtagaccctgtctcaaaaaaattaaataaaaataactttaatttt

SEQ ID NO: 439313 - DNA, 4499 bp, Homo sapiens
accgtagaggatcccctagtgtggaaagcgagtgagaggtgtcggggatggttgctctttgtccagagggctggacccttagctctgtcctcgctggagctgtccccgagcggtgatcccagggtcgtgacagagcctgtgaagtactcaagccgtcctccctgccactttcctacgggacttcccgggtctttaccatccctctacgtcgctccctagaggtagttggagagctaggggtaccgagcgcgagttcggagtcggggtcgtgggggttcgctgtgtagaaatggattgccgtaaacaagctgctgccctacgcggagcggctagacgccgagtccgacttgcagctggcccagatcaaatgcaacctgggccgggccgtgcagctccaagagctgtggcccgggggcctcttctggaccaggaaactctccacatatattcgactttatgggagaaaatttagcaaagaagatcatgttctttttattaagttattgtatgagctggtatcaattccaaaactggaaatcagcatgatgcagggatttgcccgccttttgatcaacttgttaaagaaaaaggaacttctttcaagagctgatttggagttaccctggagaccactttatgacatggtagaaagaatattatattccaagacagagcacctaggattaaattggtttcctaattctgtagaaaatattctcaaaacactcgtgaaaagctgccgaccatattttccagcagatgccaccgctgagatgctagaagaatggcgacctttaatgtgcccttttgatgtaaccatgcaaaaggccatcacttattttgaaatatttcttcctacctcccttcctccagaacttcatcataaaggttttaaactttggtttgatgaattaattggcctttgggtttcagtgcaaaatctcccacaatgggaggggcaactagtaaatctctttgctcgattggctacagataatatagggtacatagattgggatccatatgtaccaaagatatttacaagaattctgagaagcttgaacctcccagtgggaagcagtcaagtgttagtcccaagatttttaacaaatgcttatgatataggacatgctgtaatatggatcaccgccatgatgggtggaccaagtaagctagtgcaaaaacacttagctggtttgtttaacagcatcacatctttttaccatccttcaaataatgggcgctggctgaacaagttaatgaaactacttcagcggttgccaaacagtgttgttagaagattgcatcgtgaaagatacaagaagccctcttggttaactcctgtgcctgatagccacaagcttactgatcaagatgttacagactttgtacaatgcattattcagcctgtcctcttggctatgtttagcaaaaccggtagtctagaagcagcccaggctttgcagaatcttgcactcatgagacctgaattggtaataccccctgtacttgaaagaacatatcctgcattagagacattaacagaacctcaccagctcacagctactttaagttgtgtaattggagtagcccgcagtttggtatcaggaggcagatggtttcctgaaggtcctacacatatgctacctctgttgatgagagcattgcctggggtggatccaaatgactttagtaaatgcatgatcacattccagttcatagcaacattttctactctggtgcctttagtagattgttcatctgtactacaagaaagaaatgacctcacagaagtggaacgagaactttgttcagccacagctgaatttgaggatttcgtcttacagtttatggacagatgttttggacttatagaaagtagcacattggagcaaacaagagaagagacagaaactgagaaaatgacacacttggagagtttggtcgaattaggtctgtcttctacgtttagtacaatcctcacccaatgttccaaagaaatatttatggtggcccttcagaaggtttttaatttttctacttcacatatatttgaaacaagagtagcaggtcgcatggtggcagacatgtgccgcgctgctgtaaagtgctgcccagaagaatctttgaagctctttgttccccactgctgcagtgttataactcagcttacaatgaatgatgatgtattaaatgatgaagagctagacaaggaattactatggaatcttcaacttttgtctgagattactcgagtggatggaaggaagttgcttctttatagggagcagcttgtaaagattctccaaagaaccctacatttaacctgtaagcagggttacactctgtcttgtaaccttttgcatcatcttctccgttctaccacacttatctaccctacagaatactgcagtgtgccaggtggctttgacaagcctccttctgaatactttcctatcaaggactggggcaaacccggggacttgtggaatctgggaatccagtggcatgttccttcttcagaagaagtgtcttttgccttttatcttttggactcctttcttcagcctgagctcgtcaaactccagcattgtggggatggaaaacttgaaatgtctagagatgatattctacagagtctgactatagtgcacaactgtttaattggctctggaaacctcctacctccgttgaaaggagagccagttactaacttagtaccaagtatggtgtccttggaagagacaaagttgtatactggacttgaatatgatctgtctcgagagaaccaccgagaagtaattgctacagttataaggaaacttcttaaccacatacttgataattcagaagatgatactaagtcattgtttcttattataaagattattggagaccttttacaattccaaggatctcacaagcatgaatttgactcccgatggaaaagcttcaacttagtaaagaaatcaatggaaaatcggctccatgggaaaaaacaacatatcagagcactgttgattgatagagtaatgttacagcatgagctacggacactaactgttgagggttgtgaatacaaaaagatacatcaagatatgatcagagatcttcttcgtttatctacaagttcatacagtcaggtgagaaataaggctcagcaaacattttttgctgccttgggagcatataacttctgttgcagagatatcattcccttggttttggagttcttaaggcctgatagacaaggtgttacacagcaacaattcaagggtgccttgtactgtctccttggaaatcacagtggtgtgtgcttggcaaaccttcatgattgggactgtattgtacagacgtggccagcgattgtttcttcagggcttagccaagcaatgtccctggaaaagccatcaatagtgagattgtttgatgatcttgcagaaaagattcataggcagtatgaaacaattggcttggacttcacaattccaaagtcatgtgttgaaatagcggaattacttcaacagtcaaaaaacccctctatcaaccagatattgcttagcccagaaaaaattaaggaaggaattaaacgccaacaggaaaagaatgccgatgccctaaggaactatgaaaatttggtagacaccttgctagatggtgtggagcaaagaaacctgccctggaaatttgaacatataggcattgggcttctgtctctactgctgagagatgaccgagtgttgcctcttcgtgccatacggttttttgttgagaatctcaaccatgatgcaattgtagttcgaaagatggctatctcagctgttgctggtatccttaaacagctaaaaagaacccacaaaaagctgaccattaacccctgtgaaatcagtggatgccctaaacccacccaaattattgctggtgataggcctgataatcattggttgcattatgacagcaaaactataccaagaactaaaaaagaatgggagtcaagttgctttgtggaaaaaactcactggggatactacacctggccaaagaatatggttgtttatgctggtgtggaagagcagcctaagcttggcagaagcagggaggatatgacagaggtaagcattccatttcaccatggttcaaatgcatcttgttttgggccactgatttatctcaacctcacttcagttcttcttcttcttttttttcttaatacaatttgtgtttttctgtatagcactgcataaatattggtgactatgtaatccattctcctcaaccccttcatactagtgccagttgacatagatgttgatgtatctaagactgagttactaccccattcagccctccgttggctactgctttatgtaatttgctgctcatttcttgtatcagttctgatacaagcgttttgaaggaaaagttaatgactgatttttagttttctattgcatataaattatgggatctccgtaaatgcatgttggtagatttcagtt

SEQ ID NO: 439314 - DNA, 1267 bp, Homo sapiens
  misc_feature (57)..(57): n is a, c, g, or t
  misc_feature (76)..(76): n is a, c, g, or t
taggcggaagtgacgtgagaggttcggggatggttgcctttgtccagagggctgganccttagctctgtcctcgcnggagctgtcccgagcggtgatcccagggtcgtgacagagcctgtgaagtactcaagccgtcctccctgccactttcctacgggacttcccgggtctttaccatccctctacgtcgctccctagggagagtcggagagcccccggagccgggcgggcgtcccgagccgggcccgcggggcttcgtcccgcagaaggagatcgtctacaacaagctgctgccctacgcggagcggctagacgccgagtccgacttgcagctggcccagatcaaatgcaacctgggccgggccgtgcagctccaagagctgtggcccgggggcctcttctggaccaggaaactctccacgtaagtgtgcccgggcctgcgggccgggccggggggaaaggctcagtgagaggtgtcggggatggttgctctttgtccagagggctggacccttagctctgtcctcgctggagctgtccccgagcggtgatcccagggtcgtgacagagcctgtgaagtactcaagccgtcctccctgccactttcctacgggacttcccgggtctttaccatccctctacgtcgctccgcatctgcttctcccgaagtgttcgggttgttgtcttcccacctggggggccctgggtagcccaagggccccggccccgagggagagaggtgagcctttctcaagggtcctccgtggacttttgcgcatgggagaggcggggcaaagagaatttgtctttgggggagttccttgacttgtctccttgcttcctccggttcttccttcccctacgatccccgcctcttcgcatctccgttggcgtctagtaactttctgaatggagagaagacccatagggaaacttaagggttttgctttttgggggccctctcagacctggcggagttgatcgaaaagggtcgtttaaagtcagacctcattcttgagcttaacgtcttatgtggacagtgttgttttggattgtgtgttgctcctgttgtgacatttcttttggagagacatttaagatactgaggaaagtagggaagagcactgtcaggatgtccagggcgatattagtatcaggcttgtgttaattttttgagttactcagattaagagattacctaaatcagtttcaggagttctgtttgtaaactagcttcaaactatagtgtcactgaaattaggaaaa

SEQ ID NO: 439315 - DNA, 391 bp, Homo sapiens
ccctttagttcataccagagacagcgaaatgagggcaaaggaaagagtagattaaggagtttaggtagttaatccttgcagttccgtttgtatgaaagggaaggctcaattattacatgtaaacaaataatacctgaatgtgtgaggttatcttatagatatttattaattgaattagatatgttcttaaaatacaccaatctaattatcaaatggctttccccccccagttctgtagaaaatattctcaaaacactcgtgaaaagctgccgaccgtaagtagcttctcaatttataaagcctcttgttgtttctgtgggcttttccacatctttagtatggtttgaaaaggaaatgaaaagtataaatagttcctgacattgtgatgtta

SEQ ID NO: 439316 - DNA, 276 bp, Homo sapiens
gtcctttttgtttactttcagcaactagtaaatctctttgctcgattggctacagataatatagggtacatagattgggatccatatgtaccaaaggtaattaacattttggggaaaaaaattatcaggcatggggtggtaggcgcctgtaatcccagctgctcgggtggctgaggcaggagaatctcttgaacccaggaggctgaggttgcagtgagccaagattgcagtactgcactccagcctgggtgacagagcttgactccatctggaaaa

SEQ ID NO: 439317 - DNA, 522 bp, Homo sapiens
taaaggaaaatacatcttattcttggttgcctcctgggtggggctgggacattttgtgtggccctgaggactctgggttctaaaagttgtgagaacttgatctggattcttacacccattctgttaaagagggagtacccagaagcctttctactggaataggaagaataaaaatttcatttattaggcttttagagttggatgtcttgttacctaattgaaattttttcctccctgatacagatgactagtcctcacttcaggctcttttcatcaaaaattccacaccctcaggtaccatctgtggtggctctctgcaagttttaaaactgcctctgctgagctctcatcattttggtggtttctgtgttagatctcgttagtctgcattccacagcttctcagttgccatttgatttcccaacttgtccggaagtgtttccagaatactgatcactttttttttttgaggcatctgacaaagtcacaaagtctcagactagaaataattacccagtatga

SEQ ID NO: 439318 - DNA, 202 bp, Homo sapiens
caggtagttgcgtttcttctcatatcgcctcatgtccctgagtttactgctcgaattctggagaaattgaaacctctcatggatgtggatgaagaaattcagaaccatgttatggaagaaaatggaattggtgaagaagatgagcgaactcagggcattaaactcttgaaaaccagtgagtggataaaattagtagaacctc

SEQ ID NO: 439319 - DNA, 6887 bp, Homo sapiens
  misc_feature (57)..(57): n is a, c, g, or t
  misc_feature (76)..(76): n is a, c, g, or t
taggcggaagtgacgtgagaggttcggggatggttgcctttgtccagagggctgganccttagctctgtcctcgcnggagctgtcccgagcggtgatcccagggtcgtgacagagcctgtgaagtactcaagccgtcctccctgccactttcctacgggacttcccgggtctttaccatccctctacgtcgctccctagggagagtcggagagcccccggagccgggcgggcgtcccgagccgggcccgcggggcttcgtcccgcagaaggagatcgtctacaacaagctgctgccctacgcggagcggctagacgccgagtccgacttgcagctggcccagatcaaatgcaacctgggccgggccgtgcagctccaagagctgtggcccgggggcctcttctggaccaggaaactctccacgtaagtgtgcccgggcctgcgggccgggccggggggaaaggctcagtgagaggtgtcggggatggttgctctttgtccagagggctggacccttagctctgtcctcgctggagctgtccccgagcggtgatcccagggtcgtgacagagcctgtgaagtactcaagccgtcctccctgccactttcctacgggacttcccgggtctttaccatccctctacgtcgctccctagaggtagttggagagctaggggtaccgagcgcgagttcggagtcggggtcgtgggggttcgctgtgtagaaatggattgccgtaaacaagctgctgccctacgcggagcggctagacgccgagtccgacttgcagctggcccagatcaaatgcaacctgggccgggccgtgcagctccaagagctgtggcccgggggcctcttctggaccaggaaactctccacatatattcgactttatgggagaaaatttagcaaagaagatcatgttctttttattaagttattgtatgagctggtatcaattccaaaactggaaatcagcatgatgcagggatttgcccgccttttgatcaacttgttaaagaaaaaggaacttctttcaagagctgatttggagttaccctggagaccactttatgacatggtagaaagaatattatattccaagacagagcacctaggattaaattggtttcctaattctgtagaaaatattctcaaaacactcgtgaaaagctgccgaccatattttccagcagatgccaccgctgagatgctagaagaatggcgacctttaatgtgcccttttgatgtaaccatgcaaaaggccatcacttattttgaaatatttcttcctacctcccttcctccagaacttcatcataaaggttttaaactttggtttgatgaattaattggcctttgggtttcagtgcaaaatctcccacaatgggaggggcaactagtaaatctctttgctcgattggctacagataatatagggtacatagattgggatccatatgtaccaaagatatttacaagaattctgagaagcttgaacctcccagtgggaagcagtcaagtgttagtcccaagatttttaacaaatgcttatgatataggacatgctgtaatatggatcaccgccatgatgggtggaccaagtaagctagtgcaaaaacacttagctggtttgtttaacagcatcacatctttttaccatccttcaaataatgggcgctggctgaacaagttaatgaaactacttcagcggttgccaaacagtgttgttagaagattgcatcgtgaaagatacaagaagccctcttggttaactcctgtgcctgatagccacaagcttactgatcaagatgttacagactttgtacaatgcattattcagcctgtcctcttggctatgtttagcaaaaccggtagtctagaagcagcccaggctttgcagaatcttgcactcatgagacctgaattggtaataccccctgtacttgaaagaacatatcctgcattagagacattaacagaacctcaccagctcacagctactttaagttgtgtaattggagtagcccgcagtttggtatcaggaggcagatggtttcctgaaggtcctacacatatgctacctctgttgatgagagcattgcctggggtggatccaaatgactttagtaaatgcatgatcacattccagttcatagcaacattttctactctggtgcctttagtagattgttcatctgtactacaagaaagaaatgacctcacagaagtggaacgagaactttgttcagccacagctgaatttgaggatttcgtcttacagtttatggacagatgttttggacttatagaaagtagcacattggagcaaacaagagaagagacagaaactgagaaaatgacacacttggagagtttggtcgaattaggtctgtcttctacgtttagtacaatcctcacccaatgttccaaagaaatatttatggtggcccttcagaaggtttttaatttttctacttcacatatatttgaaacaagagtagcaggtcgcatggtggcagacatgtgccgcgctgctgtaaagtgctgcccagaagaatctttgaagctctttgttccccactgctgcagtgttataactcagcttacaatgaatgatgatgtattaaatgatgaagagctagacaaggaattactatggaatcttcaacttttgtctgagattactcgagtggatggaaggaagttgcttctttatagggagcagcttgtaaagattctccaaagaaccctacatttaacctgtaagcagggttacactctgtcttgtaaccttttgcatcatcttctccgttctaccacacttatctaccctacagaatactgcagtgtgccaggtggctttgacaagcctccttctgaatactttcctatcaaggactggggcaaacccggggacttgtggaatctgggaatccagtggcatgttccttcttcagaagaagtgtcttttgccttttatcttttggactcctttcttcagcctgagctcgtcaaactccagcattgtggggatggaaaacttgaaatgtctagagatgatattctacagagtctgactatagtgcacaactgtttaattggctctggaaacctcctacctccgttgaaaggagagccagttactaacttagtaccaagtatggtgtccttggaagagacaaagttgtatactggacttgaatatgatctgtctcgagagaaccaccgagaagtaattgctacagttataaggaaacttcttaaccacatacttgataattcagaagatgatactaagtcattgtttcttattataaagattattggagaccttttacaattccaaggatctcacaagcatgaatttgactcccgatggaaaagcttcaacttagtaaagaaatcaatggaaaatcggctccatgggaaaaaacaacatatcagagcactgttgattgatagagtaatgttacagcatgagctacggacactaactgttgagggttgtgaatacaaaaagatacatcaagatatgatcagagatcttcttcgtttatctacaagttcatacagtcaggtgagaaataaggctcagcaaacattttttgctgccttgggagcatataacttctgttgcagagatatcattcccttggttttggagttcttaaggcctgatagacaaggtgttacacagcaacaattcaagggtgccttgtactgtctccttggaaatcacagtggtgtgtgcttggcaaaccttcatgattgggactgtattgtacagacgtggccagcgattgtttcttcagggcttagccaagcaatgtccctggaaaagccatcaatagtgagattgtttgatgatcttgcagaaaagattcataggcagtatgaaacaattggcttggacttcacaattccaaagtcatgtgttgaaatagcggaattacttcaacagtcaaaaaacccctctatcaaccagatattgcttagcccagaaaaaattaaggaaggaattaaacgccaacaggaaaagaatgccgatgccctaaggaactatgaaaatttggtagacaccttgctagatggtgtggagcaaagaaacctgccctggaaatttgaacatataggcattgggcttctgtctctactgctgagagatgaccgagtgttgcctcttcgtgccatacggttttttgttgagaatctcaaccatgatgcaattgtagttcgaaagatggctatctcagctgttgctggtatccttaaacagctaaaaagaacccacaaaaagctgaccattaacccctgtgaaatcagtggatgccctaaacccacccaaattattgctggtgataggcctgataatcattggttgcattatgacagcaaaactataccaagaactaaaaaagaatgggagtcaagttgctttgtggaaaaaactcactggggatactacacctggccaaagaatatggttgtttatgctggtgtggaagagcagcctaagcttggcagaagcagggaggatatgacagaggcagaacagattatatttgatcatttttctgatcctaaatttgttgagcagttaattacttttctatcattagaagacagaaaaggaaaagataagtttaatccacgacgtttttgcctctttaagggtatattcaggaattttgatgatgccttcctgccagttctgaagccccatttagaacatttggttgcagattcacatgaaagcacccagcgatgtgttgcagaaattatagctggtttaatcagaggttctaagcactggacatttgaaaaggtggagaagctttgggagcttctgtgccctctgcttagaacagcactgtccaatattaccgtagaaacttataatgactggggagcttgtatagcaacatcctgtgaaagcagagatccccggaaacttcactggctttttgaactgctgttggaatcaccattgagtggtgaaggaggatcctttgtagatgcatgtcgactttatgtactacaaggtggccttgcccagcaagaatggagagtgcctgaactattgcacagactactgaagtacttggaacccaaactcacccaggtttacaaaaatgtcagagaaagaataggaagtgtgctgacctacatattcatgatagatgtatctttgccaaataccacaccaaccatatcgcctcatgtccctgagtttactgctcgaattctggagaaattgaaacctctcatggatgtggatgaagaaattcagaaccatgttatggaagaaaatggaattggtgaagaagatgagcgaactcagggcattaaactcttgaaaaccatattgaaatggctgatggcaagtgcaggaagatccttttctacagcagttacagaacaacttcagcttctacctttgtttttcaagattgccccagtggaaaatgacaatagctacgatgaactgaaaagagatgcaaagttatgtttatcattaatgtctcaggggttgctttaccctcatcaagtgcctttggtacttcaggtgctaaaacaaacagcaagaagcagttcttggcatgcacgatacacagtactgacctacctccagaccatggtattttataacctctttattttcctaaacaatgaagatgcagttaaagatatcaggtggctggttataagtcttttggaggacgaacaactggaggttcgagaaatggctgctactaccttaagcggtctgctacagtgtaactttcttaccatggacagtcctatgcagattcattttgagcaactttgcaaaacaaaactacctaagaaaagaaagcgagaccctggttctgtaggagataccattccttctgcagagttggtcaaacgccatgctggggtgctaggacttggtgcatgtgttctttctagtccttacgatgttcccacctggatgccccagctcctcatgaatctcagtgcacatctaaatgatcctcagcctattgagatgactgtaaaaaaaaccttatccaatttccgaaggactcaccatgacaactggcaggaacataaacagcaattcactgatgaccaactgcttgttctcaccgatcttcttgtgtcaccatgctattatgcatagaaagatgactagtcctcacttcaggctcttttcatcaaaaattccacaccctcaggtaccatctgtggtggctctctgcaagttttaaaactgcctctgctgagctctcatcattttggtggtttctgtgttagatctcgttagtctgcattccacagcttctcagttgccatttgatttcccaacttgtccggaagtgtttccagaatactgatcactttttttttttgaggcatctgacaaagtcacaaagtctcagactagaaataattacccagtatgatcatggcatccaagaccagagtctcagaactcattaagaaacagtttacttggaatggagaatacccatctgtaatacaggtcctgtcatttcattcatctcaaattattttgaattcttcccaaatggctgctggatttaggtggtaataggggctgtgggccataaatctgaagccttgagaaccttgggtctggagagccatgaagagggaaggaaaagagggcaagtcctgaacctaaccaatgacctgatggattgctcgaccaagacacagaagtgaagtctgtgtctgtgcacttcccacagactggagtttttggtgctgaatagagccagttgctaaaaaattgggggtttggtgaagaaatctgattgttgtgtgtattcaatgtgtgattttaaaaataaacagcaacaacaataaaaaccctga

SEQ ID NO: 439320 - DNA, 6431 bp, Homo sapiens
accgtagaggatcccctagtgtggaaagcgagtgagaggtgtcggggatggttgctctttgtccagagggctggacccttagctctgtcctcgctggagctgtccccgagcggtgatcccagggtcgtgacagagcctgtgaagtactcaagccgtcctccctgccactttcctacgggacttcccgggtctttaccatccctctacgtcgctccctagaggtagttggagagctaggggtaccgagcgcgagttcggagtcggggtcgtgggggttcgctgtgtagaaatggattgccgtaaacaagctgctgccctacgcggagcggctagacgccgagtccgacttgcagctggcccagatcaaatgcaacctgggccgggccgtgcagctccaagagctgtggcccgggggcctcttctggaccaggaaactctccacatatattcgactttatgggagaaaatttagcaaagaagatcatgttctttttattaagttattgtatgagctggtatcaattccaaaactggaaatcagcatgatgcagggatttgcccgccttttgatcaacttgttaaagaaaaaggaacttctttcaagagctgatttggagttaccctggagaccactttatgacatggtagaaagaatattatattccaagacagagcacctaggattaaattggtttcctaattctgtagaaaatattctcaaaacactcgtgaaaagctgccgaccatattttccagcagatgccaccgctgagatgctagaagaatggcgacctttaatgtgcccttttgatgtaaccatgcaaaaggccatcacttattttgaaatatttcttcctacctcccttcctccagaacttcatcataaaggttttaaactttggtttgatgaattaattggcctttgggtttcagtgcaaaatctcccacaatgggaggggcaactagtaaatctctttgctcgattggctacagataatatagggtacatagattgggatccatatgtaccaaagatatttacaagaattctgagaagcttgaacctcccagtgggaagcagtcaagtgttagtcccaagatttttaacaaatgcttatgatataggacatgctgtaatatggatcaccgccatgatgggtggaccaagtaagctagtgcaaaaacacttagctggtttgtttaacagcatcacatctttttaccatccttcaaataatgggcgctggctgaacaagttaatgaaactacttcagcggttgccaaacagtgttgttagaagattgcatcgtgaaagatacaagaagccctcttggttaactcctgtgcctgatagccacaagcttactgatcaagatgttacagactttgtacaatgcattattcagcctgtcctcttggctatgtttagcaaaaccggtagtctagaagcagcccaggctttgcagaatcttgcactcatgagacctgaattggtaataccccctgtacttgaaagaacatatcctgcattagagacattaacagaacctcaccagctcacagctactttaagttgtgtaattggagtagcccgcagtttggtatcaggaggcagatggtttcctgaaggtcctacacatatgctacctctgttgatgagagcattgcctggggtggatccaaatgactttagtaaatgcatgatcacattccagttcatagcaacattttctactctggtgcctttagtagattgttcatctgtactacaagaaagaaatgacctcacagaagtggaacgagaactttgttcagccacagctgaatttgaggatttcgtcttacagtttatggacagatgttttggacttatagaaagtagcacattggagcaaacaagagaagagacagaaactgagaaaatgacacacttggagagtttggtcgaattaggtctgtcttctacgtttagtacaatcctcacccaatgttccaaagaaatatttatggtggcccttcagaaggtttttaatttttctacttcacatatatttgaaacaagagtagcaggtcgcatggtggcagacatgtgccgcgctgctgtaaagtgctgcccagaagaatctttgaagctctttgttccccactgctgcagtgttataactcagcttacaatgaatgatgatgtattaaatgatgaagagctagacaaggaattactatggaatcttcaacttttgtctgagattactcgagtggatggaaggaagttgcttctttatagggagcagcttgtaaagattctccaaagaaccctacatttaacctgtaagcagggttacactctgtcttgtaaccttttgcatcatcttctccgttctaccacacttatctaccctacagaatactgcagtgtgccaggtggctttgacaagcctccttctgaatactttcctatcaaggactggggcaaacccggggacttgtggaatctgggaatccagtggcatgttccttcttcagaagaagtgtcttttgccttttatcttttggactcctttcttcagcctgagctcgtcaaactccagcattgtggggatggaaaacttgaaatgtctagagatgatattctacagagtctgactatagtgcacaactgtttaattggctctggaaacctcctacctccgttgaaaggagagccagttactaacttagtaccaagtatggtgtccttggaagagacaaagttgtatactggacttgaatatgatctgtctcgagagaaccaccgagaagtaattgctacagttataaggaaacttcttaaccacatacttgataattcagaagatgatactaagtcattgtttcttattataaagattattggagaccttttacaattccaaggatctcacaagcatgaatttgactcccgatggaaaagcttcaacttagtaaagaaatcaatggaaaatcggctccatgggaaaaaacaacatatcagagcactgttgattgatagagtaatgttacagcatgagctacggacactaactgttgagggttgtgaatacaaaaagatacatcaagatatgatcagagatcttcttcgtttatctacaagttcatacagtcaggtgagaaataaggctcagcaaacattttttgctgccttgggagcatataacttctgttgcagagatatcattcccttggttttggagttcttaaggcctgatagacaaggtgttacacagcaacaattcaagggtgccttgtactgtctccttggaaatcacagtggtgtgtgcttggcaaaccttcatgattgggactgtattgtacagacgtggccagcgattgtttcttcagggcttagccaagcaatgtccctggaaaagccatcaatagtgagattgtttgatgatcttgcagaaaagattcataggcagtatgaaacaattggcttggacttcacaattccaaagtcatgtgttgaaatagcggaattacttcaacagtcaaaaaacccctctatcaaccagatattgcttagcccagaaaaaattaaggaaggaattaaacgccaacaggaaaagaatgccgatgccctaaggaactatgaaaatttggtagacaccttgctagatggtgtggagcaaagaaacctgccctggaaatttgaacatataggcattgggcttctgtctctactgctgagagatgaccgagtgttgcctcttcgtgccatacggttttttgttgagaatctcaaccatgatgcaattgtagttcgaaagatggctatctcagctgttgctggtatccttaaacagctaaaaagaacccacaaaaagctgaccattaacccctgtgaaatcagtggatgccctaaacccacccaaattattgctggtgataggcctgataatcattggttgcattatgacagcaaaactataccaagaactaaaaaagaatgggagtcaagttgctttgtggaaaaaactcactggggatactacacctggccaaagaatatggttgtttatgctggtgtggaagagcagcctaagcttggcagaagcagggaggatatgacagaggcagaacagattatatttgatcatttttctgatcctaaatttgttgagcagttaattacttttctatcattagaagacagaaaaggaaaagataagtttaatccacgacgtttttgcctctttaagggtatattcaggaattttgatgatgccttcctgccagttctgaagccccatttagaacatttggttgcagattcacatgaaagcacccagcgatgtgttgcagaaattatagctggtttaatcagaggttctaagcactggacatttgaaaaggtggagaagctttgggagcttctgtgccctctgcttagaacagcactgtccaatattaccgtagaaacttataatgactggggagcttgtatagcaacatcctgtgaaagcagagatccccggaaacttcactggctttttgaactgctgttggaatcaccattgagtggtgaaggaggatcctttgtagatgcatggtggccttgcccagcaagaatggagagtgcctgaactattgcacagactactgaagtacttggaacccaaactcacccaggtttacaaaaatgtcagagaaagaataggaagtgtgctgacctacatattcatgatagatgtatctttgccaaataccacaccaaccatatcgcctcatgtccctgagtttactgctcgaattctggagaaattgaaacctctcatggatgtggatgaagaaattcagaaccatgttatggaagaaaatggaattggtgaagaagatgagcgaactcagggcattaaactcttgaaaaccatattgaaatggctgatggcaagtgcaggaagatccttttctacagcagttacagaacaacttcagcttctacctttgtttttcaagattgccccagtggaaaatgacaatagctacgatgaactgaaaagagatgcaaagttatgtttatcattaatgtctcaggggttgctttaccctcatcaagtgcctttggtacttcaggtgctaaaacaaacagcaagaagcagttcttggcatgcacgatacacagtactgacctacctccagaccatggtattttataacctctttattttcctaaacaatgaagatgcagttaaagatatcaggtggctggttataagtcttttggaggacgaacaactggaggttcgagaaatggctgctactaccttaagcggtctgctacagtgtaactttcttaccatggacagtcctatgcagattcattttgagcaactttgcaaaacaaaactacctaagaaaagaaagcgagaccctggttctgtaggagataccattccttctgcagagttggtcaaacgccatgctggggtgctaggacttggtgcatgtgttctttctagtccttacgatgttcccacctggatgccccagctcctcatgaatctcagtgcacatctaaatgatcctcagcctattgagatgactgtaaaaaaaaccttatccaatttccgaaggactcaccatgacaactggcaggaacataaacagcaattcactgatgaccaactgcttgttctcaccgatcttcttgtgtcaccatgctattatgcatagaaagatgactagtcctcacttcaggctcttttcatcaaaaattccacaccctcaggtaccatctgtggtggctctctgcaagttttaaaactgcctctgctgagctctcatcattttggtggtttctgtgttagatctcgttagtctgcattccacagcttctcagttgccatttgatttcccaacttgtccggaagtgtttccagaatactgatcactttttttttttgaggcatctgacaaagtcacaaagtctcagactagaaataattacccagtatgatcatggcatccaagaccagagtctcagaactcattaagaaacagtttacttggaatggagaatacccatctgtaatacaggtcctgtcatttcattcatctcaaattattttgaattcttcccaaatggctgctggatttaggtggtaataggggctgtgggccataaatctgaagccttgagaaccttgggtctggagagccatgaagagggaaggaaaagagggcaagtcctgaacctaaccaatgacctgatggattgctcgaccaagacacagaagtgaagtctgtgtctgtgcacttcccacagactggagtttttggtgctgaatagagccagttgctaaaaaattgggggtttggtgaagaaatctgattgttgtgtgtattcaatgtgtgattttaaaaataaacagcaacaacaataaaaaccctga

SEQ ID NO: 439321 - DNA, 6295 bp, Homo sapiens
accgtagaggatcccctagtgtggaaagcgagtgagaggtgtcggggatggttgctctttgtccagagggctggacccttagctctgtcctcgctggagctgtccccgagcggtgatcccagggtcgtgacagagcctgtgaagtactcaagccgtcctccctgccactttcctacgggacttcccgggtctttaccatccctctacgtcgctccctagaggtagttggagagctaggggtaccgagcgcgagttcggagtcggggtcgtgggggttcgctgtgtagaaatggattgccgtaaacaagctgctgccctacgcggagcggctagacgccgagtccgacttgcagctggcccagatcaaatgcaacctgggccgggccgtgcagctccaagagctgtggcccgggggcctcttctggaccaggaaactctccacatatattcgactttatgggagaaaatttagcaaagaagatcatgttctttttattaagttattgtatgagctggtatcaattccaaaactggaaatcagcatgatgcagggatttgcccgccttttgatcaacttgttaaagaaaaaggaacttctttcaagagctgatttggagttaccctggagaccactttatgacatggtagaaagaatattatattccaagacagagcacctaggattaaattggtttcctaattctgtagaaaatattctcaaaacactcgtgaaaagctgccgaccatattttccagcagatgccaccgctgagatgctagaagaatggcgacctttaatgtgcccttttgatgtaaccatgcaaaaggccatcacttattttgaaatatttcttcctacctcccttcctccagaacttcatcataaaggttttaaactttggtttgatgaattaattggcctttgggtttcagtgcaaaatctcccacaatgggaggggcaactagtaaatctctttgctcgattggctacagataatatagggtacatagattgggatccatatgtaccaaagatatttacaagaattctgagaagcttgaacctcccagtgggaagcagtcaagtgttagtcccaagatttttaacaaatgcttatgatataggacatgctgtaatatggatcaccgccatgatgggtggaccaagtaagctagtgcaaaaacacttagctggtttgtttaacagcatcacatctttttaccatccttcaaataatgggcgctggctgaacaagttaatgaaactacttcagcggttgccaaacagtgttgttagaagattgcatcgtgaaagatacaagaagccctcttggttaactcctgtgcctgatagccacaagcttactgatcaagatgttacagactttgtacaatgcattattcagcctgtcctcttggctatgtttagcaaaaccggtagtctagaagcagcccaggctttgcagaatcttgcactcatgagacctgaattggtaataccccctgtacttgaaagaacatatcctgcattagagacattaacagaacctcaccagctcacagctactttaagttgtgtaattggagtagcccgcagtttggtatcaggaggcagatggtttcctgaaggtcctacacatatgctacctctgttgatgagagcattgcctggggtggatccaaatgactttagtaaatgcatgatcacattccagttcatagcaacattttctactctggtgcctttagtagattgttcatctgtactacaagaaagaaatgacctcacagaagtggaacgagaactttgttcagccacagctgaatttgaggatttcgtcttacagtttatggacagatgttttggacttatagaaagtagcacattggagcaaacaagagaagagacagaaactgagaaaatgacacacttggagagtttggtcgaattaggtctgtcttctacgtttagtacaatcctcacccaatgttccaaagaaatatttatggtggcccttcagaaggtttttaatttttctacttcacatatatttgaaacaagagtagcaggtcgcatggtggcagacatgtgccgcgctgctgtaaagtgctgcccagaagaatctttgaagctctttgttccccactgctgcagtgttataactcagcttacaatgaatgatgatgtattaaatgatgaagagctagacaaggaattactatggaatcttcaacttttgtctgagattactcgagtggatggaaggaagttgcttctttatagggagcagcttgtaaagattctccaaagaaccctacatttaacctgtaagcagggttacactctgtcttgtaaccttttgcatcatcttctccgttctaccacacttatctaccctacagaatactgcagtgtgccaggtggctttgacaagcctccttctgaatactttcctatcaaggactggggcaaacccggggacttgtggaatctgggaatccagtggcatgttccttcttcagaagaagtgtcttttgccttttatcttttggactcctttcttcagcctgagctcgtcaaactccagcattgtggggatggaaaacttgaaatgtctagagatgatattctacagagtctgactatagtgcacaactgtttaattggctctggaaacctcctacctccgttgaaaggagagccagttactaacttagtaccaagtatggtgtccttggaagagacaaagttgtatactggacttgaatatgatctgtctcgagagaaccaccgagaagtaattgctacagttataaggaaacttcttaaccacatacttgataattcagaagatgatactaagtcattgtttcttattataaagattattggagaccttttacaattccaaggatctcacaagcatgaatttgactcccgatggaaaagcttcaacttagtaaagaaatcaatggaaaatcggctccatgggaaaaaacaacatatcagagcactgttgattgatagagtaatgttacagcatgagctacggacactaactgttgagggttgtgaatacaaaaagatacatcaagatatgatcagagatcttcttcgtttatctacaagttcatacagtcaggtgagaaataaggctcagcaaacattttttgctgccttgggagcatataacttctgttgcagagatatcattcccttggttttggagttcttaaggcctgatagacaaggtgttacacagcaacaattcaagggtgccttgtactgtctccttggaaatcacagtggtgtgtgcttggcaaaccttcatgattgggactgtattgtacagacgtggccagcgattgtttcttcagggcttagccaagcaatgtccctggaaaagccatcaatagtgagattgtttgatgatcttgcagaaaagattcataggcagtatgaaacaattggcttggacttcacaattccaaagtcatgtgttgaaatagcggaattacttcaacagtcaaaaaacccctctatcaaccagatattgcttagcccagaaaaaattaaggaaggaattaaacgccaacaggaaaagaatgccgatgccctaaggaactatgaaaatttggtagacaccttgctagatggtgtggagcaaagaaacctgccctggaaatttgaacatataggcattgggcttctgtctctactgctgagagatgaccgagtgttgcctcttcgtgccatacggttttttgttgagaatctcaaccatgatgcaattgtagttcgaaagatggctatctcagctgttgctggtatccttaaacagctaaaaagaacccacaaaaagctgaccattaacccctgtgaaatcagtggatgccctaaacccacccaaattattgctggtgataggcctgataatcattggttgcattatgacagcaaaactataccaagaactaaaaaagaatgggagtcaagttgctttgtggaaaaaactcactggggatactacacctggccaaagaatatggttgtttatgctggtgtggaagagcagcctaagcttggcagaagcagggaggatatgacagaggcagaacagattatatttgatcatttttctgatcctaaatttgttgagcagttaattacttttctatcattagaagacagaaaaggaaaagataagtttaatccacgacgtttttgcctctttaagggtatattcaggaattttgatgatgccttcctgccagttctgaagccccatttagaacatttggttgcagattcacatgaaagcacccagcgatgtgttgcagaaattatagctggtttaatcagaggttctaagcactggacatttgaaaaggtggagaagctttgggagcttctgtgccctctgcttagaacagcactgtccaatattaccgtagaaacttataatgactggggagcttgtatagcaacatcctgtgaaagcagagatccccggaaacttcactggctttttgaactgctgttggaatcaccattgagtggtgaaggaggatcctttgtagatgcatgtcgactttatgtactacaaggtggccttgcccagcaagaatggagagtgcctgaactattgcacagactactgaagtacttggaacccaaactcacccaggtttacaaaaatgtcagagaaagaataggaagtgtgctgacctacatattcatgatagatgtatctttgccaaataccacaccaaccatatcgcctcatgtccctgagtttactgctcgaattctggagaaattgaaacctctcatggatgtggatgaagaaattcagaaccatgttatggaagaaaatggaattggtgaagaagatgagcgaactcagggcattaaactcttgaaaaccatattgaaatggctgatggcaagtgcaggaagatccttttctacagcagttacagaacaacttcagcttctacctttgtttttcaagattgccccagtggaaaatgacaatagctacgatgaactgaaaagagatgcaaagttatgtttatcattaatgtctcaggggttgctttaccctcatcaagtgcctttggtacttcaggtgctaaaacaagttcgagaaatggctgctactaccttaagcggtctgctacagtgtaactttcttaccatggacagtcctatgcagattcattttgagcaactttgcaaaacaaaactacctaagaaaagaaagcgagaccctggttctgtaggagataccattccttctgcagagttggtcaaacgccatgctggggtgctaggacttggtgcatgtgttctttctagtccttacgatgttcccacctggatgccccagctcctcatgaatctcagtgcacatctaaatgatcctcagcctattgagatgactgtaaaaaaaaccttatccaatttccgaaggactcaccatgacaactggcaggaacataaacagcaattcactgatgaccaactgcttgttctcaccgatcttcttgtgtcaccatgctattatgcatagaaagatgactagtcctcacttcaggctcttttcatcaaaaattccacaccctcaggtaccatctgtggtggctctctgcaagttttaaaactgcctctgctgagctctcatcattttggtggtttctgtgttagatctcgttagtctgcattccacagcttctcagttgccatttgatttcccaacttgtccggaagtgtttccagaatactgatcactttttttttttgaggcatctgacaaagtcacaaagtctcagactagaaataattacccagtatgatcatggcatccaagaccagagtctcagaactcattaagaaacagtttacttggaatggagaatacccatctgtaatacaggtcctgtcatttcattcatctcaaattattttgaattcttcccaaatggctgctggatttaggtggtaataggggctgtgggccataaatctgaagccttgagaaccttgggtctggagagccatgaagagggaaggaaaagagggcaagtcctgaacctaaccaatgacctgatggattgctcgaccaagacacagaagtgaagtctgtgtctgtgcacttcccacagactggagtttttggtgctgaatagagccagttgctaaaaaattgggggtttggtgaagaaatctgattgttgtgtgtattcaatgtgtgattttaaaaataaacagcaacaacaataaaaaccctga

SEQ ID NO: 439322 - DNA, 6397 bp, Homo sapiens
accgtagaggatcccctagtgtggaaagcgagtgagaggtgtcggggatggttgctctttgtccagagggctggacccttagctctgtcctcgctggagctgtccccgagcggtgatcccagggtcgtgacagagcctgtgaagtactcaagccgtcctccctgccactttcctacgggacttcccgggtctttaccatccctctacgtcgctccctagaggtagttggagagctaggggtaccgagcgcgagttcggagtcggggtcgtgggggttcgctgtgtagaaatggattgccgtaaacaagctgctgccctacgcggagcggctagacgccgagtccgacttgcagctggcccagatcaaatgcaacctgggccgggccgtgcagctccaagagctgtggcccgggggcctcttctggaccaggaaactctccacatatattcgactttatgggagaaaatttagcaaagaagatcatgttctttttattaagttattgtatgagctggtatcaattccaaaactggaaatcagcatgatgcagggatttgcccgccttttgatcaacttgttaaagaaaaaggaacttctttcaagagctgatttggagttaccctggagaccactttatgacatggtagaaagaatattatattccaagacagagcacctaggattaaattggtttcctaattctgtagaaaatattctcaaaacactcgtgaaaagctgccgaccatattttccagcagatgccaccgctgagatgctagaagaatggcgacctttaatgtgcccttttgatgtaaccatgcaaaaggccatcacttattttgaaatatttcttcctacctcccttcctccagaacttcatcataaaggttttaaactttggtttgatgaattaattggcctttgggtttcagtgcaaaatctcccacaatgggaggggcaactagtaaatctctttgctcgattggctacagataatatagggtacatagattgggatccatatgtaccaaagatatttacaagaattctgagaagcttgaacctcccagtgggaagcagtcaagtgttagtcccaagatttttaacaaatgcttatgatataggacatgctgtaatatggatcaccgccatgatgggtggaccaagtaagctagtgcaaaaacacttagctggtttgtttaacagcatcacatctttttaccatccttcaaataatgggcgctggctgaacaagttaatgaaactacttcagcggttgccaaacagtgttgttagaagattgcatcgtgaaagatacaagaagccctcttggttaactcctgtgcctgatagccacaagcttactgatcaagatgttacagactttgtacaatgcattattcagcctgtcctcttggctatgtttagcaaaaccggtagtctagaagcagcccaggctttgcagaatcttgcactcatgagacctgaattggtaataccccctgtacttgaaagaacatatcctgcattagagacattaacagaacctcaccagctcacagctactttaagttgtgtaattggagtagcccgcagtttggtatcaggaggcagatggtttcctgaaggtcctacacatatgctacctctgttgatgagagcattgcctggggtggatccaaatgactttagtaaatgcatgatcacattccagttcatagcaacattttctactctggtgcctttagtagattgttcatctgtactacaagaaagaaatgacctcacagaagtggaacgagaactttgttcagccacagctgaatttgaggatttcgtcttacagtttatggacagatgttttggacttatagaaagtagcacattggagcaaacaagagaagagacagaaactgagaaaatgacacacttggagagtttggtcgaattaggtctgtcttctacgtttagtacaatcctcacccaatgttccaaagaaatatttatggtggcccttcagaaggtttttaatttttctacttcacatatatttgaaacaagagtagcaggtcgcatggtggcagacatgtgccgcgctgctgtaaagtgctgcccagaagaatctttgaagctctttgttccccactgctgcagtgttataactcagcttacaatgaatgatgatgtattaaatgatgaagagctagacaaggaattactatggaatcttcaacttttgtctgagattactcgagtggatggaaggaagttgcttctttatagggagcagcttgtaaagattctccaaagaaccctacatttaacctgtaagcagggttacactctgtcttgtaaccttttgcatcatcttctccgttctaccacacttatctaccctacagaatactgcagtgtgccaggtggctttgacaagcctccttctgaatactttcctatcaaggactggggcaaacccggggacttgtggaatctgggaatccagtggcatgttccttcttcagaagaagtgtcttttgccttttatcttttggactcctttcttcagcctgagctcgtcaaactccagcattgtggggatggaaaacttgaaatgtctagagatgatattctacagagtctgactatagtgcacaactgtttaattggctctggaaacctcctacctccgttgaaaggagagccagttactaacttagtaccaagtatggtgtccttggaagagacaaagttgtatactggacttgaatatgatctgtctcgagagaaccaccgagaagtaattgctacagttataaggaaacttcttaaccacatacttgataattcagaagatgatactaagtcattgtttcttattataaagattattggagaccttttacaattccaaggatctcacaagcatgaatttgactcccgatggaaaagcttcaacttagtaaagaaatcaatggaaaatcggctccatgggaaaaaacaacatatcagagcactgttgattgatagagtaatgttacagcatgagctacggacactaactgttgagggttgtgaatacaaaaagatacatcaagatatgatcagagatcttcttcgtttatctacaagttcatacagtcaggtgagaaataaggctcagcaaacattttttgctgccttgggagcatataacttctgttgcagagatatcattcccttggttttggagttcttaaggcctgatagacaaggtgttacacagcaacaattcaagggtgccttgtactgtctccttggaaatcacagtggtgtgtgcttggcaaaccttcatgattgggactgtattgtacagacgtggccagcgattgtttcttcagggcttagccaagcaatgtccctggaaaagccatcaatagtgagattgtttgatgatcttgcagaaaagattcataggcagtatgaaacaattggcttggacttcacaattccaaagtcatgtgttgaaatagcggaattacttcaacagtcaaaaaacccctctatcaaccagatattgcttagcccagaaaaaattaaggaaggaattaaacgccaacaggaaaagaatgccgatgccctaaggaactatgaaaatttggtagacaccttgctagatggtgtggagcaaagaaacctgccctggaaatttgaacatataggcattgggcttctgtctctactgctgagagatgaccgagtgttgcctcttcgtgccatacggttttttgttgagaatctcaaccatgatgcaattgtagttcgaaagatggctatctcagctgttgctggtatccttaaacagctaaaaagaacccacaaaaagctgaccattaacccctgtgaaatcagtggatgccctaaacccacccaaattattgctggtgataggcctgataatcattggttgcattatgacagcaaaactataccaagaactaaaaaagaatgggagtcaagttgctttgtggaaaaaactcactggggatactacacctggccaaagaatatggttgtttatgctggtgtggaagagcagcctaagcttggcagaagcagggaggatatgacagaggcagaacagattatatttgatcatttttctgatcctaaatttgttgagcagttaattacttttctatcattagaagacagaaaaggaaaagataagtttaatccacgacgtttttgcctctttaagggtatattcaggaattttgatgatgccttcctgccagttctgaagccccatttagaacatttggttgcagattcacatgaaagcacccagcgatgtgttgcagaaattatagctggtttaatcagaggttctaagcactggacatttgaaaaggtggagaagctttgggagcttctgtgccctctgcttagaacagcactgtccaatattaccgtagaaacttataatgactggggagcttgtatagcaacatcctgtgaaagcagagatccccggaaacttcactggctttttgaactgctgttggaatcaccattgagtggtgaaggaggatcctttgtagatgcatgtcgactttatgtactacaaggtggccttgcccagcaagaatggagagtgcctgaactattgcacagactactgaagtacttggaacccaaactcacccaggtttacaaaaatgtcagagaaagaataggaagtgtgctgacctacatattcatgatagatgtatctttgccaaataccacaccaaccatatcgcctcatgtccctgagtttactgctcgaattctggagaaattgaaacctctcatggatgtggatgaagaaattcagaaccatgttatggaagaaaatggaattggtgaagaagatgagcgaactcagggcattaaactcttgaaaaccatattgaaatggctgatggcaagtgcaggaagatccttttctacagcagttacagaacaacttcagcttctacctttgtttttcaagattgccccagtggaaaatgacaatagctacgatgaactgaaaagagatgcaaagttatgtttatcattaatgtctcaggggttgctttaccctcatcaagtgcctttggtacttcaggtgctaaaacaaacagcaagaagcagttcttggcatgcacgatacacagtactgacctacctccagaccatggtattttataacctctttattttcctaaacaatgaagatgcagttaaagatatcaggtggctggttataagtcttttggaggacgaacaactggaggttcgagaaatggctgctactaccttaagcggtctgctacagtgtaactttcttaccatggacagtcctatgcagattcattttgagcaactttgcaaaacaaaactacagttggtcaaacgccatgctggggtgctaggacttggtgcatgtgttctttctagtccttacgatgttcccacctggatgccccagctcctcatgaatctcagtgcacatctaaatgatcctcagcctattgagatgactgtaaaaaaaaccttatccaatttccgaaggactcaccatgacaactggcaggaacataaacagcaattcactgatgaccaactgcttgttctcaccgatcttcttgtgtcaccatgctattatgcatagaaagatgactagtcctcacttcaggctcttttcatcaaaaattccacaccctcaggtaccatctgtggtggctctctgcaagttttaaaactgcctctgctgagctctcatcattttggtggtttctgtgttagatctcgttagtctgcattccacagcttctcagttgccatttgatttcccaacttgtccggaagtgtttccagaatactgatcactttttttttttgaggcatctgacaaagtcacaaagtctcagactagaaataattacccagtatgatcatggcatccaagaccagagtctcagaactcattaagaaacagtttacttggaatggagaatacccatctgtaatacaggtcctgtcatttcattcatctcaaattattttgaattcttcccaaatggctgctggatttaggtggtaataggggctgtgggccataaatctgaagccttgagaaccttgggtctggagagccatgaagagggaaggaaaagagggcaagtcctgaacctaaccaatgacctgatggattgctcgaccaagacacagaagtgaagtctgtgtctgtgcacttcccacagactggagtttttggtgctgaatagagccagttgctaaaaaattgggggtttggtgaagaaatctgattgttgtgtgtattcaatgtgtgattttaaaaataaacagcaacaacaataaaaaccctga

SEQ ID NO: 439323 - DNA, 1325 bp, Homo sapiens
ggaaggtctataccctgaacgaagaccggcaatgggacgaccgaggcaccgggcacgtctcctccacttacgtggaggagctcaaggggatgtcgctgctggttcgggcagagtccgacggatcactactcttggaatcaaagataaatccaaatactgcatatcagaaacaacgttcgagaaatggctgctactaccttaagcggtctgctacagtgtaactttcttaccatggacagtcctatgcagattcattttgagcaactttgcaaaacaaaactacctaagaaaagaaagcgagaccctggttctgtaggagataccattccttctgcagagttggtcaaacgccatgctggggtgctaggacttggtgcatgtgttctttctagtccttacgatgttcccacctggatgccccagctcctcatgaatctcagtgcacatctaaatgatcctcagcctattgagatgactgtaaaaaaaaccttatccaatttccgaaggactcaccatgacaactggcaggaacataaacagcaattcactgatgaccaactgcttgttctcaccgatcttcttgtgtcaccatgctattatgcatagaaagatgactagtcctcacttcaggctcttttcatcaaaaattccacaccctcaggtaccatctgtggtggctctctgcaagttttaaaactgcctctgctgagctctcatcattttggtggtttctgtgttagatctcgttagtctgcattccacagcttctcagttgccatttgatttcccaacttgtccggaagtgtttccagaatactgatcactttttttttttgaggcatctgacaaagtcacaaagtctcagactagaaataattacccagtatgatcatggcatccaagaccagagtctcagaactcattaagaaacagtttacttggaatggagaatacccatctgtaatacaggtcctgtcatttcattcatctcaaattattttgaattcttcccaaatggctgctggatttaggtggtaataggggctgtgggccataaatctgaagccttgagaaccttgggtctggagagccatgaagagggaaggaaaagagggcaagtcctgaacctaaccaatgacctgatggattgctcgaccaagacacagaagtgaagtctgtgtctgtgcacttcccacagactggagtttttggtgctgaatagagccagttgctaaaaaattgggggtttggtgaagaaatctgattgttgtgtgtattcaatgtgtgattttaaaaataaacagcaacaacaataaaaaccctga

SEQ ID NO: 439324 - DNA, 5423 bp, Homo sapiens
accgtagaggatcccctagtgtggaaagcgagtgagaggtgtcggggatggttgctctttgtccagagggctggacccttagctctgtcctcgctggagctgtccccgagcggtgatcccagggtcgtgacagagcctgtgaagtactcaagccgtcctccctgccactttcctacgggacttcccgggtctttaccatccctctacgtcgctccctagaggtagttggagagctaggggtaccgagcgcgagttcggagtcggggtcgtgggggttcgctgtgtagaaatggattgccgtaaacaagctgctgccctacgcggagcggctagacgccgagtccgacttgcagctggcccagatcaaatgcaacctgggccgggccgtgcagctccaagagctgtggcccgggggcctcttctggaccaggaaactctccacatatattcgactttatgggagaaaatttagcaaagaagatcatgttctttttattaagttattgtatgagctggtatcaattccaaaactggaaatcagcatgatgcagggatttgcccgccttttgatcaacttgttaaagaaaaaggaacttctttcaagagctgatttggagttaccctggagaccactttatgacatggtagaaagaatattatattccaagacagagcacctaggattaaattggtttcctaattctgtagaaaatattctcaaaacactcgtgaaaagctgccgaccatattttccagcagatgccaccgctgagatgctagaagaatggcgacctttaatgtgcccttttgatgtaaccatgcaaaaggccatcacttattttgaaatatttcttcctacctcccttcctccagaacttcatcataaaggttttaaactttggtttgatgaattaattggcctttgggtttcagtgcaaaatctcccacaatgggaggggcaactagtaaatctctttgctcgattggctacagataatatagggtacatagattgggatccatatgtaccaaagatatttacaagaattctgagaagcttgaacctcccagtgggaagcagtcaagtgttagtcccaagatttttaacaaatgcttatgatataggacatgctgtaatatggatcaccgccatgatgggtggaccaagtaagctagtgcaaaaacacttagctggtttgtttaacagcatcacatctttttaccatccttcaaataatgggcgctggctgaacaagttaatgaaactacttcagcggttgccaaacagtgttgttagaagattgcatcgtgaaagatacaagaagccctcttggttaactcctgtgcctgatagccacaagcttactgatcaagatgttacagactttgtacaatgcattattcagcctgtcctcttggctatgtttagcaaaaccggtagtctagaagcagcccaggctttgcagaatcttgcactcatgagacctgaattggtaataccccctgtacttgaaagaacatatcctgcattagagacattaacagaacctcaccagctcacagctactttaagttgtgtaattggagtagcccgcagtttggtatcaggaggcagatggtttcctgaaggtcctacacatatgctacctctgttgatgagagcattgcctggggtggatccaaatgactttagtaaatgcatgatcacattccagttcatagcaacattttctactctggtgcctttagtagattgttcatctgtactacaagaaagaaatgacctcacagaagtggaacgagaactttgttcagccacagctgaatttgaggatttcgtcttacagtttatggacagatgttttggacttatagaaagtagcacattggagcaaacaagagaagagacagaaactgagaaaatgacacacttggagagtttggtcgaattaggtctgtcttctacgtttagtacaatcctcacccaatgttccaaagaaatatttatggtggcccttcagaaggtttttaatttttctacttcacatatatttgaaacaagagtagcaggtcgcatggtggcagacatgtgccgcgctgctgtaaagtgctgcccagaagaatctttgaagctctttgttccccactgctgcagtgttataactcagcttacaatgaatgatgatgtattaaatgatgaagagctagacaaggaattactatggaatcttcaacttttgtctgagattactcgagtggatggaaggaagttgcttctttatagggagcagcttgtaaagattctccaaagaaccctacatttaacctgtaagcagggttacactctgtcttgtaaccttttgcatcatcttctccgttctaccacacttatctaccctacagaatactgcagtgtgccaggtggctttgacaagcctccttctgaatactttcctatcaaggactggggcaaacccggggacttgtggaatctgggaatccagtggcatgttccttcttcagaagaagtgtcttttgccttttatcttttggactcctttcttcagcctgagctcgtcaaactccagcattgtggggatggaaaacttgaaatgtctagagatgatattctacagagtctgactatagtgcacaactgtttaattggctctggaaacctcctacctccgttgaaaggagagccagttactaacttagtaccaagtatggtgtccttggaagagacaaagttgtatactggacttgaatatgatctgtctcgagagaaccaccgagaagtaattgctacagttataaggaaacttcttaaccacatacttgataattcagaagatgatactaagtcattgtttcttattataaagattattggagaccttttacaattccaaggatctcacaagcatgaatttgactcccgatggaaaagcttcaacttagtaaagaaatcaatggaaaatcggctccatgggaaaaaacaacatatcagagcactgttgattgatagagtaatgttacagcatgagctacggacactaactgttgagggttgtgaatacaaaaagatacatcaagatatgatcagagatcttcttcgtttatctacaagttcatacagtcaggtgagaaataaggctcagcaaacattttttgctgccttgggagcatataacttctgttgcagagatatcattcccttggttttggagttcttaaggcctgatagacaaggtgttacacagcaacaattcaagggtgccttgtactgtctccttggaaatcacagtggtgtgtgcttggcaaaccttcatgattgggactgtattgtacagacgtggccagcgattgtttcttcagggcttagccaagcaatgtccctggaaaagccatcaatagtgagattgtttgatgatcttgcagaaaagattcataggcagtatgaaacaattggcttggacttcacaattccaaagtcatgtgttgaaatagcggaattacttcaacagtcaaaaaacccctctatcaaccagatattgcttagcccagaaaaaattaaggaaggaattaaacgccaacaggaaaagaatgccgatgccctaaggaactatgaaaatttggtagacaccttgctagatggtgtggagcaaagaaacctgccctggaaatttgaacatataggcattgggcttctgtctctactgctgagagatgaccgagtgttgcctcttcgtgccatacggttttttgttgagaatctcaaccatgatgcaattgtagttcgaaagatggctatctcagctgttgctggtatccttaaacagctaaaaagaacccacaaaaagctgaccattaacccctgtgaaatcagtggatgccctaaacccacccaaattattgctggtgataggcctgataatcattggttgcattatgacagcaaaactataccaagaactaaaaaagaatgggagtcaagttgctttgtggaaaaaactcactggggatactacacctggccaaagaatatggttgtttatgctggtgtggaagagcagcctaagcttggcagaagcagggaggatatgacagaggcagaacagattatatttgatcatttttctgatcctaaatttgttgagcagttaattacttttctatcattagaagacagaaaaggaaaagataagtttaatccacgacgtttttgcctctttaagggtatattcaggaattttgatgatgccttcctgccagttctgaagccccatttagaacatttggttgcagattcacatgaaagcacccagcgatgtgttgcagaaattatagctggtttaatcagaggttctaagcactggacatttgaaaaggtggagaagctttgggagcttctgtgccctctgcttagaacagcactgtccaatattaccgtagaaacttataatgactggggagcttgtatagcaacatcctgtgaaagcagagatccccggaaacttcactggctttttgaactgctgttggaatcaccattgagtggtgaaggaggatcctttgtagatgcatgtcgactttatgtactacaaggtggccttgcccagcaagaatggagagtgcctgaactattgcacagactactgaagtacttggaacccaaactcacccaggtttacaaaaatgtcagagaaagaataggaagtgtgctgacctacatattcatgatagatgtatctttgccaaataccacaccaaccatatcgcctcatgtccctgagtttactgctcgaattctggagaaattgaaacctctcatggatgtggatgaagaaattcagaaccatgttatggaagaaaatggaattggtgaagaagatgagcgaactcagggcattaaactcttgaaaaccatattgaaatggctgatggcaagtgcaggaagatccttttctacagcagttacagaacaacttcagcttctacctttgtttttcaagattgccccagtggaaaatgacaatagctacgatgaactgaaaagagatgcaaagttatgtttatcattaatgtctcaggggttgctttaccctcatcaagtgcctttggtacttcaggtgctaaaacaaacagcaagaagcagttcttggcatgcacgatacacagtactgacctacctccagaccatggtattttataacctctttattttcctaaacaatgaagatgcagttaaagatatcaggtggctggttataagtcttttggaggacgaacaactggagaaaatatactgcaggccgggcacagaggcttacgcctgtaatcccagcactttgggaggccaaggcaggaggattgcttgagcccacgagttggagatcagcctgggcaacaaaaaaaaaagt

SEQ ID NO: 439325 - DNA, 3331 bp, Homo sapiens
accgtagaggatcccctagtgtggaaagcgagtgagaggtgtcggggatggttgctctttgtccagagggctggacccttagctctgtcctcgctggagctgtccccgagcggtgatcccagggtcgtgacagagcctgtgaagtactcaagccgtcctccctgccactttcctacgggacttcccgggtctttaccatccctctacgtcgctccctagaggtagttggagagctaggggtaccgagcgcgagttcggagtcggggtcgtgggggttcgctgtgtagaaatggattgccgtaaacaagctgctgccctacgcggagcggctagacgccgagtccgacttgcagctggcccagatcaaatgcaacctgggccgggccgtgcagctccaagagctgtggcccgggggcctcttctggaccaggaaactctccacatatattcgactttatgggagaaaatttagcaaagaagatcatgttctttttattaagttattgtatgagctggtatcaattccaaaactggaaatcagcatgatgcagggatttgcccgccttttgatcaacttgttaaagaaaaaggaacttctttcaagagctgatttggagttaccctggagaccactttatgacatggtagaaagaatattatattccaagacagagcacctaggattaaattggtttcctaattctgtagaaaatattctcaaaacactcgtgaaaagctgccgaccatattttccagcagatgccaccgctgagatgctagaagaatggcgacctttaatgtgcccttttgatgtaaccatgcaaaaggccatcacttattttgaaatatttcttcctacctcccttcctccagaacttcatcataaaggttttaaactttggtttgatgaattaattggcctttgggtttcagtgcaaaatctcccacaatgggaggggcaactagtaaatctctttgctcgattggctacagataatatagggtacatagattgggatccatatgtaccaaagatatttacaagaattctgagaagcttgaacctcccagtgggaagcagtcaagtgttagtcccaagatttttaacaaatgcttatgatataggacatgctgtaatatggatcaccgccatgatgggtggaccaagtaagctagtgcaaaaacacttagctggtttgtttaacagcatcacatctttttaccatccttcaaataatgggcgctggctgaacaagttaatgaaactacttcagcggttgccaaacagtgttgttagaagattgcatcgtgaaagatacaagaagccctcttggttaactcctgtgcctgatagccacaagcttactgatcaagatgttacagactttgtacaatgcattattcagcctgtcctcttggctatgtttagcaaaaccggtagtctagaagcagcccaggctttgcagaatcttgcactcatgagacctgaattggtaataccccctgtacttgaaagaacatatcctgcattagagacattaacagaacctcaccagctcacagctactttaagttgtgtaattggagtagcccgcagtttggtatcaggaggcagatggtttcctgaaggtcctacacatatgctacctctgttgatgagagcattgcctggggtggatccaaatgactttagtaaatgcatgatcacattccagttcatagcaacattttctactctggtgcctttagtagattgttcatctgtactacaagaaagaaatgacctcacagaagtggaacgagaactttgttcagccacagctgaatttgaggatttcgtcttacagtttatggacagatgttttggacttatagaaagtagcacattggagcaaacaagagaagagacagaaactgagaaaatgacacacttggagagtttggtcgaattaggtctgtcttctacgtttagtacaatcctcacccaatgttccaaagaaatatttatggtggcccttcagaaggtttttaatttttctacttcacatatatttgaaacaagagtagcaggtcgcatggtggcagacatgtgccgcgctgctgtaaagtgctgcccagaagaatctttgaagctctttgttccccactgctgcagtgttataactcagcttacaatgaatgatgatgtattaaatgatgaagagctagacaaggaattactatggaatcttcaacttttgtctgagattactcgagtggatggaaggaagttgcttctttatagggagcagcttgtaaagattctccaaagaaccctacatttaacctgtaagcagggttacactctgtcttgtaaccttttgcatcatcttctccgttctaccacacttatctaccctacagaatactgcagtgtgccaggtggctttgacaagcctccttctgaatactttcctatcaaggactggggcaaacccggggacttgtggaatctgggaatccagtggcatgttccttcttcagaagaagtgtcttttgccttttatcttttggactcctttcttcagcctgagctcgtcaaactccagcattgtggggatggaaaacttgaaatgtctagagatgatattctacagagtctgactatagtgcacaactgtttaattggctctggaaacctcctacctccgttgaaaggagagccagttactaacttagtaccaagtatggtgtccttggaagagacaaagttgtatactggacttgaatatgatctgtctcgagagaaccaccgagaagtaattgctacagttataaggaaacttcttaaccacatacttgataattcagaagatgatactaagtcattgtttcttattataaagattattggagaccttttacaattccaaggatctcacaagcatgaatttgactcccgatggaaaagcttcaacttagtaaagaaatcaatggaaaatcgggtcagtattttcacctaaaagtctgcactaattgttttaaagtcgtataataacctcgtaatttgggtattattcagcatatagaagaagttttcctaaaaggaaaaatagtagatttaaaagtatgtaaaagttaaaaacatcatggtagaaatcaaatggatcctagcaaaaaatatatttttcttatacagaatcttctgcctgtttccatgacagtctctaaactctcaatgggaatttggacaatagcattgagactaccttgtaagaacttgaaggaatttaaaaataggaggaattatctatgggcatgaatttaaagcattacactttatgtagatctg

SEQ ID NO: 439326 - DNA, 800 bp, Homo sapiens
  misc_feature (768)..(768): n is a, c, g, or t
  misc_feature (777)..(777): n is a, c, g, or t
agatatctacgtctaggaagaggagggggcataggcattccatgtaaacttaacacctgggttacgatctggaaggatgaaaaagcatggctttttttggccaggcgcggtggctcacgcctgtaatcccagcactttgggaggctaaggcgggcggatcacgaggtcaggagatcgagatcatcctggctaacacggtgaaaccccgtctctactaaaaatacaaaaaattagctgcgcgtggtggtgagcgcctgtagtcccagctactggggaggctgaggcaggagaatggcgtgaacccaggaggtggagcttgcagtgagctgagatagtgccactgcactccagcctgggcggtaaagcgagactccatctcaaaaaaaaaaaaaaagaaaaagcatggctttttaaaaattcttggccctttgtcctctctgggattggagtttgggacatagagtggctggatgggcaggtagggtagaagcctggcatttgtgtccacacttggtggggctgtctctcactcagcggggagacaaccccttccccaagaatgctgatgggactatatgctacgactccacccactacaaggagacttggaaggctctggaggcactggtggctaaggggctggtgcaggcgctgggcctgtccaacttcaacagtcggcagattgatgacatactcagtgtggcctccgtgcgtccagctgtcttgcagggaatgcccccatcttgggtttgacttgccactgccacntggcctgangtactggtatgcctttggcttct

SEQ ID NO: 439327 - DNA, 565 bp, Homo sapiens
ccaagcctcagcttcctatgtgtaaaatgagcccagttcctgacatgtagtagattctcagtaaatgatatgaggagagcccagaaggcgttgttgacctcactcgagggattggggttgggagggaagtcggctgtacttagggaaataaatggttcctggcctcttgatctcagttcagactgcaaactcttaggggcaggggtagctacatatcaggctatgggtttggtgctagaatggtgttgatactgtggtgttctctgaggatggggatcccagccaatgccatctggcatagtgctgtacacaggtgagtttgtttaggaagatttggggaagatgcctggagtctttggaatggcaactcctgctgatggagtaatctatctgtctctctttccaggtggatgggaagagagtcccaagggatgcagggcatcctctgtacccctttaatgacccgtactgagaccacagcttcttggcctcccttccagctctgcagctaatgaggtcctgccacaacggaaagagggagttaataaagccattggagcatcca

SEQ ID NO: 439328 - DNA, 339 bp, Homo sapiens
gccctgactctacctggctaaaaaggcagtgttgtggaaccccagcttctgctcacaaagctggctttcttgaaccccactctccatcctcaggtgtttgacttcacctttagcccagaagagatgaagcagctaaatgccctgaacaaaaattggagatatattgtgcctatgcttacggtggatgggaagagagtcccaagggatgcagggcatcctctgtacccctttaatgacccgtactgagaccacagcttcttggcctcccttccagctctgcagctaatgaggtcctgccacaacggaaagagggagttaataaagccattggagcatcca

SEQ ID NO: 439329 - DNA, 398 bp, Homo sapiens
ctggagggagcccactgtaggcatatttcccatttcagcagggctcaggtgctccaggagcttagggaagctgcatggggaactaaatagtgcttatgaatactgaccccttttcctcatcgctgggcctgtccaacttcaacagtcggcagattgatgacatactcagtgtggcctccgtgcgtccagctgtcttgcaggtaaggacagcaagcagatgagtggtttaggggttgtctgctcaagagcatgagggagcagacgatggatctgcttaagggagatagctagcaagttgtcagagtgttggtgcagaagtcctctgcataaaggtgggcattgaagcagtgggagagaatgaaattgccgatgggaaatggtgagaaaagcaggctgaa

SEQ ID NO: 439330 - DNA, 1457 bp, Homo sapiens
ggccagcaaaaggcgaggctggccccgccccttgcaccgcccacgtggccagcgccacctgcctcattgtgcccaggagttctccaaacccgcgctgcggagtgagtgaccaagttccggccagttcgacctcgaggatccagaggtggagacggtactacctcccagctctgttttccatccccttcaggtccttcctcgggaggcggcgaaggcggtccaccctgcgcgtgatcctttatgcccggcccctgcccctccctccgggtggaacttccccctcaccgccagacttaagctgaggatcgttggatctctggcggggtgcagaactgagcccaggccacagtaccctattcacgctctgtgcttgtgccaagggggcaatggcggcttcctgtgttctactgcacactgggcagaagatgcctctgattggtctgggtacctggaagagtgagcctggtcaggtaaaagcagctgttaagtatgcccttagcgtaggctaccgccacattgattgtgctgctatctacggcaatgagcctgagattggggaggccctgaaggaggacgtgggaccaggcaaggcggtgcctcgggaggagctgtttgtgacatccaagctgtggaacaccaagcaccaccccgaggatgtggagcctgccctccggaagactctggctgacctccagctggagtatctggacctgtacctgatgcactggccttatgcctttgagcggggagacaaccccttccccaagaatgctgatgggactatatgctacgactccacccactacaaggagacttggaaggctctggaggcactggtggctaaggggctggtgcaggcgctgggcctgtccaacttcaacagtcggcagattgatgacatactcagtgtggcctccgtgcgtccagctgtcttgcaggtggaatgccacccatacttggctcaaaatgagctaattgcccactgccaagcacgtggcctggaggtaactgcttatagccctttgggctcctctgatcgtgcatggcgtgatcctgatgagcctgtcctgctggaggaaccagtagtcctggcattggctgaaaagtatggccgatctccagctcagatcttgctcaggtggcaggtccagcggaaagtgatctgcatccccaaaagtatcactccttctcgaatccttcagaacatcaaggtgtttgacttcacctttagcccagaagagatgaagcagctaaatgccctgaacaaaaattggagatatattgtgcctatgcttacggtggatgggaagagagtcccaagggatgcagggcatcctctgtacccctttaatgacccgtactgagaccacagcttcttggcctcccttccagctctgcagctaatgaggtcctgccacaacggaaagagggagttaataaagccattggagcatcca

SEQ ID NO: 439331 - DNA, 1585 bp, Homo sapiens
ggccagcaaaaggcgaggctggccccgccccttgcaccgcccacgtggccagcgccacctgcctcattgtgcccaggagttctccaaacccgcgctgcggagtgagtgaccaagttccggccagttcgacctcgaggatccagaggtggagacggtactacctcccagctctgttttccatccccttcaggtccttcctcgggaggcggcgaaggcggtccaccctgcgcgtgatcctttatgcccggcccctgcccctccctccgggtggaacttccccctcaccgccagacttaagctgaggatcgttggatctctggcggggtgcagaactgagcccaggccacagtaccctattcacgctctgtgcttgtgccaaggtttcaagtgatcctcccgcctcagcctgcccaggtgctgagattacatgtatgagccactgcacctggaaaggagccagaaatgtgaagtgctagctgaaggatgagcagcagctagccaggcaaagggggcaatggcggcttcctgtgttctactgcacactgggcagaagatgcctctgattggtctgggtacctggaagagtgagcctggtcaggtaaaagcagctgttaagtatgcccttagcgtaggctaccgccacattgattgtgctgctatctacggcaatgagcctgagattggggaggccctgaaggaggacgtgggaccaggcaaggcggtgcctcgggaggagctgtttgtgacatccaagctgtggaacaccaagcaccaccccgaggatgtggagcctgccctccggaagactctggctgacctccagctggagtatctggacctgtacctgatgcactggccttatgcctttgagcggggagacaaccccttccccaagaatgctgatgggactatatgctacgactccacccactacaaggagacttggaaggctctggaggcactggtggctaaggggctggtgcaggcgctgggcctgtccaacttcaacagtcggcagattgatgacatactcagtgtggcctccgtgcgtccagctgtcttgcaggtggaatgccacccatacttggctcaaaatgagctaattgcccactgccaagcacgtggcctggaggtaactgcttatagccctttgggctcctctgatcgtgcatggcgtgatcctgatgagcctgtcctgctggaggaaccagtagtcctggcattggctgaaaagtatggccgatctccagctcagatcttgctcaggtggcaggtccagcggaaagtgatctgcatccccaaaagtatcactccttctcgaatccttcagaacatcaaggtgtttgacttcacctttagcccagaagagatgaagcagctaaatgccctgaacaaaaattggagatatattgtgcctatgcttacggtggatgggaagagagtcccaagggatgcagggcatcctctgtacccctttaatgacccgtactgagaccacagcttcttggcctcccttccagctctgcagctaatgaggtcctgccacaacggaaagagggagttaataaagccattggagcatcca

SEQ ID NO: 439332 - DNA, 1479 bp, Homo sapiens
ggccagcaaaaggcgaggctggccccgccccttgcaccgcccacgtggccagcgccacctgcctcattgtgcccaggagttctccaaacccgcgctgcggagtgagtgaccaagttccggccagttcgacctcgaggatccagaggtggagacggtactacctcccagctctgttttccatccccttcaggtccttcctcgggaggcggcgaaggcggtccaccctgcgcgtgatcctttatgcccggcccctgcccctccctccgggtggaacttccccctcaccgccagacttaagctgaggatcgttggatctctggcggggtgcagaactgagcccaggccacagtaccctattcacgctctgtgcttgtgccaagggggcaatggcggcttcctgtgttctactgcacactgggcagaagatgcctctgattggtctgggtacctggaagagtgagcctggtcaggtaaaagcagctgttaagtatgcccttagcgtaggctaccgccacattgattgtgctgctatctacggcaatgagcctgagattggggaggccctgaaggaggacgtgggaccaggcaaggcggtgcctcgggaggagctgtttgtgacatccaagctgtggaacaccaagcaccaccccgaggatgtggagcctgccctccggaagactctggctgacctccagctggagtatctggacctgtacctgatgcactggccttatgcctttgagcggggagacaaccccttccccaagaatgctgatgggactatatgctacgactccacccactacaaggagacttggaaggctctggaggcactggtggctaaggggctggtgcaggcgctgggcctgtccaacttcaacagtcggcagattgatgacatactcagtgtggcctccgtgcgtccagctgtcttgcaggtggaatgccacccatacttggctcaaaatgagctaattgcccactgccaagcacgtggcctggaggtaactgcttatagccctttgggctcctctgatcgtgcatggcgtgatcctgatgagcctgtcctgctggaggaaccagtagtcctggcattggctgaaaagtatggccgatctccagctcagatcttgctcaggtggcaggtccagcggaaagtgatctgcatccccaaaagtatcactccttctcgaatccttcagaacatcaaggtgtttgacttcacctttagcccagaagagatgaagcagctaaatgccctgaacaaaaattggagatatattgtgcctatgcttacggtggatgggaagagagtcccaagggatgcagggcatcctctgtacccctttaatgacccgtactgagaccacagcttcttggcctcccttccagctctgcagctaatgaggtcctgccacaacggaaagagggagttaataaagccattggagcatccaatcagagaattgcttgcttgtc

SEQ ID NO: 439333 - DNA, 1496 bp, Homo sapiens
ggccagcaaaaggcgaggctggccccgccccttgcaccgcccacgtggccagcgccacctgcctcattgtgcccaggagttctccaaacccgcgctgcggagtccttcctcgggaggcggcgaaggcggtccaccctgcgcgtgatcctttatgcccggcccctgcccctccctccgggtggaacttccccctcaccgccagacttaagctgaggatcgttggatctctggcggggtgcagaactgagcccaggccacagtaccctattcacgctctgtgcttgtgccaaggtttcaagtgatcctcccgcctcagcctgcccaggtgctgagattacatgtatgagccactgcacctggaaaggagccagaaatgtgaagtgctagctgaaggatgagcagcagctagccaggcaaagggggcaatggcggcttcctgtgttctactgcacactgggcagaagatgcctctgattggtctgggtacctggaagagtgagcctggtcaggtaaaagcagctgttaagtatgcccttagcgtaggctaccgccacattgattgtgctgctatctacggcaatgagcctgagattggggaggccctgaaggaggacgtgggaccaggcaaggcggtgcctcgggaggagctgtttgtgacatccaagctgtggaacaccaagcaccaccccgaggatgtggagcctgccctccggaagactctggctgacctccagctggagtatctggacctgtacctgatgcactggccttatgcctttgagcggggagacaaccccttccccaagaatgctgatgggactatatgctacgactccacccactacaaggagacttggaaggctctggaggcactggtggctaaggggctggtgcaggcgctgggcctgtccaacttcaacagtcggcagattgatgacatactcagtgtggcctccgtgcgtccagctgtcttgcaggtggaatgccacccatacttggctcaaaatgagctaattgcccactgccaagcacgtggcctggaggtaactgcttatagccctttgggctcctctgatcgtgcatggcgtgatcctgatgagcctgtcctgctggaggaaccagtagtcctggcattggctgaaaagtatggccgatctccagctcagatcttgctcaggtggcaggtccagcggaaagtgatctgcatccccaaaagtatcactccttctcgaatccttcagaacatcaaggtgtttgacttcacctttagcccagaagagatgaagcagctaaatgccctgaacaaaaattggagatatattgtgcctatgcttacggtggatgggaagagagtcccaagggatgcagggcatcctctgtacccctttaatgacccgtactgagaccacagcttcttggcctcccttccagctctgcagctaatgaggtcctgccacaacggaaagagggagttaataaagccattggagcatcca

SEQ ID NO: 439334 - DNA, 1285 bp, Homo sapiens
ggcccaagggggcctttggggattaacccggggggttcaccccgggggaattaccgggatcgctctgtgcttgtgccaaggtttcaagtgatcctcccgcctcagcctgcccaggtgctgagattacatgtatgagccactgcacctggaaaggagccagaaatgtgaagtgctagctgaaggatgagcagcagctagccaggcaaagggggcaatggcggcttcctgtgttctactgcacactgggcagaagatgcctctgattggtctgggtacctggaagagtgagcctggtcaggtaaaagcagctgttaagtatgcccttagcgtaggctaccgccacattgattgtgctgctatctacggcaatgagcctgagattggggaggccctgaaggaggacgtgggaccaggcaaggcggtgcctcgggaggagctgtttgtgacatccaagctgtggaacaccaagcaccaccccgaggatgtggagcctgccctccggaagactctggctgacctccagctggagtatctggacctgtacctgatgcactggccttatgcctttgagcggggagacaaccccttccccaagaatgctgatgggactatatgctacgactccacccactacaaggagacttggaaggctctggaggcactggtggctaaggggctggtgcaggcgctgggcctgtccaacttcaacagtcggcagattgatgacatactcagtgtggcctccgtgcgtccagctgtcttgcaggtggaatgccacccatacttggctcaaaatgagctaattgcccactgccaagcacgtggcctggaggtaactgcttatagccctttgggctcctctgatcgtgcatggcgtgatcctgatgagcctgtcctgctggaggaaccagtagtcctggcattggctgaaaagtatggccgatctccagctcagatcttgctcaggtggcaggtccagcggaaagtgatctgcatccccaaaagtatcactccttctcgaatccttcagaacatcaaggtgtttgacttcacctttagcccagaagagatgaagcagctaaatgccctgaacaaaaattggagatatattgtgcctatgcttacggtggatgggaagagagtcccaagggatgcagggcatcctctgtacccctttaatgacccgtactgagaccacagcttcttggcctcccttccagctctgcagctaatgaggtcctgccacaacggaaagagggagttaataaagccattggagcatcca

SEQ ID NO: 439335 - DNA, 1721 bp, Homo sapiens
ggccagcaaaaggcgaggctggccccgccccttgcaccgcccacgtggccagcgccacctgcctcattgtgcccaggagttctccaaacccgcgctgcggagtgagtgaccaagttccggccagttcgacctcgaggatccagaggtggagacggtactacctcccagctctgttttccatccccttcaggtccttcctcgggaggcggcgaaggcggtccaccctgcgcgtgatcctttatgcccggcccctgcccctccctccgggtggaacttccccctcaccgccagacttaagctgaggatcgttggatctctggcggggtgcagaactgagcccaggccacagtaccctattcacgctctgtgcttgtgccaagggggcaatggcggcttcctgtgttctactgcacactgggcagaagatgcctctgattggtctgggtacctggaagagtgagcctggtcaggtaaaagcagctgttaagtatgcccttagcgtaggctaccgccacattgattgtgctgctatctacggcaatgagcctgagattggggaggccctgaaggaggacgtgggaccaggcaaggcggtgcctcgggaggagctgtttgtgacatccaagctgtggaacaccaagcaccaccccgaggatgtggagcctgccctccggaagactctggctgacctccagctggagtatctggacctgtacctgatgcactggccttatgcctttgagcggggagacaaccccttccccaagaatgctgatgggactatatgctacgactccacccactacaaggagacttggaaggctctggaggcactggtggctaaggggctggtgcaggcgctgggcctgtccaacttcaacagtcggcagattgatgacatactcagtgtggcctccgtgcgtccagctgtcttgcaggtggaatgccacccatacttggctcaaaatgagctaattgcccactgccaagcacgtggcctggaggtaactgcttatagccctttgggctcctctgatcgtgcatggcgtgatcctgatgagcctgtcctgctggaggaaccagtagtcctggcattggctgaaaagtatggccgatctccagctcagatcttgctcaggtatggggcagtcttagggagagggccctgggttgggaggcaagggttaagggatttcttatttcagtgtctgggtgaggctgaggatcttgccttgtgatctggagggaggccactgtaggcatatttcccatttcagcagggctcaggtgctccaggagcttagggaagctgcatggggaacaaaatagtgcttatgaatactgaccccttttcctcatctgtctaatcccccaacttaggtggcaggtccagcggaaagtgatctgcatccccaaaagtatcactccttctcgaatccttcagaacatcaaggtgtttgacttcacctttagcccagaagagatgaagcagctaaatgccctgaacaaaaattggagatatattgtgcctatgcttacggtggatgggaagagagtcccaagggatgcagggcatcctctgtacccctttaatgacccgtactgagaccacagcttcttggcctcccttccagctctgcagctaatgaggtcctgccacaacggaaagagggagttaataaagccattggagcatccaatcagagaattgcttgcttgtc

SEQ ID NO: 439336 - DNA, 1367 bp, Homo sapiens
ggccagcaaaaggcgaggctggccccgccccttgcaccgcccacgtggccagcgccacctgcctcattgtgcccaggagttctccaaacccgcgctgcggagtgagtgaccaagttccggccagttcgacctcgaggatccagaggtggagacggtactacctcccagctctgttttccatccccttcaggtccttcctcgggaggcggcgaaggcggtccaccctgcgcgtgatcctttatgcccggcccctgcccctccctccgggtggaacttccccctcaccgccagacttaagctgaggatcgttggatctctggcggggtgcagaactgagcccaggccacagtaccctattcacgctctgtgcttgtgccaaggtaaaagcagctgttaagtatgcccttagcgtaggctaccgccacattgattgtgctgctatctacggcaatgagcctgagattggggaggccctgaaggaggacgtgggaccaggcaaggcggtgcctcgggaggagctgtttgtgacatccaagctgtggaacaccaagcaccaccccgaggatgtggagcctgccctccggaagactctggctgacctccagctggagtatctggacctgtacctgatgcactggccttatgcctttgagcggggagacaaccccttccccaagaatgctgatgggactatatgctacgactccacccactacaaggagacttggaaggctctggaggcactggtggctaaggggctggtgcaggcgctgggcctgtccaacttcaacagtcggcagattgatgacatactcagtgtggcctccgtgcgtccagctgtcttgcaggtggaatgccacccatacttggctcaaaatgagctaattgcccactgccaagcacgtggcctggaggtaactgcttatagccctttgggctcctctgatcgtgcatggcgtgatcctgatgagcctgtcctgctggaggaaccagtagtcctggcattggctgaaaagtatggccgatctccagctcagatcttgctcaggtggcaggtccagcggaaagtgatctgcatccccaaaagtatcactccttctcgaatccttcagaacatcaaggtgtttgacttcacctttagcccagaagagatgaagcagctaaatgccctgaacaaaaattggagatatattgtgcctatgcttacggtggatgggaagagagtcccaagggatgcagggcatcctctgtacccctttaatgacccgtactgagaccacagcttcttggcctcccttccagctctgcagctaatgaggtcctgccacaacggaaagagggagttaataaagccattggagcatcca

SEQ ID NO: 439337 - DNA, 1257 bp, Homo sapiens
ggccagcaaaaggcgaggctggccccgccccttgcaccgcccacgtggccagcgccacctgcctcattgtgcccaggagttctccaaacccgcgctgcggagtgagtgaccaagttccggccagttcgacctcgaggatccagaggtggagacggtactacctcccagctctgttttccatccccttcaggtccttcctcgggaggcggcgaaggcggtccaccctgcgcgtgatcctttatgcccggcccctgcccctccctccgggtggaacttccccctcaccgccagacttaagctgaggatcgttggatctctggcggggtgcagaactgagcccaggccacagtaccctattcacgctctgtgcttgtgccaagggggcaatggcggcttcctgtgttctactgcacactgggcagaagatgcctctgattggtctgggtacctggaagagtgagcctggtcaggtaaaagcagctgttaagtatgcccttagcgtaggctaccgccacattgattgtgctgctatctacggcaatgagcctgagattggggaggccctgaaggaggacgtgggaccaggcaaggcggtgcctcgggaggagctgtttgtgacatccaagctgtggaacaccaagcaccaccccgaggatgtggagcctgccctccggaagactctggctgacctccagctggagtatctggacctgtacctgatgcactggccttatgcctttgagcggggagacaaccccttccccaagaatgctgatgggactatatgctacgactccacccactacaaggagacttggaaggctctggaggcactggtggctaaggggctggtgcaggcgctgggcctgtccaacttcaacagtcggcagattgatgacatactcagtgtggcctccgtgcgtccagctgtcttgcaggtggcaggtccagcggaaagtgatctgcatccccaaaagtatcactccttctcgaatccttcagaacatcaaggtgtttgacttcacctttagcccagaagagatgaagcagctaaatgccctgaacaaaaattggagatatattgtgcctatgcttacggtggatgggaagagagtcccaagggatgcagggcatcctctgtacccctttaatgacccgtactgagaccacagcttcttggcctcccttccagctctgcagctaatgaggtcctgccacaacggaaagagggagttaataaagccattggagcatcca

SEQ ID NO: 439338 - DNA, 1388 bp, Homo sapiens
ggccagcaaaaggcgaggctggccccgccccttgcaccgcccacgtggccagcgccacctgcctcattgtgcccaggagttctccaaacccgcgctgcggagtgagtgaccaagttccggccagttcgacctcgaggatccagaggtggagacggtactacctcccagctctgttttccatccccttcaggtccttcctcgggaggcggcgaaggcggtccaccctgcgcgtgatcctttatgcccggcccctgcccctccctccgggtggaacttccccctcaccgccagacttaagctgaggatcgttggatctctggcggggtgcagaactgagcccaggccacagtaccctattcacgctctgtgcttgtgccaagggggcaatggcggcttcctgtgttctactgcacactgggcagaagatgcctctgattggtctgggtacctggaagagtgagcctggtcaggtaaaagcagctgttaagtatgcccttagcgtaggctaccgccacattgattgtgctgctatctacggcaatgagcctgagattggggaggccctgaaggaggacgtgggaccaggcaaggcggtgcctcgggaggagctgtttgtgacatccaagctgtggaacaccaagcaccaccccgaggatgtggagcctgccctccggaagactctggctgacctccagctggagtatctggacctgtacctgatgcactggccttatgcctttgagacttggaaggctctggaggcactggtggctaaggggctggtgcaggcgctgggcctgtccaacttcaacagtcggcagattgatgacatactcagtgtggcctccgtgcgtccagctgtcttgcaggtggaatgccacccatacttggctcaaaatgagctaattgcccactgccaagcacgtggcctggaggtaactgcttatagccctttgggctcctctgatcgtgcatggcgtgatcctgatgagcctgtcctgctggaggaaccagtagtcctggcattggctgaaaagtatggccgatctccagctcagatcttgctcaggtggcaggtccagcggaaagtgatctgcatccccaaaagtatcactccttctcgaatccttcagaacatcaaggtgtttgacttcacctttagcccagaagagatgaagcagctaaatgccctgaacaaaaattggagatatattgtgcctatgcttacggtggatgggaagagagtcccaagggatgcagggcatcctctgtacccctttaatgacccgtactgagaccacagcttcttggcctcccttccagctctgcagctaatgaggtcctgccacaacggaaagagggagttaataaagccattggagcatcca

SEQ ID NO: 439339 - DNA, 1320 bp, Homo sapiens
ggccagcaaaaggcgaggctggccccgccccttgcaccgcccacgtggccagcgccacctgcctcattgtgcccaggagttctccaaacccgcgctgcggagtgagtgaccaagttccggccagttcgacctcgaggatccagaggtggagacggtactacctcccagctctgttttccatccccttcaggtccttcctcgggaggcggcgaaggcggtccaccctgcgcgtgatcctttatgcccggcccctgcccctccctccgggtggaacttccccctcaccgccagacttaagctgaggatcgttggatctctggcggggtgcagaactgagcccaggccacagtaccctattcacgctctgtgcttgtgccaagggggcaatggcggcttcctgtgttctactgcacactgggcagaagatgcctctgattggtctgggtacctggaagagtgagcctggtcaggtaaaagcagctgttaagtatgcccttagcgtaggctaccgccacattgattgtgcctgccctccggaagactctggctgacctccagctggagtatctggacctgtacctgatgcactggccttatgcctttgagcggggagacaaccccttccccaagaatgctgatgggactatatgctacgactccacccactacaaggagacttggaaggctctggaggcactggtggctaaggggctggtgcaggcgctgggcctgtccaacttcaacagtcggcagattgatgacatactcagtgtggcctccgtgcgtccagctgtcttgcaggtggaatgccacccatacttggctcaaaatgagctaattgcccactgccaagcacgtggcctggaggtaactgcttatagccctttgggctcctctgatcgtgcatggcgtgatcctgatgagcctgtcctgctggaggaaccagtagtcctggcattggctgaaaagtatggccgatctccagctcagatcttgctcaggtggcaggtccagcggaaagtgatctgcatccccaaaagtatcactccttctcgaatccttcagaacatcaaggtgtttgacttcacctttagcccagaagagatgaagcagctaaatgccctgaacaaaaattggagatatattgtgcctatgcttacggtggatgggaagagagtcccaagggatgcagggcatcctctgtacccctttaatgacccgtactgagaccacagcttcttggcctcccttccagctctgcagctaatgaggtcctgccacaacggaaagagggagttaataaagccattggagcatcca

SEQ ID NO: 439340 - DNA, 1248 bp, Homo sapiens
agatatctacgtctaggaagaggagggggcataggcattccatgtaaacttaacacctgggttacgatctggaaggatgaaaaagcatggctttttttggccaggcgcggtggctcacgcctgtaatcccagcactttgggaggctaaggcgggcggatcacgaggtcaggagatcgagatcatcctggctaacacggtgaaaccccgtctctactaaaaatacaaaaaattagctgcgcgtggtggtgagcgcctgtagtcccagctactggggaggctgaggcaggagaatggcgtgaacccaggaggtggagcttgcagtgagctgagatagtgccactgcactccagcctgggcggtaaagcgagactccatctcaaaaaaaaaaaaaaagaaaaagcatggctttttaaaaattcttggccctttgtcctctctgggattggagtttgggacatagagtggctggatgggcaggtagggtagaagcctggcatttgtgtccacacttggtggggctgtctctcactcagcggggagacaaccccttccccaagaatgctgatgggactatatgctacgactccacccactacaaggagacttggaaggctctggaggcactggtggctaaggggctggtgcaggcgctgggcctgtccaacttcaacagtcggcagattgatgacatactcagtgtggcctccgtgcgtccagctgtcttgcaggtggaatgccacccatacttggctcaaaatgagctaattgcccactgccaagcacgtggcctggaggtaactgcttatagccctttgggctcctctgatcgtgcatggcgtgatcctgatgagcctgtcctgctggaggaaccagtagtcctggcattggctgaaaagtatggccgatctccagctcagatcttgctcaggtggcaggtccagcggaaagtgatctgcatccccaaaagtatcactccttctcgaatccttcagaacatcaaggtgtttgacttcacctttagcccagaagagatgaagcagctaaatgccctgaacaaaaattggagatatattgtgcctatgcttacggtggatgggaagagagtcccaagggatgcagggcatcctctgtacccctttaatgacccgtactgagaccacagcttcttggcctcccttccagctctgcagctaatgaggtcctgccacaacggaaagagggagttaataaagccattggagcatcca

SEQ ID NO: 439341 - DNA, 1385 bp, Homo sapiens
ggccagcaaaaggcgaggctggccccgccccttgcaccgcccacgtggccagcgccacctgcctcattgtgcccaggagttctccaaacccgcgctgcggagtgagtgaccaagttccggccagttcgacctcgaggatccagaggtggagacggtactacctcccagctctgttttccatccccttcaggtccttcctcgggaggcggcgaaggcggtccaccctgcgcgtgatcctttatgcccggcccctgcccctccctccgggtggaacttccccctcaccgccagacttaagctgaggatcgttggatctctggcggggtgcagaactgagcccaggccacagtaccctattcacgctctgtgcttgtgccaaggtttcaagtgatcctcccgcctcagcctgcccaggtgctgagattacatgtatgagccactgcacctggaaaggagccagaaatgtgaagtgctagctgaaggatgagcagcagctagccaggcaaagggggcaatggcggcttcctgtgttctactgcacactgggcagaagatgcctctgattggtctgggtacctggaagagtgagcctggtcaggtaaaagcagctgttaagtatgcccttagcgtaggctaccgccacattgattgtgctgctatctacggcaatgagcctgagattggggaggccctgaaggaggacgtgggaccaggcaaggcggtgcctcgggaggagctgtttgtgacatccaagctgtggaacaccaagcaccaccccgaggatgtggagcctgccctccggaagactctggctgacctccagctggagtatctggacctgtacctgatgcactggccttatgcctttgagcggggagacaaccccttccccaagaatgctgatgggactatatgctacgactccacccactacaaggagacttggaaggctctggaggcactggtggctaaggggctggtgcaggcgctgggcctgtccaacttcaacagtcggcagattgatgacatactcagtgtggcctccgtgcgtccagctgtcttgcaggtggcaggtccagcggaaagtgatctgcatccccaaaagtatcactccttctcgaatccttcagaacatcaaggtgtttgacttcacctttagcccagaagagatgaagcagctaaatgccctgaacaaaaattggagatatattgtgcctatgcttacggtggatgggaagagagtcccaagggatgcagggcatcctctgtacccctttaatgacccgtactgagaccacagcttcttggcctcccttccagctctgcagctaatgaggtcctgccacaacggaaagagggagttaataaagccattggagcatcca

SEQ ID NO: 439342 - DNA, 1167 bp, Homo sapiens
ggccagcaaaaggcgaggctggccccgccccttgcaccgcccacgtggccagcgccacctgcctcattgtgcccaggagttctccaaacccgcgctgcggagtgagtgaccaagttccggccagttcgacctcgaggatccagaggtggagacggtactacctcccagctctgttttccatccccttcaggtccttcctcgggaggcggcgaaggcggtccaccctgcgcgtgatcctttatgcccggcccctgcccctccctccgggtggaacttccccctcaccgccagacttaagctgaggatcgttggatctctggcggggtgcagaactgagcccaggccacagtaccctattcacgctctgtgcttgtgccaaggtaaaagcagctgttaagtatgcccttagcgtaggctaccgccacattgattgtgctgctatctacggcaatgagcctgagattggggaggccctgaaggaggacgtgggaccaggcaaggcggtgcctcgggaggagctgtttgtgacatccaagctgtggaacaccaagcaccaccccgaggatgtggagcctgccctccggaagactctggctgacctccagctggagtatctggacctgtacctgatgcactggccttatgcctttgagcggggagacaaccccttccccaagaatgctgatgggactatatgctacgactccacccactacaaggagacttggaaggctctggaggcactggtggctaaggggctggtgcaggcgctgggcctgtccaacttcaacagtcggcagattgatgacatactcagtgtggcctccgtgcgtccagctgtcttgcaggtggcaggtccagcggaaagtgatctgcatccccaaaagtatcactccttctcgaatccttcagaacatcaaggtgtttgacttcacctttagcccagaagagatgaagcagctaaatgccctgaacaaaaattggagatatattgtgcctatgcttacggtggatgggaagagagtcccaagggatgcagggcatcctctgtacccctttaatgacccgtactgagaccacagcttcttggcctcccttccagctctgcagctaatgaggtcctgccacaacggaaagagggagttaataaagccattggagcatcca

SEQ ID NO: 439343 - DNA, 996 bp, Homo sapiens
ggccagcaaaaggcgaggctggccccgccccttgcaccgcccacgtggccagcgccacctgcctcattgtgcccaggagttctccaaacccgcgctgcggagtgagtgaccaagttccggccagttcgacctcgaggatccagaggtggagacggtactacctcccagctctgttttccatccccttcaggtccttcctcgggaggcggcgaaggcggtccaccctgcgcgtgatcctttatgcccggcccctgcccctccctccgggtggaacttccccctcaccgccagacttaagctgaggatcgttggatctctggcggggtgcagaactgagcccaggccacagtaccctattcacgctctgtgcttgtgccaaggtaaaagcagctgttaagtatgcccttagcgtaggctaccgccacattgattgtgctgctatctacggcaatgagcctgagattggggaggccctgaaggaggacgtgggaccaggcaaggcggtgcctcgggaggagctgtttgtgacatccaagctgtggaacaccaagcaccaccccgaggatgtggagcctgccctccggaagactctggctgacctccagctggagtatctggacctgtacctgatgcactggccttatgcctttgagcggggagacaaccccttccccaagaatgctgatgggactatatgctacgactccacccactacaaggagacttggaaggctctggaggcactggtggctaaggggctggtgcaggcgctgggcctgtccaacttcaacagtcggcagattgatgacatactcagtgtggcctccgtgcgtccagctgtcttgcaggtggaatgccacccatacttggctcaaaatgagctaattgcccactgccaagcacgtggcctggaggtaactgcttatagccctttgggctcctctctcatcaggatcacgccatgcagtcgacgcggccgcgaatttagtagtagta

SEQ ID NO: 439344 - DNA, 1048 bp, Homo sapiens
agatatctacgtctaggaagaggagggggcataggcattccatgtaaacttaacacctgggttacgatctggaaggatgaaaaagcatggctttttttggccaggcgcggtggctcacgcctgtaatcccagcactttgggaggctaaggcgggcggatcacgaggtcaggagatcgagatcatcctggctaacacggtgaaaccccgtctctactaaaaatacaaaaaattagctgcgcgtggtggtgagcgcctgtagtcccagctactggggaggctgaggcaggagaatggcgtgaacccaggaggtggagcttgcagtgagctgagatagtgccactgcactccagcctgggcggtaaagcgagactccatctcaaaaaaaaaaaaaaagaaaaagcatggctttttaaaaattcttggccctttgtcctctctgggattggagtttgggacatagagtggctggatgggcaggtagggtagaagcctggcatttgtgtccacacttggtggggctgtctctcactcagcggggagacaaccccttccccaagaatgctgatgggactatatgctacgactccacccactacaaggagacttggaaggctctggaggcactggtggctaaggggctggtgcaggcgctgggcctgtccaacttcaacagtcggcagattgatgacatactcagtgtggcctccgtgcgtccagctgtcttgcaggtggcaggtccagcggaaagtgatctgcatccccaaaagtatcactccttctcgaatccttcagaacatcaaggtgtttgacttcacctttagcccagaagagatgaagcagctaaatgccctgaacaaaaattggagatatattgtgcctatgcttacggtggatgggaagagagtcccaagggatgcagggcatcctctgtacccctttaatgacccgtactgagaccacagcttcttggcctcccttccagctctgcagctaatgaggtcctgccacaacggaaagagggagttaataaagccattggagcatcca

SEQ ID NO: 439345 - DNA, 869 bp, Homo sapiens
gggggtggtccagacatgcatgtctgggatgggccaagcaagctgggtgtcaccacttcatggtgatgggttattctttggctcaggtggaatgccacccatacttggctcaaaatgagctaattgcccactgccaagcacgtggcctggaggtaactgcttatagccctttgggctcctctgatcgtgcatggcgtgatcctgatgagcctgtcctgctggaggaaccagtagtcctggcattggctgaaaagtatggccgatctccagctcagatcttgctcaggtatggggcagtcttagggagagggccctgggttgggaggcaagggttaagggatttcttatttcagtgtctgggtgaggctgaggatcttgccttgtgatctggagggaggccactgtaggcatatttcccatttcagcagggctcaggtgctccaggagcttagggaagctgcatggggaacaaaatagtgcttatgaatactgaccccttttcctcatctgtctaatcccccaacttaggtggcaggtccagcggaaagtgatctgcatccccaaaagtatcactccttctcgaatccttcagaacatcaaggtgtttgacttcacctttagcccagaagagatgaagcagctaaatgccctgaacaaaaattggagatatattgtgcctatgcttacggtggatgggaagagagtcccaagggatgcagggcatcctctgtacccctttaatgacccgtactgagaccacagcttcttggcctcccttccagctctgcagctaatgaggtcctgccacaacggaaagagggagttaataaagccattggagcatccaatcagagaattgcttgcttgtc

SEQ ID NO: 439346 - DNA, 313 bp, Homo sapiens
gcctgcccaggtgctgagattacatgtatgagccactgcacctggaaaggagccagaaatgtgaagtgctagctgaaggatgagcagcagctagccaggcaaaggtagggtttggggaaggaaagtgcacacacctagagtcaggtaagtgatgtgaccctgttgagtgttcaaagtctggaatacagtctgacatgaggaggtggtgaaatgagaaagatagaagccaggttttgagaagcctggactttatcctgaatataggggagaattgctggaagggtttgagactgggagtcacatggttggatct

SEQ ID NO: 439347 - DNA, 1368 bp, Homo sapiens
ggccagcaaaaggcgaggctggccccgccccttgcaccgcccacgtggccagcgccacctgcctcattgtgcccaggagttctccaaacccgcgctgcggagtccttcctcgggaggcggcgaaggcggtccaccctgcgcgtgatcctttatgcccggcccctgcccctccctccgggtggaacttccccctcaccgccagacttaagctgaggatcgttggatctctggcggggtgcagaactgagcccaggccacagtaccctattcacgctctgtgcttgtgccaagggggcaatggcggcttcctgtgttctactgcacactgggcagaagatgcctctgattggtctgggtacctggaagagtgagcctggtcaggtaaaagcagctgttaagtatgcccttagcgtaggctaccgccacattgattgtgctgctatctacggcaatgagcctgagattggggaggccctgaaggaggacgtgggaccaggcaaggcggtgcctcgggaggagctgtttgtgacatccaagctgtggaacaccaagcaccaccccgaggatgtggagcctgccctccggaagactctggctgacctccagctggagtatctggacctgtacctgatgcactggccttatgcctttgagcggggagacaaccccttccccaagaatgctgatgggactatatgctacgactccacccactacaaggagacttggaaggctctggaggcactggtggctaaggggctggtgcaggcgctgggcctgtccaacttcaacagtcggcagattgatgacatactcagtgtggcctccgtgcgtccagctgtcttgcaggtggaatgccacccatacttggctcaaaatgagctaattgcccactgccaagcacgtggcctggaggtaactgcttatagccctttgggctcctctgatcgtgcatggcgtgatcctgatgagcctgtcctgctggaggaaccagtagtcctggcattggctgaaaagtatggccgatctccagctcagatcttgctcaggtggcaggtccagcggaaagtgatctgcatccccaaaagtatcactccttctcgaatccttcagaacatcaaggtgtttgacttcacctttagcccagaagagatgaagcagctaaatgccctgaacaaaaattggagatatattgtgcctatgcttacggtggatgggaagagagtcccaagggatgcagggcatcctctgtacccctttaatgacccgtactgagaccacagcttcttggcctcccttccagctctgcagctaatgaggtcctgccacaacggaaagagggagttaataaagccattggagcatcca

SEQ ID NO: 439348 - DNA, 1606 bp, Homo sapiens
  misc_feature (1469)..(1469): n is a, c, g, or t
ggccagcaaaaggcgaggctggccccgccccttgcaccgcccacgtggccagcgccacctgcctcattgtgcccaggagttctccaaacccgcgctgcggagtgagtgaccaagttccggccagttcgacctcgaggatccagaggtggagacggtactacctcccagctctgttttccatccccttcaggtccttcctcgggaggcggcgaaggcggtccaccctgcgcgtgatcctttatgcccggcccctgcccctccctccgggtggaacttccccctcaccgccagacttaagctgaggatcgttggatctctggcggggtgcagaactgagcccaggccacagtaccctattcacgctctgtgcttgtgccaagggggcaatggcggcttcctgtgttctactgcacactgggcagaagatgcctctgattggtctgggtacctggaagagtgagcctggtcaggtaaaagcagctgttaagtatgcccttagcgtaggctaccgccacattgattgtgctgctatctacggcaatgagcctgagattggggaggccctgaaggaggacgtgggaccaggcaaggcggtgcctcgggaggagctgtttgtgacatccaagctgtggaacaccaagcaccaccccgaggatgtggagcctgccctccggaagactctggctgacctccagctggagtatctggacctgtacctgatgcactggccttatgcctttgagcggggagacaaccccttccccaagaatgctgatgggactatatgctacgactccacccactacaaggagacttggaaggctctggaggcactggtggctaaggggctggtgcaggcgctgggcctgtccaacttcaacagtcggcagattgatgacatactcagtgtggcctccgtgcgtccagctgtcttgcaggtggaatgccacccatacttggctcaaaatgagctaattgcccactgccaagcacgtggcctggaggtaactgcttatagccctttgggctcctctgatcgtgcatggcgtgatcctgatgagcctgtcctgctggaggaaccagtagtcctggcattggctgaaaagtatggccgatctccagctcagatcttgctcaggtggcaggtccagcggaaagtgatctgcatccccaaaagtatcactccttctcgaatccttcagaacatcaaggtgtttgacttcacctttagcccagaagagatgaagcagctaaatgccctgaacaaaaattggagatatattgtgcctatgcttacggtggatgggaagagagtcccaagggatgcagggcatcctctgtacccctttaatgacccgtactgagaccacagcttcttggcctcccttccagctctgcagctaatgaggtcctgccacaacggaaagagggagttaataaagccattggagcatccaaaaaaaaaaaanaaaaaaaccagagggaatcaatggccgggggggcgaaacgcggtcaggactggcactggtcaacgggtccgaccaggttcctggcacaggggcagcggcgggcacaaaggggcagataacgaagccggtaccgtagc

SEQ ID NO: 439349 - DNA, 1517 bp, Homo sapiens
ggccagcaaaaggcgaggctggccccgccccttgcaccgcccacgtggccagcgccacctgcctcattgtgcccaggagttctccaaacccgcgctgcggagtgagtgaccaagttccggccagttcgacctcgaggatccagaggtggagacggtactacctcccagctctgttttccatccccttcaggtccttcctcgggaggcggcgaaggcggtccaccctgcgcgtgatcctttatgcccggcccctgcccctccctccgggtggaacttccccctcaccgccagacttaagctgaggatcgttggatctctggcggggtgcagaactgagcccaggccacagtaccctattcacgctctgtgcttgtgccaagggggcaatggcggcttcctgtgttctactgcacactgggcagaagatgcctctgattggtctgggtacctggaagagtgagcctggtcaggtaaaagcagctgttaagtatgcccttagcgtaggctaccgccacattgattgtgctgctatctacggcaatgagcctgagattggggaggccctgaaggaggacgtgggaccaggcaaggcggtgcctcgggaggagctgtttgtgacatccaagctgtggaacaccaagcaccaccccgaggatgtggagcctgccctccggaagactctggctgacctccagctggagtatctggacctgtacctgatgcactggccttatgcctttgagcggggagacaaccccttccccaagaatgctgatgggactatatgctacgactccacccactacaaggagacttggaaggctctggaggcactggtggctaaggggctggtgcaggcgctgggcctgtccaacttcaacagtcggcagattgatgacatactcagtgtggcctccgtgcgtccagctgtcttgcaggtggaatgccacccatacttggctcaaaatgagctaattgcccactgccaagcacgtggcctggaggtaactgcttatagccctttgggctcctctgatcgtgcatggcgtgatcctgatgagcctgtcctgctggaggaaccagtagtcctggcattggctgaaaagtatggccgatctccagctcagatcttgctcaggtggcaggtccagcggaaagtgatctgcatccccaaaagtatcactccttctcgaatccttcagaacatcaaggtgtttgacttcacctttagcccagaagagatgaagcagctaaatgccctgaacaaaaattggagatatattgtgcctatgcttacggtggatgggaagagagtcccaagggatgcagggcatcctctgtacccctttaatgacccgtactgagaccacagcttcttggcctcccttccagctctgcagctaatgaggtcctgccacaacggaaagagggagttaataaagccattggagcatccaagcacagacccacgagcctcaagcaccaaccccgcgggaccataaggggtgggacaaagc

SEQ ID NO: 439350 - DNA, 1189 bp, Homo sapiens
aagcagtggtatcaacgcagtgtggccattacgccgggagccactgcacctggaaaggagccagaaatgtgaagtgctagctgaaggatgagcagcagctagccaggcaaagggggcaatggcggcttcctgtgttctactgcacactgggcagaagatgcctctgattggtctgggtacctggaagagtgagcctggtcaggtaaaagcagctgttaagtatgcccttagcgtaggctaccgccacattgattgtgctgctatctacggcaatgagcctgagattggggaggccctgaaggaggacgtgggaccaggcaaggcggtgcctcgggaggagctgtttgtgacatccaagctgtggaacaccaagcaccaccccgaggatgtggagcctgccctccggaagactctggctgacctccagctggagtatctggacctgtacctgatgcactggccttatgcctttgagcggggagacaaccccttccccaagaatgctgatgggactatatgctacgactccacccactacaaggagacttggaaggctctggaggcactggtggctaaggggctggtgcaggcgctgggcctgtccaacttcaacagtcggcagattgatgacatactcagtgtggcctccgtgcgtccagctgtcttgcaggtggaatgccacccatacttggctcaaaatgagctaattgcccactgccaagcacgtggcctggaggtaactgcttatagccctttgggctcctctgatcgtgcatggcgtgatcctgatgagcctgtcctgctggaggaaccagtagtcctggcattggctgaaaagtatggccgatctccagctcagatcttgctcaggtggcaggtccagcggaaagtgatctgcatccccaaaagtatcactccttctcgaatccttcagaacatcaaggtgtttgacttcacctttagcccagaagagatgaagcagctaaatgccctgaacaaaaattggagatatattgtgcctatgcttacggtggatgggaagagagtcccaagggatgcagggcatcctctgtacccctttaatgacccgtactgagaccacagcttcttggcctcccttccagctctgcagctaatgaggtcctgccacaacggaaagagggagttaataaagccattggagcatcca

SEQ ID NO: 439351 - DNA, 1086 bp, Homo sapiens
ggccagcaaaaggcgaggctggccccgccccttgcaccgcccacgtggccagcgccacctgcctcattgtgcccaggagttctccaaacccgcgctgcggagtgagtgaccaagttccggccagttcgacctcgaggatccagaggtggagacggtactacctcccagctctgttttccatccccttcaggtccttcctcgggaggcggcgaaggcggtccaccctgcgcgtgatcctttatgcccggcccctgcccctccctccgggtggaacttccccctcaccgccagacttaagctgaggatcgttggatctctggcggggtgcagaactgagcccaggccacagtaccctattcacgctctgtgcttgtgccaagggggcaatggcggcttcctgtgttctactgcacactgggcagaagatgcctctgattggtctgggtacctggaagagtgagcctggtcaggtaaaagcagctgttaagtatgcccttagcgtaggctaccgccacattgattgtgctgctatctacggcaatgagcctgagattggggaggccctgaaggaggacgtgggaccaggcaaggcggtgcctcgggaggagctgtttgtgacatccaagctgtggaacaccaagcaccaccccgaggatgtggagcctgccctccggaagactctggctgacctccagctggagtatctggacctgtacctgatgcactggccttatgcctttgagcggggagacaaccccttccccaagaatgctgatgggactatatgctacgactccacccactacaaggagacttggaaggctctggaggcactggtggctaaggggctggtgcaggcgctgggcctgtccaacttcaacagtcggcagattgatgacatactcagtgtggcctccgtgcgtccagctgtcttgcaggtggaatgccacccatacttggctcaaaatgagctaattgcccactgccaagcacgtggcctggaggtaactgcttatagccctttgggctcctctctcatcaggatcacgccatgcagtcgacgcggccgcgaatttagtagtagta

SEQ ID NO: 439352 - DNA, 1402 bp, Homo sapiens
ggccagcaaaaggcgaggctggccccgccccttgcaccgcccacgtggccagcgccacctgcctcattgtgcccaggagttctccaaacccgcgctgcggagtgagtgaccaagttccggccagttcgacctcgaggatccagaggtggagacggtactacctcccagctctgttttccatccccttcaggtccttcctcgggaggcggcgaaggcggtccaccctgcgcgtgatcctttatgcccggcccctgcccctccctccgggtggaacttccccctcaccgccagacttaagctgaggatcgttggatctctggcggggtgcagaactgagcccaggccacagtaccctattcacgctctgtgcttgtgccaagggggcaatggcggcttcctgtgttctactgcacactgggcagaagatgcctctgattggtctgggtacctggaagagtgagcctggtcagctgctatctacggcaatgagcctgagattggggaggccctgaaggaggacgtgggaccaggcaaggcggtgcctcgggaggagctgtttgtgacatccaagctgtggaacaccaagcaccaccccgaggatgtggagcctgccctccggaagactctggctgacctccagctggagtatctggacctgtacctgatgcactggccttatgcctttgagcggggagacaaccccttccccaagaatgctgatgggactatatgctacgactccacccactacaaggagacttggaaggctctggaggcactggtggctaaggggctggtgcaggcgctgggcctgtccaacttcaacagtcggcagattgatgacatactcagtgtggcctccgtgcgtccagctgtcttgcaggtggaatgccacccatacttggctcaaaatgagctaattgcccactgccaagcacgtggcctggaggtaactgcttatagccctttgggctcctctgatcgtgcatggcgtgatcctgatgagcctgtcctgctggaggaaccagtagtcctggcattggctgaaaagtatggccgatctccagctcagatcttgctcaggtggcaggtccagcggaaagtgatctgcatccccaaaagtatcactccttctcgaatccttcagaacatcaaggtgtttgacttcacctttagcccagaagagatgaagcagctaaatgccctgaacaaaaattggagatatattgtgcctatgcttacggtggatgggaagagagtcccaagggatgcagggcatcctctgtacccctttaatgacccgtactgagaccacagcttcttggcctcccttccagctctgcagctaatgaggtcctgccacaacggaaagagggagttaataaagccattggagcatcca

SEQ ID NO: 439353 - DNA, 1436 bp, Homo sapiens
ggccagcaaaaggcgaggctggccccgccccttgcaccgcccacgtggccagcgccacctgcctcattgtgcccaggagttctccaaacccgcgctgcggagtgagtgaccaagttccggccagttcgacctcgaggatccagaggtggagacggtactacctcccagctctgttttccatccccttcaggtccttcctcgggaggcggcgaaggcggtccaccctgcgcgtgatcctttatgcccggcccctgcccctccctccgggtggaacttccccctcaccgccagacttaagctgaggatcgttggatctctggcggggtgcagaactgagcccaggccacagtaccctattcacgctctgtgcttgtgccaaggtttcaagtgatcctcccgcctcagcctgcccaggtgctgagattacatgtatgagccactgcacctggaaaggagccagaaatgtgaagtgctagctgaaggatgagcagcagctagccaggcaaagggggcaatggcggcttcctgtgttctactgcacactgggcagaagatgcctctgattggtctgggtacctggaagagtgagcctggtcagatccaagctgtggaacaccaagcaccaccccgaggatgtggagcctgccctccggaagactctggctgacctccagctggagtatctggacctgtacctgatgcactggccttatgcctttgagcggggagacaaccccttccccaagaatgctgatgggactatatgctacgactccacccactacaaggagacttggaaggctctggaggcactggtggctaaggggctggtgcaggcgctgggcctgtccaacttcaacagtcggcagattgatgacatactcagtgtggcctccgtgcgtccagctgtcttgcaggtggaatgccacccatacttggctcaaaatgagctaattgcccactgccaagcacgtggcctggaggtaactgcttatagccctttgggctcctctgatcgtgcatggcgtgatcctgatgagcctgtcctgctggaggaaccagtagtcctggcattggctgaaaagtatggccgatctccagctcagatcttgctcaggtggcaggtccagcggaaagtgatctgcatccccaaaagtatcactccttctcgaatccttcagaacatcaaggtgtttgacttcacctttagcccagaagagatgaagcagctaaatgccctgaacaaaaattggagatatattgtgcctatgcttacggtggatgggaagagagtcccaagggatgcagggcatcctctgtacccctttaatgacccgtactgagaccacagcttcttggcctcccttccagctctgcagctaatgaggtcctgccacaacggaaagagggagttaataaagccattggagcatcca

SEQ ID NO: 439354 - DNA, 1177 bp, Homo sapiens
ggccagcaaaaggcgaggctggccccgccccttgcaccgcccacgtggccagcgccacctgcctcattgtgcccaggagttctccaaacccgcgctgcggagtgagtgaccaagttccggccagttcgacctcgaggatccagaggtggagacggtactacctcccagctctgttttccatccccttcaggtccttcctcgggaggcggcgaaggcggtccaccctgcgcgtgatcctttatgcccggcccctgcccctccctccgggtggaacttccccctcaccgccagacttaagctgaggatcgttggatctctggcggggtgcagaactgagcccaggccacagtaccctattcacgctctgtgcttgtgccaagggggcaatggcggcttcctgtgttctactgcacactgggcagaagatgcctctgattggtctgggtacctggaagagtgagcctggtcaggtaaaagcagctgttaagtatgcccttagcgtaggctaccgccacattgattgtgctgctatctacggcaatgagcctgagattggggaggccctgaaggaggacgtgggaccaggcaaggcggtgcctcgggaggagctgtttgtgacatccaagctgtggaacaccaagcaccaccccgaggatgtggagcctgccctccggaagactctggctgacctccagctggagtatctggacctgtacctgatgcactggccttatgcctttgagcggggagacaaccccttccccaagaatgctgatgggactatatgctacgactccacccactacaaggagacttggaaggctctggaggcactggtggctaaggggctggtgcagggtggcaggtccagcggaaagtgatctgcatccccaaaagtatcactccttctcgaatccttcagaacatcaaggtgtttgacttcacctttagcccagaagagatgaagcagctaaatgccctgaacaaaaattggagatatattgtgcctatgcttacggtggatgggaagagagtcccaagggatgcagggcatcctctgtacccctttaatgacccgtactgagaccacagcttcttggcctcccttccagctctgcagctaatgaggtcctgccacaacggaaagagggagttaataaagccattggagcatcca

SEQ ID NO: 439355 - DNA, 1160 bp, Homo sapiens
ggccagcaaaaggcgaggctggccccgccccttgcaccgcccacgtggccagcgccacctgcctcattgtgcccaggagttctccaaacccgcgctgcggagtgagtgaccaagttccggccagttcgacctcgaggatccagaggtggagacggtactacctcccagctctgttttccatccccttcaggtccttcctcgggaggcggcgaaggcggtccaccctgcgcgtgatcctttatgcccggcccctgcccctccctccgggtggaacttccccctcaccgccagacttaagctgaggatcgttggatctctggcggggtgcagaactgagcccaggccacagtaccctattcacgctctgtgcttgtgccaagggggcaatggcggcttcctgtgttctactgcacactgggcagaagatgcctctgattggtctgggtacctggaagagtgagcctggtcaggtaaaagcagctgttaagtatgcccttagcgtaggctaccgccacattgattgtgctgctatctacggcaatgagcctgagattggggaggccctgaaggaggacgtgggaccaggcaaggcggtgcctcgggaggagctgtttgtgacatccaagctgtggaacaccaagcaccaccccgaggatgtggagcctgccctccggaagactctggctgacctccagctggagtatctggacctgtacctgatgcactggccttatgcctttgagtgagccttgccagagcctcatctggggaatcagggggttgagcaggatggtgttagtaacttattgtaagtcacagcagcagagcaggataggaacactcatttgcatgccaagctgaggagcttgacatgggatcttagcctcttctgctacagcagcttagctgtagctacaggagtttaactctggaaaaaggaaggcagtctcacatggtgtgtaccccagggtatgcacctgtaaccctcctgctccctttattcatttagaaaaggtgctgacttttctgttgagcacctggggttacagtaataagtaagtctcagcagaagatgtgagaagagctcaccattagtgccgtgccctgtgctggaagaagggtggataactccctgaggatgagttaaggaagacttccta

SEQ ID NO: 439356 - DNA, 482 bp, Homo sapiens
gcggccgcctactactactactactgctcgaattcaagcttctaacgatgtacggggacgatcgtgcatggcgtgatcctgatgagcctgtcctgctggaggaaccagtagtcctggcattggctgaaaagtatggccgatctccagctcagatcttgctcaggtggcaggtccagcggaaagtgatctgcatccccaaaagtatcactccttctcgaatccttcagaacatcaaggtgtttgacttcacctttagcccagaagagatgaagcagctaaatgccctgaacaaaaattggagatatattgtgcctatgcttacggtggatgggaagagagtcccaagggatgcagggcatcctctgtacccctttaatgacccgtactgagaccacagcttcttggcctcccttccagctctgcagctaatgaggtcctgccacaacggaaagagggagttaataaagccattggagcatcca

SEQ ID NO: 439357 - DNA, 865 bp, Homo sapiens
ggccagcaaaaggcgaggctggccccgccccttgcaccgcccacgtggccagcgccacctgcctcattgtgcccaggagttctccaaacccgcgctgcggagtgagtgaccaagttccggccagttcgacctcgaggatccagaggtggagacggtactacctcccagctctgttttccatccccttcaggtccttcctcgggaggcggcgaaggcggtccaccctgcgcgtgatcctttatgcccggcccctgcccctccctccgggtggaacttccccctcaccgccagacttaagctgaggatcgttggatctctggcggggtgcagaactgagcccaggccacagtaccctattcacgctctgtgcttgtgccaagggggcaatggcggcttcctgtgttctactgcacactgggcagaagatgcctctgattggtctgggtacctggaagagtgagcctggtcagctgtcctgctggaggaaccagtagtcctggcattggctgaaaagtatggccgatctccagctcagatcttgctcaggtggcaggtccagcggaaagtgatctgcatccccaaaagtatcactccttctcgaatccttcagaacatcaaggtgtttgacttcacctttagcccagaagagatgaagcagctaaatgccctgaacaaaaattggagatatattgtgcctatgcttacggtggatgggaagagagtcccaagggatgcagggcatcctctgtacccctttaatgacccgtactgagaccacagcttcttggcctcccttccagctctgcagctaatgaggtcctgccacaacggaaagagggagttaataaagccattggagcatcca

SEQ ID NO: 439358 - DNA, 1070 bp, Homo sapiens
ggccagcaaaaggcgaggctggccccgccccttgcaccgcccacgtggccagcgccacctgcctcattgtgcccaggagttctccaaacccgcgctgcggagtgagtgaccaagttccggccagttcgacctcgaggatccagaggtggagacggtactacctcccagctctgttttccatccccttcaggtccttcctcgggaggcggcgaaggcggtccaccctgcgcgtgatcctttatgcccggcccctgcccctccctccgggtggaacttccccctcaccgccagacttaagctgaggatcgttggatctctggcggggtgcagaactgagcccaggccacagtaccctattcacgctctgtgcttgtgccaaggtaaaagcagctgttaagtatgcccttagcgtaggctaccgccacattgattgtgctgctatctacggcaatgagcctgagattggggaggccctgaaggaggacgtgggaccaggcaaggcggtgcctcgggaggagctgtttgtgacatccaagctgtggaacaccaagcaccaccccgaggatgtggagcctgccctccggaagactctggctgacctccagctggagtatctggacctgtacctgatgcactggccttatgcctttgagtgagccttgccagagcctcatctggggaatcagggggttgagcaggatggtgttagtaacttattgtaagtcacagcagcagagcaggataggaacactcatttgcatgccaagctgaggagcttgacatgggatcttagcctcttctgctacagcagcttagctgtagctacaggagtttaactctggaaaaaggaaggcagtctcacatggtgtgtaccccagggtatgcacctgtaaccctcctgctccctttattcatttagaaaaggtgctgacttttctgttgagcacctggggttacagtaataagtaagtctcagcagaagatgtgagaagagctcaccattagtgccgtgccctgtgctggaagaagggtggataactccctgaggatgagttaaggaagacttccta

SEQ ID NO: 439359 - DNA, 2448 bp, Homo sapiens
  misc_feature (2448)..(2448): n is a, c, g, or t
gcttgaattagcctgcgctctccgcgttcttccagcgctgtctttttagtaccacatgcgcaggcaggtgatggcggcgctggtcgtatccggggcagcggagcagggcggccgagacggccctggcagaggtcgggcccctcggggccgcgtggccaatcagatcccccctgagatcctgaagaaccctcagctgcaggcagcaatccgggtcctgccttccaactacaactttgagatccccaagaccatctggaggatccaacaagcccaggccaagaaggtggccttgcaaatgccggaaggcctcctcctctttgcctgtaccattgtggatatcttggaaaggttcacggaggccgaagtgatggtgatgggtgacgtgacctacggggcttgctgtgtggatgacttcacagcgagggccctgggagctgacttcttggtgcactacggccacagttgcctgattcccatggacacctcggcccaagacttccgggtgctgtacgtctttgtggacatccggatagacactacacacctcctggactctctccgcctcacctttcccccagccactgcccttgccctggtcagcaccattcagtttgtgtcgaccttgcaggcagccgcccaggagctgaaagccgagtatcgtgtgagtgtcccacagtgcaagcccctgtcccctggagagatcctgggctgcacatccccccgactgtccaaagaggtggaggccgttgtgtatcttggagatggccgcttccatctggagtctgtcatgattgccaaccccaatgtccccgcttaccggtatgacccatatagcaaagtcctatccagagaacactatgaccaccagcgcatgcaggctgctcgccaagaagccatagccactgcccgctcagctaagtcctggggccttattctgggcactttgggccgccagggcagtcctaagatcctggagcacctggaatctcgactccgagccttgggcctttcctttgtgaggctgctgctctctgagatcttccccagcaagcttagcctacttcccgaggtggatgtgtgggtgcaggtggcatgtccacgtctctccattgactggggcacagccttccccaagccgctgctgacaccctatgaggcggccgtggctctgagggacatttcctggcagcagccctacccgatggacttctacgctggcagctccttggggccctggacggtgaaccacggccaggaccgccgtccccacgccccgggccggcccgcgcgggggaaggtgcaggaggggtccgcgcgtcccccttcggccgtggcttgcgaggactgcagctgcagggacgagaaggtggcgccgctggctccttgacgcgctcccgggcctcagggtcctgccctccggaggagcagcctcgaggctggtggttttcagagcaggaggccgacgttttctccgcattggaagagcccgccgtctgcaggggcctggaggaatcactggggatggtggcacaggcactgaacaggctggggccttttgacggccttcttggtttcagccaaggggctgcgctagcagcccttgtgtgtgccctgggccaggcaggcgatccccgcttccccttgccacggtttatcctcttggtgtctggtttctgtccccggggcattgggttcaaggaatccatcctgcaaaggcccttgtcattgccttcgctccatgtttttggggacactgacaaagtcatcccctctcaggagagtgtgcaactggccagccaatttcccggagccatcaccctcacccactctggtggccacttcattccagcagctgcaccccagcgtcaggcctacctcaagttcttggaccagtttgcagagtgaaagatcaagaaatgtctctgctcctacatccagctcctctaggggcagcctccgtcatccatgccctcccaggaccctccactcactgctgtgagtgcgcctcaccagaaccagttaagagacaactatcaattcttgagacccaaattataagggccctgccctgtactgaagaaaaggggagcacaaggccttaatggacattgacttgtgaaaacgcaaacatgaatatggttggagagccctggattaggagggtgacatggggaaggcagaggctggcaccatggtgactgccacataataaagtggtgatttggaaaaaaaaaaaaataaaagcagacaaaagaacgcgcggagcatcaaatacagcgggtgcacgaaacaaagcagggacaaaaaaggcgccacggtggcatatgcagtggttacgacgaacccaacgtttcgtgggcacaaagcgggcgaaactacgtcaggccacccaaaaggggagcggcaatagttgagaagcagggtacccggcttagaggagcgccaacn

SEQ ID NO: 439360 - DNA, 172 bp, Homo sapiens
tcggaacgcgccatggtgttggtaccgggaatcgcggccgcgtcgaccttctccctaagtgctctaacctcgctgaactatgagcctgaagggtgggtcgatgccagaccttaggtggaggccaaagacagtacagaataaacagcttcttcctaaattgaccccaacttga

SEQ ID NO: 439361 - DNA, 2582 bp, Homo sapiens
  misc_feature (1461)..(1461): n is a, c, g, or t
gcttgaattagcctgcgctctccgcgttcttccagcgctgtctttttagtaccacatgcgcaggcaggtgatggcggcgctggtcgtatccggggcagcggagcagggcggccgagacggccctggcagaggtcgggcccctcggggccgcgtggccaatcagatcccccctgagatcctgaagaaccctcagctgcaggcagcaatccgggtcctgccttccaactacaactttgagatccccaagaccatctggaggatccaacaagcccaggccaagaaggtggccttgcaaatgccggaaggcctcctcctctttgcctgtaccattgtggatatcttggaaaggttcacggaggccgaagtgatggtgatgggtgacgtgacctacggggcttgctgtgtggatgacttcacagcgagggccctgggagctgacttcttggtgcactacggccacagttgcctgattcccatggacacctcggcccaagacttccgggtgctgtacgtctttgtggacatccggatagacactacacacctcctggactctctccgcctcacctttcccccagccactgcccttgccctggtcagcaccattcagtttgtgtcgaccttgcaggcagccgcccaggagctgaaagccgagtatcgtgtgagtgtcccacagtgcaagcccctgtcccctggagagatcctgggctgcacatccccccgactgtccaaagaggtggaggccgttgtgtatcttggagatggccgcttccatctggagtctgtcatgattgccaaccccaatgtccccgcttaccggtatgacccatatagcaaagtcctatccagagaacactatgaccaccagcgcatgcaggctgctcgccaagaagccatagccactgcccgctcagctaagtcctggggccttattctgggcactttgggccgccagggcagtcctaagatcctggagcacctggaatctcgactccgagccttgggcctttcctttgtgaggctgctgctctctgagatcttccccagcaagcttagcctacttcccgaggtggatgtgtgggtgcaggtggcatgtccacgtctctccattgactggggcacagccttccccaagccgctgctgacaccctatgaggcggccgtggctctgagggacatttcctggcagcagccctacccgatggacttctacgctggcagctccttggggccctggacggtgaaccacggccaggaccgccgtccccacgccccgggccggcccgcgcgggggaaggtgcaggaggggtccgcgcgtcccccttcggccgtggcttgcgaggactgcagctgcagggacgagaaggtggcgccgctggctccttgacgcgctcccgggcctcaggtatcagcccccgctctgggtgcgccccgccttttgccgttgtcatgggaacgccntggcgctccgaggcccgccctcggggcggtgctgacgttcggttccgccccgtgcattgtgcttccgctcggggaaagaccgcttccggtgcttccgtcgctccttgccgggcataatggccgcgcagcgacccctgcgggtcctgtgcctggcgggcttccggcagagcgagcggggcttccgtgagaagaccggggcgctgaggaaggcgctgcggggtcgcgccgagctcgtgtgcctcagcggcccgcacccggtccccgaccccccgggccccgagggcgccagatcagacttcgggtcctgccctccggaggagcagcctcgaggctggtggttttcagagcaggaggccgacgttttctccgcattggaagagcccgccgtctgcaggggcctggaggaatcactggggatggtggcacaggcactgaacaggctggggccttttgacggccttcttggtttcagccaaggggctgcgctagcagcccttgtgtgtgccctgggccaggcaggcgatccccgcttccccttgccacggtttatcctcttggtgtctggtttctgtccccggggcattgggttcaaggaatccatcctgcaaaggcccttgtcattgccttcgctccatgtttttggggacactgacaaagtcatcccctctcaggagagtgtgcaactggccagccaatttcccggagccatcaccctcacccactctggtggccacttcattccagcagctgcaccccagcgtcaggcctacctcaagttcttggaccagtttgcagagtgaaagatcaagaaatgtctctgctcctacatccagctcctctaggggcagcctccgtcatccatgccctcccaggaccctccactcactgctgtgagtgcgcctcaccagaaccagttaagagacaactatcaattcttgagacccaaattataagggccctgccctgtactgaagaaaaggggagcacaaggccttaatggacattgacttgtgaaaacgcaaacatgaatatggttggagagccctggattaggagggtgacatggggaaggcagaggctggcaccatggtgactgccacataataaagtggtgatttgga

SEQ ID NO: 439362 - DNA, 2955 bp, Homo sapiens
  misc_feature (1461)..(1461): n is a, c, g, or t
  misc_feature (1857)..(1857): n is a, c, g, or t
gcttgaattagcctgcgctctccgcgttcttccagcgctgtctttttagtaccacatgcgcaggcaggtgatggcggcgctggtcgtatccggggcagcggagcagggcggccgagacggccctggcagaggtcgggcccctcggggccgcgtggccaatcagatcccccctgagatcctgaagaaccctcagctgcaggcagcaatccgggtcctgccttccaactacaactttgagatccccaagaccatctggaggatccaacaagcccaggccaagaaggtggccttgcaaatgccggaaggcctcctcctctttgcctgtaccattgtggatatcttggaaaggttcacggaggccgaagtgatggtgatgggtgacgtgacctacggggcttgctgtgtggatgacttcacagcgagggccctgggagctgacttcttggtgcactacggccacagttgcctgattcccatggacacctcggcccaagacttccgggtgctgtacgtctttgtggacatccggatagacactacacacctcctggactctctccgcctcacctttcccccagccactgcccttgccctggtcagcaccattcagtttgtgtcgaccttgcaggcagccgcccaggagctgaaagccgagtatcgtgtgagtgtcccacagtgcaagcccctgtcccctggagagatcctgggctgcacatccccccgactgtccaaagaggtggaggccgttgtgtatcttggagatggccgcttccatctggagtctgtcatgattgccaaccccaatgtccccgcttaccggtatgacccatatagcaaagtcctatccagagaacactatgaccaccagcgcatgcaggctgctcgccaagaagccatagccactgcccgctcagctaagtcctggggccttattctgggcactttgggccgccagggcagtcctaagatcctggagcacctggaatctcgactccgagccttgggcctttcctttgtgaggctgctgctctctgagatcttccccagcaagcttagcctacttcccgaggtggatgtgtgggtgcaggtggcatgtccacgtctctccattgactggggcacagccttccccaagccgctgctgacaccctatgaggcggccgtggctctgagggacatttcctggcagcagccctacccgatggacttctacgctggcagctccttggggccctggacggtgaaccacggccaggaccgccgtccccacgccccgggccggcccgcgcgggggaaggtgcaggaggggtccgcgcgtcccccttcggccgtggcttgcgaggactgcagctgcagggacgagaaggtggcgccgctggctccttgacgcgctcccgggcctcaggtatcagcccccgctctgggtgcgccccgccttttgccgttgtcatgggaacgccntggcgctccgaggcccgccctcggggcggtgctgacgttcggttccgccccgtgcattgtgcttccgctcggggaaagaccgcttccggtgcttccgtcgctccttgccgggcataatggccgcgcagcgacccctgcgggtcctgtgcctggcgggcttccggcagagcgagcggggcttccgtgagaagaccggggcgctgaggaaggcgctgcggggtcgcgccgagctcgtgtgcctcagcggcccgcacccggtccccgaccccccgggccccgagggcgccagatcagacttcggtgagacaagccccgctccggaaacgcactcagtttcctccatcttgtttcgtccccctcgacacccttcagcatcccccaccctgcgtccacccncattcctcccacccagtccacacccttcatttctcgcgacccataccctctttgctcaaactgcagcctgtcttcccaggcttccgccttcaccgtcttcctccgctgtctcctgttcaggctaatccactcatttcccccctctcatttcccccagacttttgcctcgattccctttttctctctgtcatctcgaaccctcctgccctttctcatttctttccttcctggagcctcccatgccctaatcccatcctttttcctcatatcgctgtagggtcctgccctccggaggagcagcctcgaggctggtggttttcagagcaggaggccgacgttttctccgcattggaagagcccgccgtctgcaggggcctggaggaatcactggggatggtggcacaggcactgaacaggctggggccttttgacggccttcttggtttcagccaaggggctgcgctagcagcccttgtgtgtgccctgggccaggcaggcgatccccgcttccccttgccacggtttatcctcttggtgtctggtttctgtccccggggcattgggttcaaggaatccatcctgcaaaggcccttgtcattgccttcgctccatgtttttggggacactgacaaagtcatcccctctcaggagagtgtgcaactggccagccaatttcccggagccatcaccctcacccactctggtggccacttcattccagcagctgcaccccagcgtcaggcctacctcaagttcttggaccagtttgcagagtgaaagatcaagaaatgtctctgctcctacatccagctcctctaggggcagcctccgtcatccatgccctcccaggaccctccactcactgctgtgagtgcgcctcaccagaaccagttaagagacaactatcaattcttgagacccaaattataagggccctgccctgtactgaagaaaaggggagcacaaggccttaatggacattgacttgtgaaaacgcaaacatgaatatggttggagagccctggattaggagggtgacatggggaaggcagaggctggcaccatggtgactgccacataataaagtggtgatttgga

SEQ ID NO: 439363 - DNA, 3061 bp, Homo sapiens
  misc_feature (1461)..(1461): n is a, c, g, or t
gcttgaattagcctgcgctctccgcgttcttccagcgctgtctttttagtaccacatgcgcaggcaggtgatggcggcgctggtcgtatccggggcagcggagcagggcggccgagacggccctggcagaggtcgggcccctcggggccgcgtggccaatcagatcccccctgagatcctgaagaaccctcagctgcaggcagcaatccgggtcctgccttccaactacaactttgagatccccaagaccatctggaggatccaacaagcccaggccaagaaggtggccttgcaaatgccggaaggcctcctcctctttgcctgtaccattgtggatatcttggaaaggttcacggaggccgaagtgatggtgatgggtgacgtgacctacggggcttgctgtgtggatgacttcacagcgagggccctgggagctgacttcttggtgcactacggccacagttgcctgattcccatggacacctcggcccaagacttccgggtgctgtacgtctttgtggacatccggatagacactacacacctcctggactctctccgcctcacctttcccccagccactgcccttgccctggtcagcaccattcagtttgtgtcgaccttgcaggcagccgcccaggagctgaaagccgagtatcgtgtgagtgtcccacagtgcaagcccctgtcccctggagagatcctgggctgcacatccccccgactgtccaaagaggtggaggccgttgtgtatcttggagatggccgcttccatctggagtctgtcatgattgccaaccccaatgtccccgcttaccggtatgacccatatagcaaagtcctatccagagaacactatgaccaccagcgcatgcaggctgctcgccaagaagccatagccactgcccgctcagctaagtcctggggccttattctgggcactttgggccgccagggcagtcctaagatcctggagcacctggaatctcgactccgagccttgggcctttcctttgtgaggctgctgctctctgagatcttccccagcaagcttagcctacttcccgaggtggatgtgtgggtgcaggtggcatgtccacgtctctccattgactggggcacagccttccccaagccgctgctgacaccctatgaggcggccgtggctctgagggacatttcctggcagcagccctacccgatggacttctacgctggcagctccttggggccctggacggtgaaccacggccaggaccgccgtccccacgccccgggccggcccgcgcgggggaaggtgcaggaggggtccgcgcgtcccccttcggccgtggcttgcgaggactgcagctgcagggacgagaaggtggcgccgctggctccttgacgcgctcccgggcctcaggtatcagcccccgctctgggtgcgccccgccttttgccgttgtcatgggaacgccntggcgctccgaggcccgccctcggggcggtgctgacgttcggttccgccccgtgcattgtgcttccgctcggggaaagaccgcttccggtgcttccgtcgctccttgccgggcataatggccgcgcagcgacccctgcgggtcctgtgcctggcgggcttccggcagagcgagcggggcttccgtgagaagaccggggcgctgaggaaggcgctgcggggtcgcgccgagctcgtgtgcctcagcggcccgcacccggtccccgaccccccgggccccgagggcgccagatcagacttcgggtcctgccctccggaggagcagcctcgaggctggtggttttcagagcaggaggccgacgttttctccgcattggaagagcccgccgtctgcaggggcctggaggaatcactggggatggtggcacaggcactgaacaggctggggccttttgacggccttcttggtttcagccaaggggctgcgctagcagcccttgtgtgtgccctgggccaggcaggcgatccccgcttccccttgccacggtttatcctcttggtgtctggtttctgtccccggggcattgggttcaaggaatccatcctgcaaaggcccttgtcattgccttcgctccatgtttttggggacactgacaaagtcatcccctctcaggagagtgtgcaactggccagccaatttcccggagccatcaccctcacccactctggtggccacttcattccagcagctgcaccccagcgtcaggcctacctcaagttcttggaccagtttgcagagtgaaagatcaagaaatgtctctgctcctacatccagctcctctaggggcagcctccgtcatccatgccctcccaggaccctccactcactgctgtgagtgcgcctcaccagaaccagttaagagacaactatcaattcttgagacccaaattataagggccctgccctgtactgaagaaaaggggagcacaaggccttaatggacattgacttgtgaaaacgcaaacatgaatatggttggagagccctggattaggagggtgacatggggaaggcagaggctggcaccatggtgactgccacataataaagtggtgatttggattttgagcatctttttcctggtacacacagaaaaacattttataatggaagtcggtttcttggccatctacatagttttctgggcagcgccaagcagggaggtgtctccagttgtgagtcctcggacaggctgctgcatgggtgcacatactcacgttattggtggaagttttaagtcccaaactgaagggaaggaggcctaggtggcacaatcagggaggaatatacatctgagaagttttgggaagacatcacctggcaaggctgcctgaaccacagtaatttagtcttcctctatccagatcactgagagttgtgtgctggtcttctctcaaaccctggatgtgttacctgcttctccctaagtgctctaacctcgctgaactatgagcctgaagggtgggtcgatgccagaccttaggtggaggccaaagacagtacagaataaacagcttcttcctaaattgaccccaacttga

SEQ ID NO: 439364 - DNA, 3224 bp, Homo sapiens
  misc_feature (1461)..(1461): n is a, c, g, or t
gcttgaattagcctgcgctctccgcgttcttccagcgctgtctttttagtaccacatgcgcaggcaggtgatggcggcgctggtcgtatccggggcagcggagcagggcggccgagacggccctggcagaggtcgggcccctcggggccgcgtggccaatcagatcccccctgagatcctgaagaaccctcagctgcaggcagcaatccgggtcctgccttccaactacaactttgagatccccaagaccatctggaggatccaacaagcccaggccaagaaggtggccttgcaaatgccggaaggcctcctcctctttgcctgtaccattgtggatatcttggaaaggttcacggaggccgaagtgatggtgatgggtgacgtgacctacggggcttgctgtgtggatgacttcacagcgagggccctgggagctgacttcttggtgcactacggccacagttgcctgattcccatggacacctcggcccaagacttccgggtgctgtacgtctttgtggacatccggatagacactacacacctcctggactctctccgcctcacctttcccccagccactgcccttgccctggtcagcaccattcagtttgtgtcgaccttgcaggcagccgcccaggagctgaaagccgagtatcgtgtgagtgtcccacagtgcaagcccctgtcccctggagagatcctgggctgcacatccccccgactgtccaaagaggtggaggccgttgtgtatcttggagatggccgcttccatctggagtctgtcatgattgccaaccccaatgtccccgcttaccggtatgacccatatagcaaagtcctatccagagaacactatgaccaccagcgcatgcaggctgctcgccaagaagccatagccactgcccgctcagctaagtcctggggccttattctgggcactttgggccgccagggcagtcctaagatcctggagcacctggaatctcgactccgagccttgggcctttcctttgtgaggctgctgctctctgagatcttccccagcaagcttagcctacttcccgaggtggatgtgtgggtgcaggtggcatgtccacgtctctccattgactggggcacagccttccccaagccgctgctgacaccctatgaggcggccgtggctctgagggacatttcctggcagcagccctacccgatggacttctacgctggcagctccttggggccctggacggtgaaccacggccaggaccgccgtccccacgccccgggccggcccgcgcgggggaaggtgcaggaggggtccgcgcgtcccccttcggccgtggcttgcgaggactgcagctgcagggacgagaaggtggcgccgctggctccttgacgcgctcccgggcctcaggtatcagcccccgctctgggtgcgccccgccttttgccgttgtcatgggaacgccntggcgctccgaggcccgccctcggggcggtgctgacgttcggttccgccccgtgcattgtgcttccgctcggggaaagaccgcttccggtgcttccgtcgctccttgccgggcataatggccgcgcagcgacccctgcgggtcctgtgcctggcgggcttccggcagagcgagcggggcttccgtgagaagaccggggcgctgaggaaggcgctgcggggtcgcgccgagctcgtgtgcctcagcggcccgcacccggtccccgaccccccgggccccgagggcgccagatcagacttcgggtcctgccctccggaggagcagcctcgaggctggtggttttcagagcaggaggccgacgttttctccgcattggaagagcccgccgtctgcaggggcctggaggaatcactggggatggtggcacaggcactgaacaggctggggccttttgacggccttcttggtttcagccaaggggctgcgctagcagcccttgtgtgtgccctgggccaggcaggcgatccccgcttccccttgccacggtttatcctcttggtgtctggtttctgtccccggggcattgggttcaaggaatccatcctgcaaaggcccttgtcattgccttcgctccatgtttttggggacactgacaaagtcatcccctctcaggagagtgtgcaactggccagccaatttcccggagccatcaccctcacccactctggtggccacttcattccagcagctgcaccccagcgtcaggcctacctcaagttcttggaccagtttgcagagtgaaagatcaagaaatgtctctgctcctacatccagctcctctaggggcagcctccgtcatccatgccctcccaggaccctccactcactgctgtgagtgcgcctcaccagaaccagttaagagacaactatcaattcttgagacccaaattataagggccctgccctgtactgaagaaaaggggagcacaaggccttaatggacattgacttgtgaaaacgcaaacatgaatatggttggagagccctggattaggagggtgacatggggaaggcagaggctggcaccatggtgactgccacataataaagtggtgatttggaacaaaaaaacaaaacaaacaaaacacacaaaacaaaaaaaagaaaaacaacaggacgggggagcgcgcatagagaaataccacggggaggggcacacaccggtaagcgcagagaagccagaacattgagggatacagaggcgggaaccccacagaagagagagagcacatatcaacacgaaacagcgggagcggggccccgcgcaagacagaaacacaaaagacaggcgcggaggcgaagagggagcgaacaacgcgcgcgacacgagaagccggggacacacacccgcgacgcaaagaacacaaaacaactacaatcgaagtcgggccgggcgaggtagcaaaacaactagcgggcaggccaacaaacacacaaacatagcaggcacatcaagtaacagacacgcaccaagaaagggaaagacacacaagccgaaaacacaaataagacgaaaagcagcgaacagacacgaggggcgagccaccgcccaacgacgcgaagacaaatcgagcaggaggcggcgcgcaaaaagcaaaaacaaaaggccggcagacgcagccagaccaaagtgacacacacacgagcagacaacaatcccaataccacaaccagcgggagagacagacagacacaaccacaaca

SEQ ID NO: 439365 - DNA, 2695 bp, Homo sapiens
  misc_feature (1574)..(1574): n is a, c, g, or t
gcttgaattagcctgcgctctccgcgttcttccagcgctgtctttttagtaccacatgcgcaggcaggtgatggcggcgctggtcgtatccggggcagcggagcagggcggccgagacggccctggcagaggtcgggcccctcggggccgcgtggccaatcagatcccccctgagatcctgaagaaccctcagctgcaggcagcaatccgggtcctgccttccaactacaactttgagatccccaagaccatctggaggatccaacaagcccaggccaagaaggtggccttgcaaatgccggaaggcctcctcctctttgcctgtaccattgtggatatcttggaaaggttcacggaggccgaagtgatggtgatgggtgacgtgacctacggggcttgctgtgtggatgacttcacagcgagggccctgggagctgacttcttggtgcactacggccacagttgcctgattcccatggacacctcggcccaagacttccgggtgctgtacgtctttgtggacatccggatagacactacacacctcctggactctctccgcctcacctttcccccagccactgcccttgccctggcagccgcccaggagctgaaagccgagtatcgtgtgagtgtcccacagtgcaagcccctgtcccctggagagatcctgggctgcacatccccccgactgtccaaagaggtggaggccgttgtgtatcttggagatggccgcttccatctggagtctgtcatgattgccaaccccaatgtccccgcttaccggtatgacccatatagcaaagtcctatccagagaacactatgaccaccagcgcatgcaggctgctcgccaagaagccatagccactgcccgctcagctaagtcctggggccttattctgggcactttgggccgccagggcagtcctaagatcctggagcacctggaatctcgactccgagccttgggcctttcctttgtgaggctgctgctctctgagatcttccccagcaagcttagcctacttcccgaggtggatgtgtgggtgcaggtggcatgtccacgtctctccattgactggggcacagccttccccaagccgctgctgacaccctatgaggcggccgtggctctgagggacatttcctggcagcagccctacccgatggacttctacgctggcagctccttggggccctggacggtgaaccacggccaggaccgccgtccccacgccccgggccggcccgcgcgggggaaggtaggcgggggcttccaggagggaggagagaccgcgcctgggcactggccgccgccctgcgaccgcgacgggaaacgcacaggagcggagcggagggaaacgcagggtcgcaggagcgagaccctgaccaaagtctgcgacctcaggtgcaggaggggtccgcgcgtcccccttcggccgtggcttgcgaggactgcagctgcagggacgagaaggtggcgccgctggctccttgacgcgctcccgggcctcaggtatcagcccccgctctgggtgcgccccgccttttgccgttgtcatgggaacgccntggcgctccgaggcccgccctcggggcggtgctgacgttcggttccgccccgtgcattgtgcttccgctcggggaaagaccgcttccggtgcttccgtcgctccttgccgggcataatggccgcgcagcgacccctgcgggtcctgtgcctggcgggcttccggcagagcgagcggggcttccgtgagaagaccggggcgctgaggaaggcgctgcggggtcgcgccgagctcgtgtgcctcagcggcccgcacccggtccccgaccccccgggccccgagggcgccagatcagacttcgggtcctgccctccggaggagcagcctcgaggctggtggttttcagagcaggaggccgacgttttctccgcattggaagagcccgccgtctgcaggggcctggaggaatcactggggatggtggcacaggcactgaacaggctggggccttttgacggccttcttggtttcagccaaggggctgcgctagcagcccttgtgtgtgccctgggccaggcaggcgatccccgcttccccttgccacggtttatcctcttggtgtctggtttctgtccccggggcattgggttcaaggaatccatcctgcaaaggcccttgtcattgccttcgctccatgtttttggggacactgacaaagtcatcccctctcaggagagtgtgcaactggccagccaatttcccggagccatcaccctcacccactctggtggccacttcattccagcagctgcaccccagcgtcaggcctacctcaagttcttggaccagtttgcagagtgaaagatcaagaaatgtctctgctcctacatccagctcctctaggggcagcctccgtcatccatgccctcccaggaccctccactcactgctgtgagtgcgcctcaccagaaccagttaagagacaactatcaattcttgagacccaaattataagggccctgccctgtactgaagaaaaggggagcacaaggccttaatggacattgacttgtgaaaacgcaaacatgaatatggttggagagccctggattaggagggtgacatggggaaggcagaggctggcaccatggtgactgccacataataaagtggtgatttgga

SEQ ID NO: 439366 - DNA, 2091 bp, Homo sapiens
  misc_feature (970)..(970): n is a, c, g, or t
gctgggattacaggcgtgagccaccgcgcccggccagccctgtggacttctaagccagcgagtgcctcttctgctgccctaaaccacacttagcctcctttccacccctgcaggtatcttggagatggccgcttccatctggagtctgtcatgattgccaaccccaatgtccccgcttaccggtatgacccatatagcaaagtcctatccagagaacactatgaccaccagcgcatgcaggctgctcgccaagaagccatagccactgcccgctcagctaagtcctggggccttattctgggcactttgggccgccagggcagtcctaagatcctggagcacctggaatctcgactccgagccttgggcctttcctttgtgaggctgctgctctctgagatcttccccagcaagcttagcctacttcccgaggtggatgtgtgggtgcaggtggcatgtccacgtctctccattgactggggcacagccttccccaagccgctgctgacaccctatgaggcggccgtggctctgagggacatttcctggcagcagccctacccgatggacttctacgctggcagctccttggggccctggacggtgaaccacggccaggaccgccgtccccacgccccgggccggcccgcgcgggggaaggtaggcgggggcttccaggagggaggagagaccgcgcctgggcactggccgccgccctgcgaccgcgacgggaaacgcacaggagcggagcggagggaaacgcagggtcgcaggagcgagaccctgaccaaagtctgcgacctcaggtgcaggaggggtccgcgcgtcccccttcggccgtggcttgcgaggactgcagctgcagggacgagaaggtggcgccgctggctccttgacgcgctcccgggcctcaggtatcagcccccgctctgggtgcgccccgccttttgccgttgtcatgggaacgccntggcgctccgaggcccgccctcggggcggtgctgacgttcggttccgccccgtgcattgtgcttccgctcggggaaagaccgcttccggtgcttccgtcgctccttgccgggcataatggccgcgcagcgacccctgcgggtcctgtgcctggcgggcttccggcagagcgagcggggcttccgtgagaagaccggggcgctgaggaaggcgctgcggggtcgcgccgagctcgtgtgcctcagcggcccgcacccggtccccgaccccccgggccccgagggcgccagatcagacttcgggtcctgccctccggaggagcagcctcgaggctggtggttttcagagcaggaggccgacgttttctccgcattggaagagcccgccgtctgcaggggcctggaggaatcactggggatggtggcacaggcactgaacaggctggggccttttgacggccttcttggtttcagccaaggggctgcgctagcagcccttgtgtgtgccctgggccaggcaggcgatccccgcttccccttgccacggtttatcctcttggtgtctggtttctgtccccggggcattgggttcaaggaatccatcctgcaaaggcccttgtcattgccttcgctccatgtttttggggacactgacaaagtcatcccctctcaggagagtgtgcaactggccagccaatttcccggagccatcaccctcacccactctggtggccacttcattccagcagctgcaccccagcgtcaggcctacctcaagttcttggaccagtttgcagagtgaaagatcaagaaatgtctctgctcctacatccagctcctctaggggcagcctccgtcatccatgccctcccaggaccctccactcactgctgtgagtgcgcctcaccagaaccagttaagagacaactatcaattcttgagacccaaattataagggccctgccctgtactgaagaaaaggggagcacaaggccttaatggacattgacttgtgaaaacgcaaacatgaatatggttggagagccctggattaggagggtgacatggggaaggcagaggctggcaccatggtgactgccacataataaagtggtgatttgga

SEQ ID NO: 439367 - DNA, 1081 bp, Homo sapiens
  misc_feature (26)..(26): n is a, c, g, or t
agcaggctggtacggtccgaggctangatcggggaaagaccgcttccggtgcttccgtcgctccttgccgggcataatggccgcgcagcgacccctgcgggtcctgtgcctggcgggcttccggcagagcgagcggggcttccgtgagaagaccggggcgctgaggaaggcgctgcggggtcgcgccgagctcgtgtgcctcagcggcccgcacccggtccccgaccccccgggccccgagggcgccagatcagacttcgggtcctgccctccggaggagcagcctcgaggctggtggttttcagagcaggaggccgacgttttctccgcattggaagagcccgccgtctgcaggggcctggaggaatcactggggatggtggcacaggcactgaacaggctggggccttttgacggccttcttggtttcagccaaggggctgcgctagcagcccttgtgtgtgccctgggccaggcaggcgatccccgcttccccttgccacggtttatcctcttggtgtctggtttctgtccccggggcattgggttcaaggaatccatcctgcaaaggcccttgtcattgccttcgctccatgtttttggggacactgacaaagtcatcccctctcaggagagtgtgcaactggccagccaatttcccggagccatcaccctcacccactctggtggccacttcattccagcagctgcaccccagcgtcaggcctacctcaagttcttggaccagtttgcagagtgaaagatcaagaaatgtctctgctcctacatccagctcctctaggggcagcctccgtcatccatgccctcccaggaccctccactcactgctgtgagtgcgcctcaccagaaccagttaagagacaactatcaattcttgagacccaaattataagggccctgccctgtactgaagaaaaggggagcacaaggccttaatggacattgacttgtgaaaacgcaaacatgaatatggttggagagccctggattaggagggtgacatggggaaggcagaggctggcaccatggtgactgccacataataaagtggtgatttgga

SEQ ID NO: 439368 - DNA, 2004 bp, Homo sapiens
gcttgaattagcctgcgctctccgcgttcttccagcgctgtctttttagtaccacatgcgcaggcaggtgatggcggcgctggtcgtatccggggcagcggagcagggcggccgagacggccctggcagaggtcgggcccctcggggccgcgtggccaatcagatcccccctgagatcctgaagaaccctcagctgcaggcagcaatccgggtcctgccttccaactacaactttgagatccccaagaccatctggaggatccaacaagcccaggccaagaaggtggccttgcaaatgccggaaggcctcctcctctttgcctgtaccattgtggatatcttggaaaggttcacggaggccgaagtgatggtgatgggtgacgtgacctacggggcttgctgtgtggatgacttcacagcgagggccctgggagctgacttcttggtgcactacggccacagttgcctgattcccatggacacctcggcccaagacttccgggtgctgtacgtctttgtggacatccggatagacactacacacctcctggactctctccgcctcacctttcccccagccactgcccttgccctggtcagcaccattcagtttgtgtcgaccttgcaggcagccgcccaggagctgaaagccgagtatcgtgtgagtgtcccacagtgcaagcccctgtcccctggagagatcctgggctgcacatccccccgactgtccaaagaggtggaggccgttgtgtatcttggagatggccgcttccatctggagtctgtcatgattgccaaccccaatgtccccgcttaccggtatgacccatatagcaaagtcctatccagagaacactatgaccaccagcgcatgcaggctgctcgccaagaagccatagccactgcccgctcagctaagtcctggggccttattctgggcactttgggccgccagggcagtcctaagatcctggagcacctggaatctcgactccgagccttgggcctttcctttgtgaggctgctgctctctgagatcttccccagcaagcttagcctacttcccgaggtggatgtgtgggtgcaggtggcatgtccacgtctctccattgactggggcacagccttccccaagccgctgctgacaccctatgaggcggccgtggctctgagggacatttcctggcagcagccctacccgatggacttctacgctggcagctccttggggccctggacggtgaaccacggccaggaccgccgtccccacgccccgggccggcccgcgcgggggaaggtaggcgggggcttccaggagggaggagagaccgcgcctgggcactggccgccgccctgcgaccgcgacgggaaacgcacaggagcggagcggagggaaacgcagggtcgcaggagcgagaccctgaccaaagtctgcgacctcaggtgcaggaggggtccgcgcgtcccccttcggccgtggcttgcgaggactgcagctgcagggacgagaaggtggcgccgctggctccttgacgcgctcccgggcctcagcaggagagtgtgcaactggccagccaatttcccggagccatcaccctcacccactctggtggccacttcattccagcagctgcaccccagcgtcaggcctacctcaagttcttggaccagtttgcagagtgaaagatcaagaaatgtctctgctcctacatccagctcctctaggggcagcctccgtcatccatgccctcccaggaccctccactcactgctgtgagtgcgcctcaccagaaccagttaagagacaactatcaattcttgagacccaaattataagggccctgccctgtactgaagaaaaggggagcacaaggccttaatggacattgacttgtgaaaacgcaaacatgaatatggttggagagccctggattaggagggtgacatggggaaggcagaggctggcaccatggtgactgccacataataaagtggtgatttgga

SEQ ID NO: 439369 - DNA, 2766 bp, Homo sapiens
gcttgaattagcctgcgctctccgcgttcttccagcgctgtctttttagtaccacatgcgcaggcaggtgatggcggcgctggtcgtatccggggcagcggagcagggcggccgagacggccctggcagaggtcgggcccctcggggccgcgtggccaatcagatcccccctgagatcctgaagaaccctcagctgcaggcagcaatccgggtcctgccttccaactacaactttgagatccccaagaccatctggaggatccaacaagcccaggccaagaaggtggccttgcaaatgccggaaggcctcctcctctttgcctgtaccattgtggatatcttggaaaggttcacggaggccgaagtgatggtgatgggtgacgtgacctacggggcttgctgtgtggatgacttcacagcgagggccctgggagctgacttcttggtgcactacggccacagttgcctgattcccatggacacctcggcccaagacttccgggtgctgtacgtctttgtggacatccggatagacactacacacctcctggactctctccgcctcacctttcccccagccactgcccttgccctggtcagcaccattcagtttgtgtcgaccttgcaggcagccgcccaggagctgaaagccgagtatcgtgtgagtgtcccacagtgcaagcccctgtcccctggagagatcctgggctgcacatccccccgactgtccaaagaggtggaggccgttgtgtatcttggagatggccgcttccatctggagtctgtcatgattgccaaccccaatgtccccgcttaccggtatgacccatatagcaaagtcctatccagagaacactatgaccaccagcgcatgcaggctgctcgccaagaagccatagccactgcccgctcagctaagtcctggggccttattctgggcactttgggccgccagggcagtcctaagatcctggagcacctggaatctcgactccgagccttgggcctttcctttgtgaggctgctgctctctgagatcttccccagcaagcttagcctacttcccgaggtggatgtgtgggtgcaggtggcatgtccacgtctctccattgactggggcacagccttccccaagccgctgctgacaccctatgaggcggccgtggctctgagggacatttcctggcagcagccctacccgatggacttctacgctggcagctccttggggccctggacggtgaaccacggccaggaccgccgtccccacgccccgggccggcccgcgcgggggaaggtgcaggaggggtccgcgcgtcccccttcggccgtggcttgcgaggactgcagctgcagggacgagaaggtggcgccgctggctccttgacgcgctcccgggcctcagggtcctgccctccggaggagcagcctcgaggctggtggttttcagagcaggaggccgacgttttctccgcattggaagagcccgccgtctgcaggggcctggaggaatcactggggatggtggcacaggcactgaacaggctggggccttttgacggccttcttggtttcagccaaggggctgcgctagcagcccttgtgtgtgccctgggccaggcaggcgatccccgcttccccttgccacggtttatcctcttggtgtctggtttctgtccccggggcattgggttcaaggaatccatcctgcaaaggcccttgtcattgccttcgctccatgtttttggggacactgacaaagtcatcccctctctcaagttcttggaccagtttgcagagtgaaagatcaagaaatgtctctgctcctacatccagctcctctaggggcagcctccgtcatccatgccctcccaggaccctccactcactgctgtgagtgcgcctcaccagaaccagttaagagacaactatcaattcttgagacccaaattataagggccctgccctgtactgaagaaaaggggagcacaaggccttaatggacattgacttgtgaaaacgcaaacatgaatatggttggagagccctggattaggagggtgacatggggaaggcagaggctggcaccatggtgactgccacataataaagtggtgatttggaacaaaaaaacaaaacaaacaaaacacacaaaacaaaaaaaagaaaaacaacaggacgggggagcgcgcatagagaaataccacggggaggggcacacaccggtaagcgcagagaagccagaacattgagggatacagaggcgggaaccccacagaagagagagagcacatatcaacacgaaacagcgggagcggggccccgcgcaagacagaaacacaaaagacaggcgcggaggcgaagagggagcgaacaacgcgcgcgacacgagaagccggggacacacacccgcgacgcaaagaacacaaaacaactacaatcgaagtcgggccgggcgaggtagcaaaacaactagcgggcaggccaacaaacacacaaacatagcaggcacatcaagtaacagacacgcaccaagaaagggaaagacacacaagccgaaaacacaaataagacgaaaagcagcgaacagacacgaggggcgagccaccgcccaacgacgcgaagacaaatcgagcaggaggcggcgcgcaaaaagcaaaaacaaaaggccggcagacgcagccagaccaaagtgacacacacacgagcagacaacaatcccaataccacaaccagcgggagagacagacagacacaaccacaaca

SEQ ID NO: 439370 - DNA, 1122 bp, Homo sapiens
agcaggctgtactggtccgaatttttagatggcaggtgatggcggcgctggtcgtatccggggcagcggagcagggcggccgagacggccctggcagaggtgggtgctggaacgctgcgccctccagacctcgcatctcggggcggggcccccaagttagggacaggaccaaccccctttaacggcggcggcgcctttctccgctagatcccgctgttagtcgccttgggccgctgtcaccagctcggggtcgctgtcagccggagcccaggggtaccagtcttttgcagctttagggcacgaccgagagcagcccttaatcctccaatcggaaactacagccttgtcttggcgggtagacggataaaatggactcgacggggagggaaagggccaggccagatgcagcgggcattttacgagtgcgccctcagggaatgctttcagggaagaggcaaaaggtttcattcgccaggcattaactgagcgcccaccgaatgccaggcctgcgctgggtgcaggtactagaatcagagatctcagtctactgggggaatgttaatgtaaacatatcatagccacgtgataaaggaggaggtgcctactggtccctgggacacattgaagggctaatgttagcagttccttacacgccagcgaccactagggacctgtcagaggaggatctgtaatgggcctaggaagcctaggctgattgtccaaggcttttgaaacaactggccaaaaaccatagcagtggtaacgttcaaatctgatctcagggccccagcctccgctggaccatccccaccgccgcccacacagtgggtgaagcctcatgtctgggcgggtccctcctatcatagtgtggggccctagcagaagttgtggcacatagcacagtctcaatacatattcgttgaataagttaatttcttgccttttcatatcctcagactctgtggctcctgaagagataacggggttgaactaagcttaattgtcggggcagggcatagtggcttacacctttagtctgagcactttgggaggctaaggaggattgtgtgagcccaggaattccacaccagtctgggaaacatagggggaccctgtatgcac

SEQ ID NO: 439371 - DNA, 852 bp, Homo sapiens
gcttgaattagcctgcgctctccgcgttcttccagcgctgtctttttagtaccacatgcgcaggcaggtgatggcggcgctggtcgtatccggggcagcggagcagggcggccgagacggccctggcagaggtcgggcccctcggggccgcgtggccaatcagatcccccctgagatcctgaagaaccctcagctgcaggcagcaatccgggtcctgccttccaactacaactttgagatccccaagaccatctggaggatccaacaagcccaggccaagaaggtggccttgcaaatgccggaaggcctcctcctctttgcctgtaccattgtggatatcttggaaaggttcacggaggccgaagtgatggtgatgggtgacgtgacctacggggcttgctgtgtggatgacttcacagcgagggccctgggagctgacttcttggtgcactacggccacagttgcctgagtatggtggggccaggacacctggacggtggcggggctggcagggaggcaggctgcacattcatcttccccatggcagtgccttcttgtcctgcttggagacacaaggtccctcctggtttctggggtggcctctgccttcccgctctgcaggtagatctttcctttggatttggttgccttggcaacggtgctctgtcccagatgcaggtgtttgaaaggctgttggttgtagagcaggctgggccccggccgggtgacagagaagtctgattgagaaggagcttctaggggatctgtgacccccctcttctcctaccctgtccttttacccccaggctgaagccactgcgcctggctgctcagagacctgagcctggccg

SEQ ID NO: 439372 - DNA, 500 bp, Homo sapiens
gcttgaattagcctgcgctctccgcgttcttccagcgctgtctttttagtaccacatgcgcaggcaggtgatggcggcgctggtcgtatccggggcagcggagcagggcggccgagacggccctggcagaggtcgggcccctcggggccgcgtggccaatcagatcccccctgagatcctgaagaaccctcagctgcaggcagcaatccgggtcctgccttccaactacaactttgagatccccaagaccatctggaggatccaacaagcccaggccaagaaggtggccttgcaaatgccggaaggcctcctcctctttgcctgtaccattgtggatatcttggaaaggttcacggaggccgaagtgatggtgatgggtgacgtgacctacggggcttgctgtggatcactggtttttcacattggcttctgtcacttagtaatatatgtttaagtttcttctacgtattttcatgtttttagcttatttctttttagca

SEQ ID NO: 439373 - DNA, 561 bp, Homo sapiens
gccagggcagtcctaagatcctggaggtcagtgggctcaggacagcctctggaggagggaagtgactgggaacacagctgggaaaaccagtaggccacaggttcagctttggctgcttgaccaggtgacccccaccctgcctccctctcccaacagcacctggaatctcgactccgagccttgggcctttcctttgtgaggctgctgctctctgagatcttccccagcaagcttagcctacttcccgaggtggatgtgtgagtatctgcctggctatgactggctaaagaagcttagaagctgggtcttgcccagctcgtcttgaaggctggagccaacaggaattgcttccatggtcatggaattttactgtttacagagacctccctgggagggctaactgggtcatacctgctttgggactttggggctcagaggcaatggcaacatcacatttgtccttgtgagatgagtttgagcggtggctgacacctgccctgtaccaggtactaaatgtggttctggggatactatcaccagtgagctgccctggaaagctca

SEQ ID NO: 439374 - DNA, 2226 bp, Homo sapiens
gcttgaattagcctgcgctctccgcgttcttccagcgctgtctttttagtaccacatgcgcaggcaggtgatggcggcgctggtcgtatccggggcagcggagcagggcggccgagacggccctggcagaggtcgggcccctcggggccgcgtggccaatcagatcccccctgagatcctgaagaaccctcagctgcaggcagcaatccgggtcctgccttccaactacaactttgagatccccaagaccatctggaggatccaacaagcccaggccaagaaggtggccttgcaaatgccggaaggcctcctcctctttgcctgtaccattgtggatatcttggaaaggttcacggaggccgaagtgatggtgatgggtgacgtgacctacggggcttgctgtgtggatgacttcacagcgagggccctgggagctgacttcttggtgcactacggccacagttgcctgattcccatggacacctcggcccaagacttccgggtgctgtacgtctttgtggacatccggatagacactacacacctcctggactctctccgcctcacctttcccccagccactgcccttgccctggtcagcaccattcagtttgtgtcgaccttgcaggcagccgcccaggagctgaaagccgagtatcgtgtgagtgtcccacagtgcaagcccctgtcccctggagagatcctgggctgcacatccccccgactgtccaaagaggtggaggccgttgtgtatcttggagatggccgcttccatctggagtctgtcatgattgccaaccccaatgtccccgcttaccggtatgacccatatagcaaagtcctatccagagaacactatgaccaccagcgcatgcaggctgctcgccaagaagccatagccactgcccgctcagctaagtcctggggccttattctgggcactttgggccgccagggcagtcctaagatcctggagcacctggaatctcgactccgagccttgggcctttcctttgtgaggctgctgctctctgagatcttccccagcaagcttagcctacttcccgaggtggatgtgtgggtgcaggtggcatgtccacgtctctccattgactggggcacagccttccccaagccgctgctgacaccctatgaggcggccgtggctctgagggacatttcctggcagcagccctacccgatggacttctacgctggcagctccttggggccctggacggtgaaccacggccaggaccgccgtccccacgccccgggccggcccgcgcgggggaaggtgcaggaggggtccgcgcgtcccccttcggccgtggcttgcgaggactgcagctgcagggacgagaaggtggcgccgctggctccttgacgcgctcccgggcctcagggtcctgccctccggaggagcagcctcgaggctggtggttttcagagcaggaggccgacgttttctccgcattggaagagcccgccgtctgcaggggcctggaggaatcactggggatggtggcacaggcactgaacaggctggggccttttgacggccttcttggtttcagccaaggggctgcgctagcagcccttgtgtgtgccctgggccaggcaggcgatccccgcttccccttgccacggtttatcctcttggtgtctggtttctgtccccggggcattgggttcaaggaatccatcctgcaaaggcccttgtcattgccttcgctccatgtttttggggacactgacaaagtcatcccctctcaggagagtgtgcaactggccagccaatttcccggagccatcaccctcacccactctggtggccacttcattccagcagctgcaccccagcgtcaggcctacctcaagttcttggaccagtttgcagagtgaaagatcaagaaatgtctctgctcctacatccagctcctctaggggcagcctccgtcatccatgccctcccaggaccctccactcactgctgtgagtgcgcctcaccagaaccagttaagagacaactatcaattcttgagacccaaattataagggccctgccctgtactgaagaaaaggggagcacaaggccttaatggacattgacttgtgaaaacgcaaacatgaatatggttggagagccctggattaggagggtgacatggggaaggcagaggctggcaccatggtgactgccacataataaagtggtgatttgga

SEQ ID NO: 439375 - DNA, 804 bp, Homo sapiens
agcaggctgtactggtccgaatttttagatggcaggtgatggcggcgctggtcgtatccggggcagcggagcagggcggccgagacggccctggcagaggtcgggcccctcggggccgcgtggccaatcagatcccccctgagatcctgaagaaccctcagctgcaggcagcaatccgggtcctgccttccaactacaactttgagatccccaagaccatctggaggatccaacaagcccaggccaagaaggtggccttgcaaatgccggaaggcctcctcctctttgcctgtaccattgtggatatcttggaaaggttcacggaggccgaagtgatggtgatgggtgacgtgacctacggggcttgctgtgtggatgacttcacagcgagggccctgggagctgacttcttggtgcactacggccacagttgcctgattcccatggacacctcggcccaagacttccgggtgctgtacgtctttgtggacatccggatagacactacacacctcctggactctctccgcctcacctttcccccagccactgcccttgccctggtcagcaccattcagtttgtgtcgaccttgcaggcagccgcccaggagctgaaagccgagtatcgtgtgagtgtcccacagtgcaagcccctgtcccctggagagatcctgggctgcacatccccccgactgtccaaagaggtggaggccgttgtgtaagttaaaaatgggggccaagtaagtcctagagacatgcgtgtaccctgggagggagcctgaggttcatcatccaggaaagaaa

SEQ ID NO: 439376 - DNA, 2550 bp, Homo sapiens
  misc_feature (1429)..(1429): n is a, c, g, or t
agcaggctgtactggtccgaatttttagatggcaggtgatggcggcgctggtcgtatccggggcagcggagcagggcggccgagacggccctggcagaggtcgggcccctcggggccgcgtggccaatcagatcccccctgagatcctgaagaaccctcagctgcaggcagcaatccgggtcctgccttccaactacaactttgagatccccaagaccatctggaggatccaacaagcccaggccaagaaggtggccttgcaaatgccggaaggcctcctcctctttgcctgtaccattgtggatatcttggaaaggttcacggaggccgaagtgatggtgatgggtgacgtgacctacggggcttgctgtgtggatgacttcacagcgagggccctgggagctgacttcttggtgcactacggccacagttgcctgattcccatggacacctcggcccaagacttccgggtgctgtacgtctttgtggacatccggatagacactacacacctcctggactctctccgcctcacctttcccccagccactgcccttgccctggtcagcaccattcagtttgtgtcgaccttgcaggcagccgcccaggagctgaaagccgagtatcgtgtgagtgtcccacagtgcaagcccctgtcccctggagagatcctgggctgcacatccccccgactgtccaaagaggtggaggccgttgtgtatcttggagatggccgcttccatctggagtctgtcatgattgccaaccccaatgtccccgcttaccggtatgacccatatagcaaagtcctatccagagaacactatgaccaccagcgcatgcaggctgctcgccaagaagccatagccactgcccgctcagctaagtcctggggccttattctgggcactttgggccgccagggcagtcctaagatcctggagcacctggaatctcgactccgagccttgggcctttcctttgtgaggctgctgctctctgagatcttccccagcaagcttagcctacttcccgaggtggatgtgtgggtgcaggtggcatgtccacgtctctccattgactggggcacagccttccccaagccgctgctgacaccctatgaggcggccgtggctctgagggacatttcctggcagcagccctacccgatggacttctacgctggcagctccttggggccctggacggtgaaccacggccaggaccgccgtccccacgccccgggccggcccgcgcgggggaaggtgcaggaggggtccgcgcgtcccccttcggccgtggcttgcgaggactgcagctgcagggacgagaaggtggcgccgctggctccttgacgcgctcccgggcctcaggtatcagcccccgctctgggtgcgccccgccttttgccgttgtcatgggaacgccntggcgctccgaggcccgccctcggggcggtgctgacgttcggttccgccccgtgcattgtgcttccgctcggggaaagaccgcttccggtgcttccgtcgctccttgccgggcataatggccgcgcagcgacccctgcgggtcctgtgcctggcgggcttccggcagagcgagcggggcttccgtgagaagaccggggcgctgaggaaggcgctgcggggtcgcgccgagctcgtgtgcctcagcggcccgcacccggtccccgaccccccgggccccgagggcgccagatcagacttcgggtcctgccctccggaggagcagcctcgaggctggtggttttcagagcaggaggccgacgttttctccgcattggaagagcccgccgtctgcaggggcctggaggaatcactggggatggtggcacaggcactgaacaggctggggccttttgacggccttcttggtttcagccaaggggctgcgctagcagcccttgtgtgtgccctgggccaggcaggcgatccccgcttccccttgccacggtttatcctcttggtgtctggtttctgtccccggggcattgggttcaaggaatccatcctgcaaaggcccttgtcattgccttcgctccatgtttttggggacactgacaaagtcatcccctctcaggagagtgtgcaactggccagccaatttcccggagccatcaccctcacccactctggtggccacttcattccagcagctgcaccccagcgtcaggcctacctcaagttcttggaccagtttgcagagtgaaagatcaagaaatgtctctgctcctacatccagctcctctaggggcagcctccgtcatccatgccctcccaggaccctccactcactgctgtgagtgcgcctcaccagaaccagttaagagacaactatcaattcttgagacccaaattataagggccctgccctgtactgaagaaaaggggagcacaaggccttaatggacattgacttgtgaaaacgcaaacatgaatatggttggagagccctggattaggagggtgacatggggaaggcagaggctggcaccatggtgactgccacataataaagtggtgatttgga

SEQ ID NO: 439377 - DNA, 2635 bp, Homo sapiens
  misc_feature (1461)..(1461): n is a, c, g, or t
gcttgaattagcctgcgctctccgcgttcttccagcgctgtctttttagtaccacatgcgcaggcaggtgatggcggcgctggtcgtatccggggcagcggagcagggcggccgagacggccctggcagaggtcgggcccctcggggccgcgtggccaatcagatcccccctgagatcctgaagaaccctcagctgcaggcagcaatccgggtcctgccttccaactacaactttgagatccccaagaccatctggaggatccaacaagcccaggccaagaaggtggccttgcaaatgccggaaggcctcctcctctttgcctgtaccattgtggatatcttggaaaggttcacggaggccgaagtgatggtgatgggtgacgtgacctacggggcttgctgtgtggatgacttcacagcgagggccctgggagctgacttcttggtgcactacggccacagttgcctgattcccatggacacctcggcccaagacttccgggtgctgtacgtctttgtggacatccggatagacactacacacctcctggactctctccgcctcacctttcccccagccactgcccttgccctggtcagcaccattcagtttgtgtcgaccttgcaggcagccgcccaggagctgaaagccgagtatcgtgtgagtgtcccacagtgcaagcccctgtcccctggagagatcctgggctgcacatccccccgactgtccaaagaggtggaggccgttgtgtatcttggagatggccgcttccatctggagtctgtcatgattgccaaccccaatgtccccgcttaccggtatgacccatatagcaaagtcctatccagagaacactatgaccaccagcgcatgcaggctgctcgccaagaagccatagccactgcccgctcagctaagtcctggggccttattctgggcactttgggccgccagggcagtcctaagatcctggagcacctggaatctcgactccgagccttgggcctttcctttgtgaggctgctgctctctgagatcttccccagcaagcttagcctacttcccgaggtggatgtgtgggtgcaggtggcatgtccacgtctctccattgactggggcacagccttccccaagccgctgctgacaccctatgaggcggccgtggctctgagggacatttcctggcagcagccctacccgatggacttctacgctggcagctccttggggccctggacggtgaaccacggccaggaccgccgtccccacgccccgggccggcccgcgcgggggaaggtgcaggaggggtccgcgcgtcccccttcggccgtggcttgcgaggactgcagctgcagggacgagaaggtggcgccgctggctccttgacgcgctcccgggcctcaggtatcagcccccgctctgggtgcgccccgccttttgccgttgtcatgggaacgccntggcgctccgaggcccgccctcggggcggtgctgacgttcggttccgccccgtgcattgtgcttccgctcggggaaagaccgcttccggtgcttccgtcgctccttgccgggcataatggccgcgcagcgacccctgcgggtcctgtgcctggcgggcttccggcagagcgagcggggcttccgtgagaagaccggggcgctgaggaaggcgctgcggggtcgcgccgagctcgtgtgcctcagcggcccgcacccggtccccgaccccccgggccccgagggcgccagatcagacttcgggtcctgccctccggaggagcagcctcgaggctggtggttttcagagcaggaggccgacgttttctccgcattggaagagcccgccgtctgcaggggcctggaggaatcactggggatggtggcacaggcactgaacaggctggggccttttgacggccttcttggtttcagccaaggggctgcgctagcagcccttgtgtgtgccctgggccaggcaggcgatccccgcttccccttgccacggtttatcctcttggtgtctggtttctgtccccggggcattgggttcaaggaatccatcctgcaaaggcccttgtcattgccttcgctccatgtttttggggacactgacaaagtcatcccctctcaggagagtgtgcaactggccagccaatttcccggagccatcaccctcacccactctggtggccacttcattccagcagctgcaccccagcgtcaggcctacctcaagttcttggaccagtttgcagagtgaaagatcaagaaatgtctctgctcctacatccagctcctctaggggcagcctccgtcatccatgccctcccaggaccctccactcactgctgtgagtgcgcctcaccagaaccagttaagagacaactatcaattcttgagacccaaattataagggccctgccctgtactgaagaaaaggggagcacaaggccttaatggacattgacttgtgaaaacgcaaacatgaatatggttggagagccctggattaggagggtgacatggggaaggcagaggctggcaccatggtgactgccacataataaagtggtgatttggaaaaaaaaaaaaccaaaaatcactaaattataaaataattacaaaaaaaaaaaa

SEQ ID NO: 439378 - DNA, 2372 bp, Homo sapiens
gcttgaattagcctgcgctctccgcgttcttccagcgctgtctttttagtaccacatgcgcaggcaggtgatggcggcgctggtcgtatccggggcagcggagcagggcggccgagacggccctggcagaggtcgggcccctcggggccgcgtggccaatcagatcccccctgagatcctgaagaaccctcagctgcaggcagcaatccgggtcctgccttccaactacaactttgagatccccaagaccatctggaggatccaacaagcccaggccaagaaggtggccttgcaaatgccggaaggcctcctcctctttgcctgtaccattgtggatatcttggaaaggttcacggaggccgaagtgatggtgatgggtgacgtgacctacggggcttgctgtgtggatgacttcacagcgagggccctgggagctgacttcttggtgcactacggccacagttgcctgattcccatggacacctcggcccaagacttccgggtgctgtacgtctttgtggacatccggatagacactacacacctcctggactctctccgcctcacctttcccccagccactgcccttgccctggtcagcaccattcagtttgtgtcgaccttgcaggcagccgcccaggagctgaaagccgagtatcgtgtgagtgtcccacagtgcaagcccctgtcccctggagagatcctgggctgcacatccccccgactgtccaaagaggtggaggccgttgtgtatcttggagatggccgcttccatctggagtctgtcatgattgccaaccccaatgtccccgcttaccggtatgacccatatagcaaagtcctatccagagaacactatgaccaccagcgcatgcaggctgctcgccaagaagccatagccactgcccgctcagctaagtcctggggccttattctgggcactttgggccgccagggcagtcctaagatcctggagcacctggaatctcgactccgagccttgggcctttcctttgtgaggctgctgctctctgagatcttccccagcaagcttagcctacttcccgaggtggatgtgtgggtgcaggtggcatgtccacgtctctccattgactggggcacagccttccccaagccgctgctgacaccctatgaggcggccgtggctctgagggacatttcctggcagcagccctacccgatggacttctacgctggcagctccttggggccctggacggtgaaccacggccaggaccgccgtccccacgccccgggccggcccgcgcgggggaaggtaggcgggggcttccaggagggaggagagaccgcgcctgggcactggccgccgccctgcgaccgcgacgggaaacgcacaggagcggagcggagggaaacgcagggtcgcaggagcgagaccctgaccaaagtctgcgacctcaggtgcaggaggggtccgcgcgtcccccttcggccgtggcttgcgaggactgcagctgcagggacgagaaggtggcgccgctggctccttgacgcgctcccgggcctcagggtcctgccctccggaggagcagcctcgaggctggtggttttcagagcaggaggccgacgttttctccgcattggaagagcccgccgtctgcaggggcctggaggaatcactggggatggtggcacaggcactgaacaggctggggccttttgacggccttcttggtttcagccaaggggctgcgctagcagcccttgtgtgtgccctgggccaggcaggcgatccccgcttccccttgccacggtttatcctcttggtgtctggtttctgtccccggggcattgggttcaaggaatccatcctgcaaaggcccttgtcattgccttcgctccatgtttttggggacactgacaaagtcatcccctctcaggagagtgtgcaactggccagccaatttcccggagccatcaccctcacccactctggtggccacttcattccagcagctgcaccccagcgtcaggcctacctcaagttcttggaccagtttgcagagtgaaagatcaagaaatgtctctgctcctacatccagctcctctaggggcagcctccgtcatccatgccctcccaggaccctccactcactgctgtgagtgcgcctcaccagaaccagttaagagacaactatcaattcttgagacccaaattataagggccctgccctgtactgaagaaaaggggagcacaaggccttaatggacattgacttgtgaaaacgcaaacatgaatatggttggagagccctggattaggagggtgacatggggaaggcagaggctggcaccatggtgactgccacataataaagtggtgatttgga

SEQ ID NO: 439379 - DNA, 2104 bp, Homo sapiens
  misc_feature (983)..(983): n is a, c, g, or t
agtattccaaacagcagtgggtcactgtctttactttaggattcataaagcctgttaatgaatgggtgtgctgggggcactgtcatgttcttcagcatgctgcctgggcgacgaggaggcccttcctagggtctgacctggcttcccttcccaggtgggtgcaggtggcatgtccacgtctctccattgactggggcacagccttccccaagccgctgctgacaccctatgaggtaacaccaagctctgggagagagtgggctttggacgtggttctcaaaggtgaggtctggagtggagtggggtgggtgggcagcacttcgttatgttcgtagattccggagtctgtctcgatttctccagcggagtcacttcctagctgtgtagccttaggcaaggccctgaaccacacagttcccttctgtggcaggggacagtgtgcccttcacaggccgtcgtgaggactgaattcagtaatccaggggcagaaaaacactggcagatgttattgtccctccctcccctcccctaggcggccgtggctctgagggacatttcctggcagcagccctacccgatggacttctacgctggcagctccttggggccctggacggtgaaccacggccaggaccgccgtccccacgccccgggccggcccgcgcgggggaaggtaggcgggggcttccaggagggaggagagaccgcgcctgggcactggccgccgccctgcgaccgcgacgggaaacgcacaggagcggagcggagggaaacgcagggtcgcaggagcgagaccctgaccaaagtctgcgacctcaggtgcaggaggggtccgcgcgtcccccttcggccgtggcttgcgaggactgcagctgcagggacgagaaggtggcgccgctggctccttgacgcgctcccgggcctcaggtatcagcccccgctctgggtgcgccccgccttttgccgttgtcatgggaacgccntggcgctccgaggcccgccctcggggcggtgctgacgttcggttccgccccgtgcattgtgcttccgctcggggaaagaccgcttccggtgcttccgtcgctccttgccgggcataatggccgcgcagcgacccctgcgggtcctgtgcctggcgggcttccggcagagcgagcggggcttccgtgagaagaccggggcgctgaggaaggcgctgcggggtcgcgccgagctcgtgtgcctcagcggcccgcacccggtccccgaccccccgggccccgagggcgccagatcagacttcgggtcctgccctccggaggagcagcctcgaggctggtggttttcagagcaggaggccgacgttttctccgcattggaagagcccgccgtctgcaggggcctggaggaatcactggggatggtggcacaggcactgaacaggctggggccttttgacggccttcttggtttcagccaaggggctgcgctagcagcccttgtgtgtgccctgggccaggcaggcgatccccgcttccccttgccacggtttatcctcttggtgtctggtttctgtccccggggcattgggttcaaggaatccatcctgcaaaggcccttgtcattgccttcgctccatgtttttggggacactgacaaagtcatcccctctcaggagagtgtgcaactggccagccaatttcccggagccatcaccctcacccactctggtggccacttcattccagcagctgcaccccagcgtcaggcctacctcaagttcttggaccagtttgcagagtgaaagatcaagaaatgtctctgctcctacatccagctcctctaggggcagcctccgtcatccatgccctcccaggaccctccactcactgctgtgagtgcgcctcaccagaaccagttaagagacaactatcaattcttgagacccaaattataagggccctgccctgtactgaagaaaaggggagcacaaggccttaatggacattgacttgtgaaaacgcaaacatgaatatggttggagagccctggattaggagggtgacatggggaaggcagaggctggcaccatggtgactgccacataataaagtggtgatttgga

SEQ ID NO: 439380 - DNA, 2493 bp, Homo sapiens
  misc_feature (1461)..(1461): n is a, c, g, or t
gcttgaattagcctgcgctctccgcgttcttccagcgctgtctttttagtaccacatgcgcaggcaggtgatggcggcgctggtcgtatccggggcagcggagcagggcggccgagacggccctggcagaggtcgggcccctcggggccgcgtggccaatcagatcccccctgagatcctgaagaaccctcagctgcaggcagcaatccgggtcctgccttccaactacaactttgagatccccaagaccatctggaggatccaacaagcccaggccaagaaggtggccttgcaaatgccggaaggcctcctcctctttgcctgtaccattgtggatatcttggaaaggttcacggaggccgaagtgatggtgatgggtgacgtgacctacggggcttgctgtgtggatgacttcacagcgagggccctgggagctgacttcttggtgcactacggccacagttgcctgattcccatggacacctcggcccaagacttccgggtgctgtacgtctttgtggacatccggatagacactacacacctcctggactctctccgcctcacctttcccccagccactgcccttgccctggtcagcaccattcagtttgtgtcgaccttgcaggcagccgcccaggagctgaaagccgagtatcgtgtgagtgtcccacagtgcaagcccctgtcccctggagagatcctgggctgcacatccccccgactgtccaaagaggtggaggccgttgtgtatcttggagatggccgcttccatctggagtctgtcatgattgccaaccccaatgtccccgcttaccggtatgacccatatagcaaagtcctatccagagaacactatgaccaccagcgcatgcaggctgctcgccaagaagccatagccactgcccgctcagctaagtcctggggccttattctgggcactttgggccgccagggcagtcctaagatcctggagcacctggaatctcgactccgagccttgggcctttcctttgtgaggctgctgctctctgagatcttccccagcaagcttagcctacttcccgaggtggatgtgtgggtgcaggtggcatgtccacgtctctccattgactggggcacagccttccccaagccgctgctgacaccctatgaggcggccgtggctctgagggacatttcctggcagcagccctacccgatggacttctacgctggcagctccttggggccctggacggtgaaccacggccaggaccgccgtccccacgccccgggccggcccgcgcgggggaaggtgcaggaggggtccgcgcgtcccccttcggccgtggcttgcgaggactgcagctgcagggacgagaaggtggcgccgctggctccttgacgcgctcccgggcctcaggtatcagcccccgctctgggtgcgccccgccttttgccgttgtcatgggaacgccntggcgctccgaggcccgccctcggggcggtgctgacgttcggttccgccccgtgcattgtgcttccgctcggggaaagaccgcttccggtgcttccgtcgctccttgccgggcataatggccgcgcagcgacccctgcgggtcctgtgcctggcgggcttccggcagagcgagcggggcttccgtgagaagaccggggcgctgaggaaggcgctgcggggtcgcgccgagctcgtgtgcctcagcggcccgcacccggtccccgaccccccgggccccgagggcgccagatcagacttcgggtcctgccctccggaggagcagcctcgaggctggtggttttcagagcaggaggccgacgttttctccgcattggaagagcccgccgtctgcaggggcctggaggaatcactggggatggtggcacaggcactgaacaggctggggccttttgacggccttcttggtttcagccaaggggctgcgctagcagcccttgtgtgtgccctgggccaggcaggcgatccccgcttccccttgccacggtttatcctcttggtgtctggtttctgtccccggggcattgggttcaaggaatccatcctgcaaaggcccttgtcattgccttcgctccatgtttttggggacactgacaaagtcatcccctctcaggagagtgtgcaactggccagccaatttcccggagccatcaccctcacccactctggtggccacttcattccagcagctgcaccccagcgtcaggcctacctcaagttcttggaccagtttgcagagtgaaagatcaagaaatgtctctgctcctacatccagctcctctaggggcagcctccgtcatccatgccctcccaggaccctcctgaagaaaaggggagcacaaggccttaatggacattgacttgtgaaaacgcaaacatgaatatggttggagagccctggattaggagggtgacatggggaaggcagaggctggcaccatggtgactgccacataataaagtggtgatttgga

SEQ ID NO: 439381 - DNA, 2059 bp, Homo sapiens
gcttgaattagcctgcgctctccgcgttcttccagcgctgtctttttagtaccacatgcgcaggcaggtgatggcggcgctggtcgtatccggggcagcggagcagggcggccgagacggccctggcagaggtcgggcccctcggggccgcgtggccaatcagatcccccctgagatcctgaagaaccctcagctgcaggcagcaatccgggtcctgccttccaactacaactttgagatccccaagaccatctggaggatccaacaagcccaggccaagaaggtggccttgcaaatgccggaaggcctcctcctctttgcctgtaccattgtggatatcttggaaaggttcacggaggccgaagtgatggtgatgggtgacgtgacctacggggcttgctgtgtggatgacttcacagcgagggccctgggagctgacttcttggtgcactacggccacagttgcctgattcccatggacacctcggcccaagacttccgggtgctgtacgtctttgtggacatccggatagacactacacacctcctggactctctccgcctcacctttcccccagccactgcccttgccctggtcagcaccattcagtttgtgtcgaccttgcaggcagccgcccaggagctgaaagccgagtatcgtgtgagtgtcccacagtgcaagcccctgtcccctggagagatcctgggctgcacatccccccgactgtccaaagaggtggaggccgttgtgtatcttggagatggccgcttccatctggagtctgtcatgattgccaaccccaatgtccccgcttaccggtatgacccatatagcaaagtcctatccagagaacactatgaccaccagcgcatgcaggctgctcgccaagaagccatagccactgcccgctcagctaagtcctggggccttattctgggcactttgggccgccagggcagtcctaagatcctggagcacctggaatctcgactccgagccttgggcctttcctttgtgaggctgctgctctctgagatcttccccagcaagcttagcctacttcccgaggtggatgtgtgggtgcaggtggcatgtccacgtctctccattgactggggcacagccttccccaagccgctgctgacaccctatgaggcggccgtggctctgagggacatttcctggcagcagccctacccgatggacttctacgctggcagctccttggggccctggacggtgaaccacggccaggaccgccgtccccacgccccgggccggcccgcgcgggggaaggtgcaggaggggtccgcgcgtcccccttcggccgtggcttgcgaggactgcagctgcagggacgagaaggtggcgccgctggctccttgacgcgctcccgggcctcagggtcctgccctccggaggagcagcctcgaggctggtggttttcagagcaggaggccgacgttttctccgcattggaagagcccgccgtctgcaggggcctggaggaatcactggggatggtggcacaggcactgaacaggctggggccttttgacggccttcttggtttcagccaaggggctgcgctagcagcccttgtgtgtgccctgggccaggcaggcgatccccgcttccccttgccacggtttatcctcttggtgtctggtttctgtccccggggcattgggttcaaggaatccatcctgcaaaggcccttgtcattgccttcgctccatgtttttggggacactgacaaagtcatcccctctcaggagagtgtgcaactggccagccaatttcccggagccatcaccactcactgctgtgagtgcgcctcaccagaaccagttaagagacaactatcaattcttgagacccaaattataagggccctgccctgtactgaagaaaaggggagcacaaggccttaatggacattgacttgtgaaaacgcaaacatgaatatggttggagagccctggattaggagggtgacatggggaaggcagaggctggcaccatggtgactgccacataataaagtggtgatttgga

SEQ ID NO: 439382 - DNA, 836 bp, Homo sapiens
gcttgaattagcctgcgctctccgcgttcttccagcgctgtctttttagtaccacatgcgcaggcaggtgatggcggcgctggtcgtatccggggcagcggagcagggcggccgagacggccctggcagaggtcgggcccctcggggccgcgtggccaatcagatcccccctgagatcctgaagaaccctcagctgcaggcagcaatccgggtcctgccttccaactacaactttgagatccccaagaccatctggaggatccaacaagcccaggccaagaaggtggccttgcaaatgccggaaggcctcctcctctttgcctgtaccattgtggatatcttggaaaggttcacggaggccgaagtgatggtgatgggtgacgtgacctacggggcttgctgtgtggatgacttcacagcgagggccctgggagctgacttcttggtgcactacggccacagttgcctgattcccatggacacctcggcccaagacttccgggtgctgtacgtctttgtggacatccggatagacactacacacctcctggactctctccgcctcacctttcccccagccactgcccttgccctggtcagcaccattcagtttgtgtcgaccttgcaggcagccgcccaggagctgaaagccgagtatcgtgtgagtgtcccacagtgcaagcccctgtcccctggagagatcctgggctgcacatccccccgactgtccaaagaggtggaggccgttgtgtaagttaaaaatgggggccaagtaagtcctagagacatgcgtgtaccctgggagggagcctgaggttcatcatccaggaaagaaa

SEQ ID NO: 439383 - DNA, 851 bp, Homo sapiens
aatagatggttgattttaacactcctctaaataaagaaaatatataatatattcttggagttataaattttatttgcttttaagtaatatctgatcttactagtagtaacttgctatctgaaaacggcatcattcttttggatttttagggcagtcataaaagagaaatgacaaattagtttttttttctgtggagacatgatgtagcagatgatgggactgtcttacataactggatcttttagaactatcgaagattaagtagtaaaatggtataaaaagtttcttgacaatgttattttcccttcccttccctttttccgtctccccaccccaagctggttcctatgtagctctcactgttcagggacgcccacctgggtcgccccagattccacttgccgactctgaagtagagccgtcagtcattggacatatgtctcccatcatgacatctcctcattcacctggagcatctgggaatatggagagaatcactagtcctgtgctcatgggggtaagaatggggaaatttcttagttaaatgctcagtcttataaggatgtgtttactttatatggagagttttcaagtattcggctgatgaactaattaaatttaagattttagaaaatgatttactaatataaaaattacataataggaatgattagaatattgtcatagcagatttaatttaacaagtattagacacctgccatatgtaaaacagtgtgccacccacagaaatatagttaaggtactctatgttcaagattatagtcatcttagaatgtgtacttttaggagggcggggatttttgtttattttgtttactgttacgtttcca

SEQ ID NO: 439384 - DNA, 9795 bp, Homo sapiens
aggaagtttatccttgtgccttctggaggatttctctctagctcgactcactctggactgactcgctccctggctttctcagttcgttttgggagataacttgttttgctccaagccgcatccgttgaccccttacagtcggatggtctagatgactgaatggagttttgagttggacttttgtgtccctgacggagttgggcctgatcccagagcactgggggtggggaggaggtgttactgtaaaatgcaagttggataaaaggaggacctctcgccaagggccccaatgagtggcacacagtctactatcaccgacaggtttcccctcaaaaaacctataaggcatggaagtattttgaaccgagagtcaccaacagataagaagcagaaagttgagcgcattgcatcacatgattttgaccccacagatagctcctccaagaagacaaagtctagttcagaggagagtagatccgagatatatggtcttgttcagcgttgcgtaatcatccagaaagatgacaatggatttgggctgacggtcagtggagacaatccagtcttcgtacagtctgtcaaagaagatggagcagccatgcgggctggagtacagacaggtgatcgaatcatcaaggtgaatggaactctggtgactcattcaaatcatctggaggtggtgaagctaatcaaatctggttcctatgtagctctcactgttcagggacgcccacctgggtcgccccagattccacttgccgactctgaagtagagccgtcagtcattggacatatgtctcccatcatgacatctcctcattcacctggagcatctgggaatatggagagaatcactagtcctgtgctcatgggggaggaaaacaatgtggttcataaccagaaagtagaaattctgagaaaaatgttacagaaagaacaggaacggctacagttattgcaggaagattacaaccgaacacctgcccaaagattgctaaaagagatccaagaggccaagaaacacattcctcagctgcaagagcagttatccaaagccacaggctctgctcaggatggagctgtagttacaccctccagacctttaggggacaccctaacagtcagtgaggcagaaacagatcctggagatgtactgggcaggactgactgtagcagtggagatgcttctcggcccagtagtgacaatgcagatagtcccaagagtggcccaaaagagagaatttatctagaggaaaacccagagaaaagtgaaacaattcaggacactgacactcaatcacttgtcggaagtccctcaacccgtatagcacctcatattattggagcagaagatgatgattttggtactgaacatgaacagatcaatggacagtgcagctgtttccagagcattgaattactaaaatctcgcccggctcatttggctgttttcttacaccatgtagtttcacaatttgaccctgcgactttgctctgttatctctattcagacctgtataaacataccaattccaaagaaactcgtcgcatcttccttgagtttcatcagttctttctagatcgatcagcacacctgaaagtttctgttcctgatgaaatgtctgcagatctagaaaagagaagacctgagctcattcctgaggatctgcatcgccactatatccaaactatgcaagaaagagtccatccagaagttcaaaggcacttagaagattttcggcagaaacgtagtatgggactgaccttggctgaaagcgagctgactaaacttgatgcagagcgagacaaggaccgattgactttggagaaggagcggacatgtgcagaacagattgttgccaaaattgaagaagtattgatgactgctcaggctgtagaggaagataagagctccaccatgcagtatgttattctcatgtatatgaagcatttgggagtaaaagtgaaagagcctcgaaatttggagcacaaacggggtcggattggatttcttcccaaaatcaagcaaagtatgaagaaagataaagaaggggaagaaaaagggaagcgaagaggattccccagcatcctgggacccccacggagaccaagccgtcatgacaacagtgcaattggcagagccatggaactacagaaggcgcgccaccctaagcacttatccacaccctcatctgtgagtcctgaacctcaggactctgccaagttgcgccagagtgggttagcaaatgaaggaacagacgctggatacctgcctgccaattccatgtcttctgtagcttcaggggcctctttttcccaggaaggagggaaagagaatgatacaggatcaaagcaagttggagaaacatcagcacctggagacaccttagatggcacacctcgtactctcaatactgtctttgatttcccaccacctccattagaccaagtgcaggaggaggaatgtgaagtagaaagggtgactgaacatgggacaccaaagccctttcgaaagtttgacagtgtagcttttggagaaagtcaaagtgaggatgaacaatttgaaaatgacttagagacagatccacccaactggcagcagcttgttagtcgagaagtgttactgggactaaaaccttgtgaaatcaaaagacaggaagtgattaatgaattgttctacactgaaagagctcatgttcgaacactgaaggttcttgatcaagtgttctatcagcgagtatccagagaaggaattctgtcaccctcagagctacggaaaattttttcaaacttggaagatattcttcaacttcatattggattgaatgaacaaatgaaggctgttcgaaagagaaatgagacctctgttatcgatcagattggggaagatttgctgacatggttcagcggaccaggagaggagaaattgaaacatgctgctgctaccttttgcagtaaccaacctttcgccctggaaatgatcaaatctcgtcagaaaaaggattctcgatttcagacttttgtgcaagatgctgaaagtaatccactgtgtcgtcgtcttcaactgaaggatattattcccactcaaatgcaaaggcttactaagtacccacttctgttggataatattgccaaatacacagaatggccaacagaaagggagaaggtgaagaaagctgcagatcactgtcgtcagatcttaaattatgtaaatcaggctgtcaaggaggcagaaaacaagcagcgcctagaagattatcagcgtcgccttgatacctccagcctgaagttgtcagagtacccaaatgttgaagagctcaggaatttggatttaacaaaaaggaagatgattcatgaagggccattggtttggaaggtgaatagagataaaactattgatttatacacgttgctgctggaagacattcttgtattgttacaaaagcaggatgatagactggttttaaggtgtcatagtaagattctggcatctacagctgatagcaaacacacgtttagccctgtcattaagttgagtacagtgttggttcgacaagtggcaacagataacaaagctttattcgtcatttccatgtcagacaatggcgctcagatttatgaactggtggcacagacagtttctgaaaagactgtctggcaggacctaatctgtcggatggctgcatcagtgaaggagcaatccacaaagccaattccattaccacagtcaacacctggcgaaggagataatgatgaagaagatccttcaaaattaaaagaggagcagcatggcatttcagtcactggtttgcagagtccagacagagatttgggattagaatctaccttaatatcgtcaaaacctcagtctcattcactgagtacctctgggaaatcagaggtacgtgatctgtttgtggctgagagacagtttgcaaaggaacaacatacagatgggacactaaaggaagttggagaagattatcaaatcgcaatcccagattcacacctgcctgtctcagaagaacggtgggcattggatgcactaagaaatttgggtttgttgaagcagttgctggtgcaacagctaggtttgactgagaagagcgttcaggaagactggcaacatttcccaagatacagaacagcctctcaggggccgcagacagacagtgtcatccagaactctgaaaatattaaggcctatcattctggtgaaggacatatgccctttagaactggaactggtgacattgcaacttgttacagtccacggacttcaactgaatcttttgctccacgggattcagtgggactggcaccccaggatagccaggcaagtaacattttagtaatggaccacatgattatgaccccagagatgcctaccatggagccagaagggggtcttgatgacagtggagagcacttttttgatgcccgtgaagcacatagtgatgagaatccatcagaaggtgatggagcagttaacaaggaagagaaggatgttaatttacgcatctcaggaaactatttgatccttgatggctatgacccagtgcaggagagttccacagatgaggaggttgcttcctcacttaccctgcagcccatgacaggcatccctgctgtggaatccacccaccagcagcaacattctcctcagaatactcactccgatggggcaatttcaccattcacccccgaatttctggtccagcagcgctggggagctatggagtattcctgttttgagatccagagtccctcctcttgtgcagattcacagagccagatcatggagtacattcataagatagaggctgaccttgaacacttaaagaaggtggaggaaagttacaccattctttgccaaaggctggctggatcagccctcacagacaagcactcagataaaagttagagccgcatgtcctggaggtgactgcaggttgttggatttggagtatcggccgtgtctcaccacatcctggctccagtgtggatgcagagagagtgtgacagaggatctgcctgtgaaccacctgggattagtcaagtcccaaggtgcccagagtgggactagttcttcacagtgtggcagctgcactaatctgtttgtgagggaatatccattccctcactctactctcctcactatcggaaattcattttgattcagaataaaaaccaaatgtatagagctttgggtgtaggatatgaaattgtacttagatttaagaaaaagagaaaatcagatgtatttatttgacttcattccgtatttgaaagcacattttaatttttatttgccttgttttgttttaattgagtagtgagagttttagacctttgtctttagtacacccaaggatcaactgctcctgaagcaaagaggtcaggatggagtatgcagaagttgggtagagaggttaagaagaggaggaagtgagacggggaagggaggagcaccttgcttcactatacagtattccaagctctctgctgtccagtaggctgcttctctgagggtcacctcaaaggtatgctatgccgtgtggctcttatgtgcccaggtggtgtggtcagagagtggatgggcttcctcccgccctgaggcaagcacctcttctctgtagctgggatcaaccacaattaataggaatcctcaacatactaaatagcaggcacttgaaaatgggtgtgttttcttccattgtcgtcttttctattgagggttgggatttgggtgggagaggaaagcaaattttattttcttgactataaatttgttattcttggtatcatttcatttttataattatacattagacattggcacttgtgtaaaactgtccctgcagattgagcaggaagtaaaaacaaatggaaatgcttcggatagtggcaggggtgggggttgctaaggaaagggtgggatgggagtgggtaaagagtttgggaaggttatctaactgaatcactactgagttgaatcatggctatcattagccacaggtactgctgattataaggccagtaaaattttagtacctggaggtttgactctaatttttgcactgatggtgccaaagggccctgagtcaaaaggatagccaagggtggagtggaaaaagatatggtgaaggcagaactgctcacaccagctccagaagcacgtcctctgacttcactgccgcagctctttccacacggggccgtgattgaccctaaaaattgcagaccagcacatacactggacactgcaggcaaggtgttggtaactgcctgctctaggatgaatagtagcgttagcagcaccctacagagggtaagtttcagaattgtaatttgagaactccttcaattatattgactttctttggttttccttgtgcattaggtatatattttttgaagtatttttgccaactaaaatgaagtctgtaaattctgttaataaacaaggagttcatccgttgctcacatctttcattggtgccctctgaactctgtgggttgctaggatgtaattttaatgcttccctgcagtccaaagatgattttttcaccacaaatggtaagggatgcccacctacttttataaacaccactgcaacttaacaagtttatttatctatgtccagatttctgtttctgtcctaaattgatctgtgtttttaggtggatcaacttggatctttagacctcatctataaattgaaattatatttttagtcataagccaagtacaatctaactcagaatgggattaaaaattttagaagcagaagctaatatataaatgaagtttgggatttggaactttctgtatctcttaggaggaacaagtaaaaaccaaatggttacattgtgctgctagaaataatgtcattctcaattaaaagggttacacctgtagccacttgacactaacaccatcgagggcaattaatcaggagaaaagtaaatataaaaactttgctcttaacgtcacacactacagggtaattatgtaattctctagcactcaattaagaagcttgtaggttagcaaaatttcagtttctctagttcagccagtgtcttgtccttagtaattatttgctttccctgcagttcaatttctccttggaactctaacaggactaactggaaaaatactttgaccatagctctagtacttccaaataaattcatatctagattttcaaacaaagccccaagatgaagtctaattctgaaaatatctcacaatttttgaatgttctttttatcttaccgacctaacttctcttttccctcccaacttggcctcccacacgttccatttcattttggccattatagtcacatccgtttgactttggttgtgacatcttcctttcaggatgatggaattagatgcagtctgtctttgagtgagactggtcaccatcagaggagttttttctaagtgacgtgactagaagttgaaatctacttccctgctaaagggcacaggggtggtgtacaaagaaagctaccttcccagagcaagcaggctgcattttagctatggaagtgacctgctgtgacactgtgctctcttctgtgggcttaatggttcctttgctatgaagtggcaaattacatgtagagtgtctccttccttttcagagaacagttaatcaaggcaaatcagcaagcccccaaagtgctgtaatttaacatcatgattaccaccttcgaagctatatattttgcatactttaaaatcacctaacttggactgcttgaattacattggcttttagaaccgaaattgtaactatgtattgtatttcatgggaggtatattttatgagctttttggctttcttttttcccacagcaactgccaatgaaggatgaatcccctttttaaaaagttgttgttgttgttgtttatttgattttgagttaggagggataatagagaagtccatttaaaaattatttttagaagctaaagaaagtaattatgcttcctgtgaattgtcttttactggcatctttgttttcctctttgatgttagtaaatttggtgtaatacgtggggcttccatatttcaaagtggaagctttcttctctgaagtcgatatatggttttgaattactagagctttggtcagtatttccttccctatatgtcacagagggcaccactgagaactgcgtgcataggacctcaaaatacaaaattagcagggcctcacagtcagcttcctcatggctagtttttcccccttatattacaatttttgttttataagtcatttttttcctgatatttccaccacttttcagagtcatctacaaaatttttctttcctcaagaaaagagttccttttgccttattccttatgccttccccactggtattgagggttttgataataaattggtaggaaaaaaaagtacctcctagaaggaagccttccccaccatttccaggtgccaactgctaagcagatatattccaaaaatggtaactgtcatgtgcacactgttggttatttttaataagcctcttcctactagaacattttattttccttgttcaccatacaatcatgtactctttaacagaaattgcttttaaaaaatatctggaactatctttaaaaaaactttattaataatcatgtatttttactgatcacattttgaaatgcctaaaagactttattgttctaattatccagatgtacctttgtaaaatagctcttttatgaattagctgataaggctgtatgtttctggaacaaaatattggtcatctaaaaactttctgttttctggggtctgggaaaatagaaaataagatttcaaatattaaataagcttaaaggaaccaagcatgtgactttttatttgtattctggttgatttgtcttgtccaagttatattagaaaagttgaggagtcgaggagcctgtaattaattttcctgtcagtgactgtcagacatcttcctgcttattagagcatccctagcaacaaggctaaaccttcatgacagtgctggcaggtgggcttgccctagcatgtggggcaggtttgttgtttttttaatagctttattgagatattcacatatcatataattcatccatttaaagtgtataatcagatgggttttggtatattattgatttttaattgtggtgaaatatatatataacaaaatttgctattgtaactatttttaagtataaagttcagtgaggtaggccagcttttatgacgcacctgaagataactttggttttaatcctaccctaaatgaagcatatgcctctatttttcctgtccccagtgctgggcttcttcacataccaacatttctgtgcttttaccaacagcattttagctcagaaggctcgcttactttgggcatttgctgtattttggttttgaaatacttgtaatttgacttattcttgggataatattttagttttcagtcattcaagggcacatttggctgacggagctaataagcgtaataaaatgcttagtagtttataccatcttttagttaaacattttaaagattaagactattcaaatgtactttgcggaaattaacctgtttgtatgcctggctttgtttacaaacatatatctatatctatatatatagatacagatacagatacatatctggtggaacaaagaaatacctgtaccattcccacttgctctttgatagccacctcctaggaatggagacaataaaactctgtatttgcatgtgaaaaattacttc

SEQ ID NO: 439385 - DNA, 4286 bp, Homo sapiens
  misc_feature (1)..(2): n is a, c, g, or t
  misc_feature (452)..(452): n is a, c, g, or t
  misc_feature (1384)..(1384): n is a, c, g, or t
  misc_feature (3610)..(3610): n is a, c, g, or t
  misc_feature (3885)..(3885): n is a, c, g, or t
nncaaagtagttaagatacttaaacatggtgttcaacttcttattcctccagcttattgattcttgctattggaaagttaccataagatttaaatctcttattctggttcagtaggatgaataaatttagtaacaaaatcttacaagtaaagtaactacatctatccttatttttctttgtttcaggtttcccctcaaaaaacctataaggcatggaagtattttgaaccgagagtcaccaacagataagaagcagaaagttgagcgcattgcatcacatgattttgaccccacaggtaaaacactattcattctttcaaagagtattgagagtagtgaagttcagaataatagagcttaagctacccgaaacactcaggaatagttgtttgatctgttttaggactctcacattcctccaattatatcataataaagcctttgcatttagnaggaatgcaagcatttttaacttccaacactgtacattccactacagaagtatcattgtagagtatattgtatctttaaatagtgataataatagaaatggttatataataattggagatttggtcagatcaagaactcagtgttaagttgaatcatggtataagcagtaatatgtcataaaaccaaggctctaacaactcgacacttgcgtagtcatctaaaaattcaattgtgattatggtgaattggagttttagataaatcagtttcacaaattaatgatggtctcattttagagtaaacaaatgaatagaaatccctttctcttcagtcaaaaagtattctgaacttaaagagctgtctttcaacctaagcagtgtcgatctttcctagggttgtcaccttaacagactttcagattgatctccttttaaaacatctaggctttttccttttgctttctccttgtaagcttactccatatttgattcatagaaagtgcttggtaatcttgcttttttcatttgaaactgatatatattttttgtgcacatactattttattcagttgcctgtccctttgacaagagacgaagtaaatcccgctatctcagatacataaaaataatgtatctatttttaggtatttttacttagaaatataattttaaatatttaatagagaatagtatgttttatttatctaagacatttcatactttattagtataaactcctttattttgaaaaaatattataaatattatctaggaagcacatagataatcattttctgcattttgggtagtaggtaaaatgaaattccaatcatcaatttaggaggctttggtggtgggactatgtattatgtcacttacagatctccatgaagagagaattttccattctgatgcctaattttgtagtcatngggctcagaggctttcatttacatgattaggtattgtcttgccaataaggtcaaaagtttctgccctatgttcagaaaaatataatcttgttaggtttattttgtatctacatctgtgctgtgcccatctccaaagacagatttaagcaaagatgtatacaatgcttcataatgagatcattatagcttttagtgcttttgtcatctctacaattatcaggtgatatattttgtatactattcatgtgttgttttgtttgaacatatttttattgcactgtcttttcttcgataaatctttaaaatatgtcattacctgtgctgtttgtgactattctaagtgctgtcatctgttatgttcatactttgtgtttgcacgatttaacttgatcatgattcattcttttttccccatgaatttttccccttacattgtctccatattttctatatctctctccttttctcccgctcttgtgcagatagctcctccaagaagacaaagtctagttcagaggagagtagatccgagatatatggtaagctaatgtagctaattcagccttgccctttggagcttgcttcatggtgttccttttctgttctttttttcctttctttctttctttttaaataactgcagcctttcttgtgtctgctgtgcatggcatgatctactgcagggaaagggagcctggggttttaacgtggctgtgatgtggaagcttaaggttgctagaaactaacattgtagattaagagtaggccacattgcccatcttctcccgtcttgtttatggtaggaaggtgattatctctaatatgtttgggtcaggttcctccaaataacatgaatgggctttgaattcttgtcatcttcttcccacatctcatttgcagagtttggattatgaagaatttgaggaattaagtcttttcctctaagtataatactggtgtaatttagacgtattagcagttctttggaatttttatttcattttttgtttgtttatttttaattgcctcgtcatgtggaaaagtcattcttgtataatttatccacgatggcaaaaatacgtaagtattttatcttcatagcttgaagaatttgtgcctttgagaagtttctctgaagcttaatcggaatgggaaaatttcagaatggtaccttttaaataatcttaacaaagagcaagtttaacctgagtggtcaacttttgcagcagatgattgaaatgctaatatttctagactgtgtcctgtcttccaaagatacaataaccatgtttgtgaagttcatacctatttttccttttcctttgcagttttatttgccctctttccttcttttggagtctgattagggttttgttttggggtttttttttttggttttttgttttttgagaaaagtgaataagagaggaattacctggagctaagattttaaaaataatttctgaaagactgataaattatttctttttttaggaagattccaaatttggcctcgaagggaaatcaggtcatctttaatagagccacaaatctatagagcagaagctcccccaggtgcagatagatgtttcctagcttgatatataggagaggaaaaaatacaggaattgccctcccctttttaagacatttgataattcacatctgctggcacttgagcccatatcagatactttttagtattatgaaagctcagtgtttggttctaaaccagttaattcttctatgttagatatatacacatagttctttacttgggtttttgtgaccagtgctttttctgtgtataccttttacagtagttcagcagtaaatgtatactgtgccttgtgacacatcaagtttacgctttttcttccttccagagtattttggctactgataagtaagaactacctaattcctggagactatatttctgttctatataaagagctttctatagtttatcctctccttaggaacatgaacattatctttatagctctattctttttcggtagcctttgcagtgttctatttcgtcttcctctccattttcctagatctgcgatgtgtatttagaagcttgttgtatgctttggatgaagactaacaatttaggaacctctgactagaaatactatactaatatttttcttagcagtgatagaaacattaatactagttcaggcatgccattggcttggtagtgatagaaacatnttaagtggtaattgggaagtaaggtgtggcttctctgtgtgtttgttttttgagaacccttgaaataccttttttggaaggaactgagtccacaagtcctcaaaaagcactcatcggagggatgagttgattagaacagaattagcatgctaacgtaaatctctttgacattacaaatattttatcacctgtgtgaatagacgtctttagattacgtacagttagcatagatgaaaaagtctctctggggattcagaaaagcttgaaactactgngtagaatcatagcaactggtgacattctgctttagtgtagggtcttattataagcccacttcaaactttagagattatacattgctttctcggggtaaaattcattagctgagtacttaacaaaaatgctagttactcacatattatttattttaaactttcttggcttttttttttttttttttttttttgagacaagatctcgctgtgtggcccaggatggagtataatggcgggatcatgactcactgcagcctcaacctcctgggctcaagtgatcctcctacctaagactccaaagtagctgggactacaggtgcacaccactgcacccagctgttttgtttgtttgtttgttttttaatagagatgaggttgttgaaggaatgatttgccagggg

SEQ ID NO: 439386 - DNA, 1799 bp, Homo sapiens
  misc_feature (3)..(3): n is a, c, g, or t
gcngccttttaaatgcttgatctgtatgaaattagtttttcattagaggaatatcttgcataaaactgtaatattacatgacagcaattggcaggagactaagggacactaattattataaaatttaattttattgtgttctgtagtttgtttcagacagggtcttgctctgttgcccaggctggaatgcagtggtgcagtcttggctcactgaagccttggcctcctggactcaggcagtccacccacctcagcctccctagcagctaggactataggtatatgccaccatacccagctaattctgtgttttgtaaagacaaggtctcgctgtgttgtcaggttggtccagatttcctgggctcaagtgctcctttctcagcctcccacagtgcagggattacaggcatgagccactatgcccagcctgtgttctgtagtttaaataagggtaggactgtttggtaactttccagatcatttaataacacaagatagcatactattttctcatgaggctcttcagaagcataaaagttggaaccattacaggaacgatagtaaaatgtttactaattgccacttctagtatgtgggcttatgtgttaactttttcggattttaagtgtttttgtaccatttcactaggtggtggttttggcagatttatttggtggctgttaaaatagacttttatgtcatatattaatacttcgtcaacaagcacgtaaatgtgcttattccccttagcttccaaagaatgagagttttctagagctgctaatactaaaagatgattctcttactaataagttgttaatatttagaccaagtctgagtagtacctggacttttcatgagtactatttcttagaactttctttgaaattagagccttggaactcagaagccactttcttatagacaagcatatgtaccatgctcatccagttattcataggaaaattaaaggatacgttgagaatctagtgactgaatgtttgtaacttgatcttcataatctgttatcatctgtttagagtgaggtttgaagatagtactcctgaatgttcttctgcaagataccttttcctttttagaaaattgtatgcagattactttaatatggcttttgtgccattttcaagaactgacaaatagcaataatgatagttgaatgtaaatggtgtattttatattaagaatttctttaaaagagactgtattatatagataatcatgttactgagtgcttggaaattatttgtgcatgattttctttattttgccagaatttggatttaacaaaaaggaagatgattcatgaagggccattggtttggaaggtgaatagagataaaactattggtaggtctgatattgtcttttagttttggggagagtggcaaaagggaaggaataggaaagtttcctatgacaaagggaagaggagagaaccattctctcagcagtttgcagtgctacctcgtgttatttgtacatttgtagatctgcttgtgttatttcattatatgtaagatgtgttaaatattcatttaggaatgtagtggagaactgatttagtcctatttccatcattcttatagtctagtgagtctttgtatgctttgtaagctttctttagaccagtacatcttaaactgtctgtgatgaggaaccgtttttgttttttcagaaacaaggtctttctatgttgcccaggctggagcacagtggctagtcacagatgcagtcatggtgcactgctgcctcgaactcctgggcttaagggatcctcc

SEQ ID NO: 439387 - DNA, 1116 bp, Homo sapiens
  misc_feature (1)..(2): n is a, c, g, or t
  misc_feature (216)..(216): n is a, c, g, or t
  misc_feature (487)..(487): n is a, c, g, or t
  misc_feature (555)..(555): n is a, c, g, or t
  misc_feature (1041)..(1041): n is a, c, g, or t
  misc_feature (1107)..(1107): n is a, c, g, or t
nnggttgttgtttgttttttatctttttcttttctaggaggaaaacaatgtggttcataaccagaaagtagaaattctgagaaaaatgttacagaaagaacaggaacggctacaggtattaaatgagaagtagggctgtttacaggccaataaaaatgtgagtgggcatggttgagttggtgtttatcagtcacaatcaagcagcattgtaaccantgccattagttatattattgattaagaatggactatttctgtatcttttttacataagtaattaattctgaaaatatttttataacttttcagttattgcaggaagattacaaccgaacacctgcccaaagattgctaaaagagatccaagaggccaagaaacacattcctcagctgcaagagcagttatccaaagccacaggctctgctcaggtagcatcactattacaagtgctacccaactttttgcaggagaattttcttctgggantgtgtcagagaatgttgcagttgccttttttaaagttatttttctagcgtaggacaacaggatgtccngttaaggatgttacagaagtaatgattaacaaaaataaatgtgggcgtctgattgtttgcttgctcatgagatcacatttctttgttccataataatttaaaaaagaattgagtgcttttgctttgatgtgacaaactactaaaatgtatttagatatatatatatatttatattttttgtggttcattctgccatcttaaaacagaatggcagttgatatgtttttaaataggaatttaagaatttacaacaacaggcattgagctaaatatatggacaagcattttcttatttaatctgcataacatctctgaggttacttatggttgttttcctccagtttacatatatacttagagagagttagagagattaaatgacttgtctgaggtcatatagctgcaaagtaatagaactggaattcaaacccagtctgaggatttaaaagcacattcatactcttaatgactatatttttattgtantttaaaaatagatttcagtagaatttgctgtatagttataagctatagagataatggtctcataanaaaaaaaaa

SEQ ID NO: 439388 - DNA, 7398 bp, Homo sapiens
  misc_feature (2)..(3): n is a, c, g, or t
tnnttttttttggtgaccagtgactttattaagtattaacactcttcaaatgtctgacttttgtctacaggatcaaagcaagttggagaaacatcagcacctggagacaccttagatggcacacctcgtactctcaatactgtctttgatttcccaccacctccattagaccaagtgcaggaggaggaatgtgaagtagaaaggtaattcagtgatctcttagagaagcttagggcattacttaaagtttttaaattatatgctattcctatacttagtagcattctagcactgaagcctggcatggtggtatgtacctataatgccagctacttgggaggctgaggcaggagaatcaatcacttaaactcaggagtttgagaccagcctgggcaacgtagtgagcccccacttcaaactgtaaaaaataaaataaataaataaataaataagttgggtgcataaaagaactaaaacaccatttcagaactcataactgaaatgtagaaaggtactcaaattttcttcaatttattttatattaaattattacaatatcccaaagaattatttatcaagctgctggagtttaacctagctttgagtatctttggtataaatgtattgatcaccattttgttttcatgttactctttactttccattgttttagggtgactgaacatgggacaccaaagccctttcgaaagtaagtaaatcttaagcagctttcaataaaggcgcattttaagaaacgtaaccttttttcctctaaagtttcattttaaaggaaaagaaaccctgtataccaatctgttatgtagtataaaagaaagctcttaagaaacactggtcattcaaaagctgtattttgaagtatgtataaaacagccatttgtaggagaggatgaaatttcagtgctaagtcagattcaggaatctgattagaatttattgtaatataaagatttgtgctgtttctcattgtccacctaaagtcttcaaattgaattcactcttttttcttcataggtttgacagtgtagcttttggagaaagtcaaagtgaggatgaacaatttgaaaatgacttagagacagatccacccaactggcagcagcttgttagtcgagaagtgttactgggactaaaaccttgtgaaatcaaaagacaggaagtgattaatgaattgttctacactgaaagagctcatgttcgaacactgaaggttcttgatcaagtgttctatcagcgagtatccagagaaggaattctgtcaccctcagagctacggaaaattttttcaaacttggaagatattcttcaacttcatattggattgaatgaacaaatgaaggctgttcgaaagagaaatgagacctctgttatcgatcagattggggaagatttgctgacatggttcagcggaccaggagaggagaaattgaaacatgctgctgctaccttttgcagtaaccaacctttcgccctggaaatgatcaaatctcgtcagaaaaaggattctcgatttcagacttttgtgcaagatgctgaaagtaatccactgtgtcgtcgtcttcaactgaaggatattattcccactcaaatgcaaaggcttactaagtacccacttctgttggataatattgccaaatacacagaatggccaacagaaagggagaaggtgaagaaagctgcagatcactgtcgtcagatcttaaattatgtaaatcaggctgtcaaggaggcagaaaacaagcagcgcctagaagattatcagcgtcgccttgatacctccagcctgaagttgtcagagtacccaaatgttgaagagctcaggaatttggatttaacaaaaaggaagatgattcatgaagggccattggtttggaaggtgaatagagataaaactattgatttatacacgttgctgctggaagacattcttgtattgttacaaaagcaggatgatagactggttttaaggtgtcatagtaagattctggcatctacagctgatagcaaacacacgtttagccctgtcattaagttgagtacagtgttggttcgacaagtggcaacagataacaaagctttattcgtcatttccatgtcagacaatggcgctcagatttatgaactggtggcacagacagtttctgaaaagactgtctggcaggacctaatctgtcggatggctgcatcagtgaaggagcaatccacaaagccaattccattaccacagtcaacacctggcgaaggagataatgatgaagaagatccttcaaaattaaaagaggagcagcatggcatttcagtcactggtttgcagagtccagacagagatttgggattagaatctaccttaatatcgtcaaaacctcagtctcattcactgagtacctctgggaaatcagaggtacgtgatctgtttgtggctgagagacagtttgcaaaggaacaacatacagatgggacactaaaggaagttggagaagattatcaaatcgcaatcccagattcacacctgcctgtctcagaagaacggtgggcattggatgcactaagaaatttgggtttgttgaagcagttgctggtgcaacagctaggtttgactgagaagagcgttcaggaagactggcaacatttcccaagatacagaacagcctctcaggggccgcagacagacagtgtcatccagaactctgaaaatattaaggcctatcattctggtgaaggacatatgccctttagaactggaactggtgacattgcaacttgttacagtccacggacttcaactgaatcttttgctccacgggattcagtgggactggcaccccaggatagccaggcaagtaacattttagtaatggaccacatgattatgaccccagagatgcctaccatggagccagaagggggtcttgatgacagtggagagcacttttttgatgcccgtgaagcacatagtgatgagaatccatcagaaggtgatggagcagttaacaaggaagagaaggatgttaatttacgcatctcaggaaactatttgatccttgatggctatgacccagtgcaggagagttccacagatgaggaggttgcttcctcacttaccctgcagcccatgacaggcatccctgctgtggaatccacccaccagcagcaacattctcctcagaatactcactccgatggggcaatttcaccattcacccccgaatttctggtccagcagcgctggggagctatggagtattcctgttttgagatccagagtccctcctcttgtgcagattcacagagccagatcatggagtacattcataagatagaggctgaccttgaacacttaaagaaggtggaggaaagttacaccattctttgccaaaggctggctggatcagccctcacagacaagcactcagataaaagttagagccgcatgtcctggaggtgactgcaggttgttggatttggagtatcggccgtgtctcaccacatcctggctccagtgtggatgcagagagagtgtgacagaggatctgcctgtgaaccacctgggattagtcaagtcccaaggtgcccagagtgggactagttcttcacagtgtggcagctgcactaatctgtttgtgagggaatatccattccctcactctactctcctcactatcggaaattcattttgattcagaataaaaaccaaatgtatagagctttgggtgtaggatatgaaattgtacttagatttaagaaaaagagaaaatcagatgtatttatttgacttcattccgtatttgaaagcacattttaatttttatttgccttgttttgttttaattgagtagtgagagttttagacctttgtctttagtacacccaaggatcaactgctcctgaagcaaagaggtcaggatggagtatgcagaagttgggtagagaggttaagaagaggaggaagtgagacggggaagggaggagcaccttgcttcactatacagtattccaagctctctgctgtccagtaggctgcttctctgagggtcacctcaaaggtatgctatgccgtgtggctcttatgtgcccaggtggtgtggtcagagagtggatgggcttcctcccgccctgaggcaagcacctcttctctgtagctgggatcaaccacaattaataggaatcctcaacatactaaatagcaggcacttgaaaatgggtgtgttttcttccattgtcgtcttttctattgagggttgggatttgggtgggagaggaaagcaaattttattttcttgactataaatttgttattcttggtatcatttcatttttataattatacattagacattggcacttgtgtaaaactgtccctgcagattgagcaggaagtaaaaacaaatggaaatgcttcggatagtggcaggggtgggggttgctaaggaaagggtgggatgggagtgggtaaagagtttgggaaggttatctaactgaatcactactgagttgaatcatggctatcattagccacaggtactgctgattataaggccagtaaaattttagtacctggaggtttgactctaatttttgcactgatggtgccaaagggccctgagtcaaaaggatagccaagggtggagtggaaaaagatatggtgaaggcagaactgctcacaccagctccagaagcacgtcctctgacttcactgccgcagctctttccacacggggccgtgattgaccctaaaaattgcagaccagcacatacactggacactgcaggcaaggtgttggtaactgcctgctctaggatgaatagtagcgttagcagcaccctacagagggtaagtttcagaattgtaatttgagaactccttcaattatattgactttctttggttttccttgtgcattaggtatatattttttgaagtatttttgccaactaaaatgaagtctgtaaattctgttaataaacaaggagttcatccgttgctcacatctttcattggtgccctctgaactctgtgggttgctaggatgtaattttaatgcttccctgcagtccaaagatgattttttcaccacaaatggtaagggatgcccacctacttttataaacaccactgcaacttaacaagtttatttatctatgtccagatttctgtttctgtcctaaattgatctgtgtttttaggtggatcaacttggatctttagacctcatctataaattgaaattatatttttagtcataagccaagtacaatctaactcagaatgggattaaaaattttagaagcagaagctaatatataaatgaagtttgggatttggaactttctgtatctcttaggaggaacaagtaaaaaccaaatggttacattgtgctgctagaaataatgtcattctcaattaaaagggttacacctgtagccacttgacactaacaccatcgagggcaattaatcaggagaaaagtaaatataaaaactttgctcttaacgtcacacactacagggtaattatgtaattctctagcactcaattaagaagcttgtaggttagcaaaatttcagtttctctagttcagccagtgtcttgtccttagtaattatttgctttccctgcagttcaatttctccttggaactctaacaggactaactggaaaaatactttgaccatagctctagtacttccaaataaattcatatctagattttcaaacaaagccccaagatgaagtctaattctgaaaatatctcacaatttttgaatgttctttttatcttaccgacctaacttctcttttccctcccaacttggcctcccacacgttccatttcattttggccattatagtcacatccgtttgactttggttgtgacatcttcctttcaggatgatggaattagatgcagtctgtctttgagtgagactggtcaccatcagaggagttttttctaagtgacgtgactagaagttgaaatctacttccctgctaaagggcacaggggtggtgtacaaagaaagctaccttcccagagcaagcaggctgcattttagctatggaagtgacctgctgtgacactgtgctctcttctgtgggcttaatggttcctttgctatgaagtggcaaattacatgtagagtgtctccttccttttcagagaacagttaatcaaggcaaatcagcaagcccccaaagtgctgtaatttaacatcatgattaccaccttcgaagctatatattttgcatactttaaaatcacctaacttggactgcttgaattacattggcttttagaaccgaaattgtaactatgtattgtatttcatgggaggtatattttatgagctttttggctttcttttttcccacagcaactgccaatgaaggatgaatcccctttttaaaaagttgttgttgttgttgtttatttgattttgagttaggagggataatagagaagtccatttaaaaattatttttagaagctaaagaaagtaattatgcttcctgtgaattgtcttttactggcatctttgttttcctctttgatgttagtaaatttggtgtaatacgtggggcttccatatttcaaagtggaagctttcttctctgaagtcgatatatggttttgaattactagagctttggtcagtatttccttccctatatgtcacagagggcaccactgagaactgcgtgcataggacctcaaaatacaaaattagcagggcctcacagtcagcttcctcatggctagtttttcccccttatattacaatttttgttttataagtcatttttttcctgatatttccaccacttttcagagtcatctacaaaatttttctttcctcaagaaaagagttccttttgccttattccttatgccttccccactggtattgagggttttgataataaattggtaggaaaaaaaagtacctcctagaaggaagccttccccaccatttccaggtgccaactgctaagcagatatattccaaaaatggtaactgtcatgtgcacactgttggttatttttaataagcctcttcctactagaacattttattttccttgttcaccatacaatcatgtactctttaacagaaattgcttttaaaaaatatctggaactatctttaaaaaaactttattaataatcatgtatttttactgatcacattttgaaatgcctaaaagactttattgttctaattatccagatgtacctttgtaaaatagctcttttatgaattagctgataaggctgtatgtttctggaacaaaatattggtcatctaaaaactttctgttttctggggtctgggaaaatagaaaataagatttcaaatattaaataagcttaaaggaacca

SEQ ID NO: 439389 - DNA, 11243 bp, Homo sapiens
  misc_feature (587)..(587): n is a, c, g, or t
  misc_feature (1519)..(1519): n is a, c, g, or t
aggaagtttatccttgtgccttctggaggatttctctctagctcgactcactctggactgactcgctccctggctttctcagttcgttttgggagataacttgttttgctccaagccgcatccgttgaccccttacagtcggatggtctagatgactgaatggagttttgagttggacttttgtgtccctgacggagttgggcctgatcccagagcactgggggtggggaggaggtgttactgtaaaatgcaagttggataaaaggaggacctctcgccaagggccccaatgagtggcacacagtctactatcaccgacaggtttcccctcaaaaaacctataaggcatggaagtattttgaaccgagagtcaccaacagataagaagcagaaagttgagcgcattgcatcacatgattttgaccccacaggtaaaacactattcattctttcaaagagtattgagagtagtgaagttcagaataatagagcttaagctacccgaaacactcaggaatagttgtttgatctgttttaggactctcacattcctccaattatatcataataaagcctttgcatttagnaggaatgcaagcatttttaacttccaacactgtacattccactacagaagtatcattgtagagtatattgtatctttaaatagtgataataatagaaatggttatataataattggagatttggtcagatcaagaactcagtgttaagttgaatcatggtataagcagtaatatgtcataaaaccaaggctctaacaactcgacacttgcgtagtcatctaaaaattcaattgtgattatggtgaattggagttttagataaatcagtttcacaaattaatgatggtctcattttagagtaaacaaatgaatagaaatccctttctcttcagtcaaaaagtattctgaacttaaagagctgtctttcaacctaagcagtgtcgatctttcctagggttgtcaccttaacagactttcagattgatctccttttaaaacatctaggctttttccttttgctttctccttgtaagcttactccatatttgattcatagaaagtgcttggtaatcttgcttttttcatttgaaactgatatatattttttgtgcacatactattttattcagttgcctgtccctttgacaagagacgaagtaaatcccgctatctcagatacataaaaataatgtatctatttttaggtatttttacttagaaatataattttaaatatttaatagagaatagtatgttttatttatctaagacatttcatactttattagtataaactcctttattttgaaaaaatattataaatattatctaggaagcacatagataatcattttctgcattttgggtagtaggtaaaatgaaattccaatcatcaatttaggaggctttggtggtgggactatgtattatgtcacttacagatctccatgaagagagaattttccattctgatgcctaattttgtagtcatngggctcagaggctttcatttacatgattaggtattgtcttgccaataaggtcaaaagtttctgccctatgttcagaaaaatataatcttgttaggtttattttgtatctacatctgtgctgtgcccatctccaaagacagatttaagcaaagatgtatacaatgcttcataatgagatcattatagcttttagtgcttttgtcatctctacaattatcaggtgatatattttgtatactattcatgtgttgttttgtttgaacatatttttattgcactgtcttttcttcgataaatctttaaaatatgtcattacctgtgctgtttgtgactattctaagtgctgtcatctgttatgttcatactttgtgtttgcacgatttaacttgatcatgattcattcttttttccccatgaatttttccccttacattgtctccatattttctatatctctctccttttctcccgctcttgtgcagatagctcctccaagaagacaaagtctagttcagaggagagtagatccgagatatatggtcttgttcagcgttgcgtaatcatccagaaagatgacaatggatttgggctgacggtcagtggagacaatccagtcttcgtacagtctgtcaaagaagatggagcagccatgcgggctggagtacagacaggtgatcgaatcatcaaggtgaatggaactctggtgactcattcaaatcatctggaggtggtgaagctaatcaaatctggttcctatgtagctctcactgttcagggacgcccacctgggtcgccccagattccacttgccgactctgaagtagagccgtcagtcattggacatatgtctcccatcatgacatctcctcattcacctggagcatctgggaatatggagagaatcactagtcctgtgctcatgggggaggaaaacaatgtggttcataaccagaaagtagaaattctgagaaaaatgttacagaaagaacaggaacggctacagttattgcaggaagattacaaccgaacacctgcccaaagattgctaaaagagatccaagaggccaagaaacacattcctcagctgcaagagcagttatccaaagccacaggctctgctcaggatggagctgtagttacaccctccagacctttaggggacaccctaacagtcagtgaggcagaaacagatcctggagatgtactgggcaggactgactgtagcagtggagatgcttctcggcccagtagtgacaatgcagatagtcccaagagtggcccaaaagagagaatttatctagaggaaaacccagagaaaagtgaaacaattcaggacactgacactcaatcacttgtcggaagtccctcaacccgtatagcacctcatattattggagcagaagatgatgattttggtactgaacatgaacagatcaatggacagtgcagctgtttccagagcattgaattactaaaatctcgcccggctcatttggctgttttcttacaccatgtagtttcacaatttgaccctgcgactttgctctgttatctctattcagacctgtataaacataccaattccaaagaaactcgtcgcatcttccttgagtttcatcagttctttctagatcgatcagcacacctgaaagtttctgttcctgatgaaatgtctgcagatctagaaaagagaagacctgagctcattcctgaggatctgcatcgccactatatccaaactatgcaagaaagagtccatccagaagttcaaaggcacttagaagattttcggcagaaacgtagtatgggactgaccttggctgaaagcgagctgactaaacttgatgcagagcgagacaaggaccgattgactttggagaaggagcggacatgtgcagaacagattgttgccaaaattgaagaagtattgatgactgctcaggctgtagaggaagataagagctccaccatgcagtatgttattctcatgtatatgaagcatttgggagtaaaagtgaaagagcctcgaaatttggagcacaaacggggtcggattggatttcttcccaaaatcaagcaaagtatgaagaaagataaagaaggggaagaaaaagggaagcgaagaggattccccagcatcctgggacccccacggagaccaagccgtcatgacaacagtgcaattggcagagccatggaactacagaaggcgcgccaccctaagcacttatccacaccctcatctgtgagtcctgaacctcaggactctgccaagttgcgccagagtgggttagcaaatgaaggaacagacgctggatacctgcctgccaattccatgtcttctgtagcttcaggggcctctttttcccaggaaggagggaaagagaatgatacaggatcaaagcaagttggagaaacatcagcacctggagacaccttagatggcacacctcgtactctcaatactgtctttgatttcccaccacctccattagaccaagtgcaggaggaggaatgtgaagtagaaaggtaattcagtgatctcttagagaagcttagggcattacttaaagtttttaaattatatgctattcctatacttagtagcattctagcactgaagcctggcatggtggtatgtacctataatgccagctacttgggaggctgaggcaggagaatcaatcacttaaactcaggagtttgagaccagcctgggcaacgtagtgagcccccacttcaaactgtaaaaaataaaataaataaataaataaataagttgggtgcataaaagaactaaaacaccatttcagaactcataactgaaatgtagaaaggtactcaaattttcttcaatttattttatattaaattattacaatatcccaaagaattatttatcaagctgctggagtttaacctagctttgagtatctttggtataaatgtattgatcaccattttgttttcatgttactctttactttccattgttttagggtgactgaacatgggacaccaaagccctttcgaaagtaagtaaatcttaagcagctttcaataaaggcgcattttaagaaacgtaaccttttttcctctaaagtttcattttaaaggaaaagaaaccctgtataccaatctgttatgtagtataaaagaaagctcttaagaaacactggtcattcaaaagctgtattttgaagtatgtataaaacagccatttgtaggagaggatgaaatttcagtgctaagtcagattcaggaatctgattagaatttattgtaatataaagatttgtgctgtttctcattgtccacctaaagtcttcaaattgaattcactcttttttcttcataggtttgacagtgtagcttttggagaaagtcaaagtgaggatgaacaatttgaaaatgacttagagacagatccacccaactggcagcagcttgttagtcgagaagtgttactgggactaaaaccttgtgaaatcaaaagacaggaagtgattaatgaattgttctacactgaaagagctcatgttcgaacactgaaggttcttgatcaagtgttctatcagcgagtatccagagaaggaattctgtcaccctcagagctacggaaaattttttcaaacttggaagatattcttcaacttcatattggattgaatgaacaaatgaaggctgttcgaaagagaaatgagacctctgttatcgatcagattggggaagatttgctgacatggttcagcggaccaggagaggagaaattgaaacatgctgctgctaccttttgcagtaaccaacctttcgccctggaaatgatcaaatctcgtcagaaaaaggattctcgatttcagacttttgtgcaagatgctgaaagtaatccactgtgtcgtcgtcttcaactgaaggatattattcccactcaaatgcaaaggcttactaagtacccacttctgttggataatattgccaaatacacagaatggccaacagaaagggagaaggtgaagaaagctgcagatcactgtcgtcagatcttaaattatgtaaatcaggctgtcaaggaggcagaaaacaagcagcgcctagaagattatcagcgtcgccttgatacctccagcctgaagttgtcagagtacccaaatgttgaagagctcaggaatttggatttaacaaaaaggaagatgattcatgaagggccattggtttggaaggtgaatagagataaaactattgatttatacacgttgctgctggaagacattcttgtattgttacaaaagcaggatgatagactggttttaaggtgtcatagtaagattctggcatctacagctgatagcaaacacacgtttagccctgtcattaagttgagtacagtgttggttcgacaagtggcaacagataacaaagctttattcgtcatttccatgtcagacaatggcgctcagatttatgaactggtggcacagacagtttctgaaaagactgtctggcaggacctaatctgtcggatggctgcatcagtgaaggagcaatccacaaagccaattccattaccacagtcaacacctggcgaaggagataatgatgaagaagatccttcaaaattaaaagaggagcagcatggcatttcagtcactggtttgcagagtccagacagagatttgggattagaatctaccttaatatcgtcaaaacctcagtctcattcactgagtacctctgggaaatcagaggtacgtgatctgtttgtggctgagagacagtttgcaaaggaacaacatacagatgggacactaaaggaagttggagaagattatcaaatcgcaatcccagattcacacctgcctgtctcagaagaacggtgggcattggatgcactaagaaatttgggtttgttgaagcagttgctggtgcaacagctaggtttgactgagaagagcgttcaggaagactggcaacatttcccaagatacagaacagcctctcaggggccgcagacagacagtgtcatccagaactctgaaaatattaaggcctatcattctggtgaaggacatatgccctttagaactggaactggtgacattgcaacttgttacagtccacggacttcaactgaatcttttgctccacgggattcagtgggactggcaccccaggatagccaggcaagtaacattttagtaatggaccacatgattatgaccccagagatgcctaccatggagccagaagggggtcttgatgacagtggagagcacttttttgatgcccgtgaagcacatagtgatgagaatccatcagaaggtgatggagcagttaacaaggaagagaaggatgttaatttacgcatctcaggaaactatttgatccttgatggctatgacccagtgcaggagagttccacagatgaggaggttgcttcctcacttaccctgcagcccatgacaggcatccctgctgtggaatccacccaccagcagcaacattctcctcagaatactcactccgatggggcaatttcaccattcacccccgaatttctggtccagcagcgctggggagctatggagtattcctgttttgagatccagagtccctcctcttgtgcagattcacagagccagatcatggagtacattcataagatagaggctgaccttgaacacttaaagaaggtggaggaaagttacaccattctttgccaaaggctggctggatcagccctcacagacaagcactcagataaaagttagagccgcatgtcctggaggtgactgcaggttgttggatttggagtatcggccgtgtctcaccacatcctggctccagtgtggatgcagagagagtgtgacagaggatctgcctgtgaaccacctgggattagtcaagtcccaaggtgcccagagtgggactagttcttcacagtgtggcagctgcactaatctgtttgtgagggaatatccattccctcactctactctcctcactatcggaaattcattttgattcagaataaaaaccaaatgtatagagctttgggtgtaggatatgaaattgtacttagatttaagaaaaagagaaaatcagatgtatttatttgacttcattccgtatttgaaagcacattttaatttttatttgccttgttttgttttaattgagtagtgagagttttagacctttgtctttagtacacccaaggatcaactgctcctgaagcaaagaggtcaggatggagtatgcagaagttgggtagagaggttaagaagaggaggaagtgagacggggaagggaggagcaccttgcttcactatacagtattccaagctctctgctgtccagtaggctgcttctctgagggtcacctcaaaggtatgctatgccgtgtggctcttatgtgcccaggtggtgtggtcagagagtggatgggcttcctcccgccctgaggcaagcacctcttctctgtagctgggatcaaccacaattaataggaatcctcaacatactaaatagcaggcacttgaaaatgggtgtgttttcttccattgtcgtcttttctattgagggttgggatttgggtgggagaggaaagcaaattttattttcttgactataaatttgttattcttggtatcatttcatttttataattatacattagacattggcacttgtgtaaaactgtccctgcagattgagcaggaagtaaaaacaaatggaaatgcttcggatagtggcaggggtgggggttgctaaggaaagggtgggatgggagtgggtaaagagtttgggaaggttatctaactgaatcactactgagttgaatcatggctatcattagccacaggtactgctgattataaggccagtaaaattttagtacctggaggtttgactctaatttttgcactgatggtgccaaagggccctgagtcaaaaggatagccaagggtggagtggaaaaagatatggtgaaggcagaactgctcacaccagctccagaagcacgtcctctgacttcactgccgcagctctttccacacggggccgtgattgaccctaaaaattgcagaccagcacatacactggacactgcaggcaaggtgttggtaactgcctgctctaggatgaatagtagcgttagcagcaccctacagagggtaagtttcagaattgtaatttgagaactccttcaattatattgactttctttggttttccttgtgcattaggtatatattttttgaagtatttttgccaactaaaatgaagtctgtaaattctgttaataaacaaggagttcatccgttgctcacatctttcattggtgccctctgaactctgtgggttgctaggatgtaattttaatgcttccctgcagtccaaagatgattttttcaccacaaatggtaagggatgcccacctacttttataaacaccactgcaacttaacaagtttatttatctatgtccagatttctgtttctgtcctaaattgatctgtgtttttaggtggatcaacttggatctttagacctcatctataaattgaaattatatttttagtcataagccaagtacaatctaactcagaatgggattaaaaattttagaagcagaagctaatatataaatgaagtttgggatttggaactttctgtatctcttaggaggaacaagtaaaaaccaaatggttacattgtgctgctagaaataatgtcattctcaattaaaagggttacacctgtagccacttgacactaacaccatcgagggcaattaatcaggagaaaagtaaatataaaaactttgctcttaacgtcacacactacagggtaattatgtaattctctagcactcaattaagaagcttgtaggttagcaaaatttcagtttctctagttcagccagtgtcttgtccttagtaattatttgctttccctgcagttcaatttctccttggaactctaacaggactaactggaaaaatactttgaccatagctctagtacttccaaataaattcatatctagattttcaaacaaagccccaagatgaagtctaattctgaaaatatctcacaatttttgaatgttctttttatcttaccgacctaacttctcttttccctcccaacttggcctcccacacgttccatttcattttggccattatagtcacatccgtttgactttggttgtgacatcttcctttcaggatgatggaattagatgcagtctgtctttgagtgagactggtcaccatcagaggagttttttctaagtgacgtgactagaagttgaaatctacttccctgctaaagggcacaggggtggtgtacaaagaaagctaccttcccagagcaagcaggctgcattttagctatggaagtgacctgctgtgacactgtgctctcttctgtgggcttaatggttcctttgctatgaagtggcaaattacatgtagagtgtctccttccttttcagagaacagttaatcaaggcaaatcagcaagcccccaaagtgctgtaatttaacatcatgattaccaccttcgaagctatatattttgcatactttaaaatcacctaacttggactgcttgaattacattggcttttagaaccgaaattgtaactatgtattgtatttcatgggaggtatattttatgagctttttggctttcttttttcccacagcaactgccaatgaaggatgaatcccctttttaaaaagttgttgttgttgttgtttatttgattttgagttaggagggataatagagaagtccatttaaaaattatttttagaagctaaagaaagtaattatgcttcctgtgaattgtcttttactggcatctttgttttcctctttgatgttagtaaatttggtgtaatacgtggggcttccatatttcaaagtggaagctttcttctctgaagtcgatatatggttttgaattactagagctttggtcagtatttccttccctatatgtcacagagggcaccactgagaactgcgtgcataggacctcaaaatacaaaattagcagggcctcacagtcagcttcctcatggctagtttttcccccttatattacaatttttgttttataagtcatttttttcctgatatttccaccacttttcagagtcatctacaaaatttttctttcctcaagaaaagagttccttttgccttattccttatgccttccccactggtattgagggttttgataataaattggtaggaaaaaaaagtacctcctagaaggaagccttccccaccatttccaggtgccaactgctaagcagatatattccaaaaatggtaactgtcatgtgcacactgttggttatttttaataagcctcttcctactagaacattttattttccttgttcaccatacaatcatgtactctttaacagaaattgcttttaaaaaatatctggaactatctttaaaaaaactttattaataatcatgtatttttactgatcacattttgaaatgcctaaaagactttattgttctaattatccagatgtacctttgtaaaatagctcttttatgaattagctgataaggctgtatgtttctggaacaaaatattggtcatctaaaaactttctgttttctggggtctgggaaaatagaaaataagatttcaaatattaaataagcttaaaggaacca

SEQ ID NO: 439390 - DNA, 9316 bp, Homo sapiens
aatagatggttgattttaacactcctctaaataaagaaaatatataatatattcttggagttataaattttatttgcttttaagtaatatctgatcttactagtagtaacttgctatctgaaaacggcatcattcttttggatttttagggcagtcataaaagagaaatgacaaattagtttttttttctgtggagacatgatgtagcagatgatgggactgtcttacataactggatcttttagaactatcgaagattaagtagtaaaatggtataaaaagtttcttgacaatgttattttcccttcccttccctttttccgtctccccaccccaagctggttcctatgtagctctcactgttcagggacgcccacctgggtcgccccagattccacttgccgactctgaagtagagccgtcagtcattggacatatgtctcccatcatgacatctcctcattcacctggagcatctgggaatatggagagaatcactagtcctgtgctcatgggggaggaaaacaatgtggttcataaccagaaagtagaaattctgagaaaaatgttacagaaagaacaggaacggctacagttattgcaggaagattacaaccgaacacctgcccaaagattgctaaaagagatccaagaggccaagaaacacattcctcagctgcaagagcagttatccaaagccacaggctctgctcaggatggagctgtagttacaccctccagacctttaggggacaccctaacagtcagtgaggcagaaacagatcctggagatgtactgggcaggactgactgtagcagtggagatgcttctcggcccagtagtgacaatgcagatagtcccaagagtggcccaaaagagagaatttatctagaggaaaacccagagaaaagtgaaacaattcaggacactgacactcaatcacttgtcggaagtccctcaacccgtatagcacctcatattattggagcagaagatgatgattttggtactgaacatgaacagatcaatggacagtgcagctgtttccagagcattgaattactaaaatctcgcccggctcatttggctgttttcttacaccatgtagtttcacaatttgaccctgcgactttgctctgttatctctattcagacctgtataaacataccaattccaaagaaactcgtcgcatcttccttgagtttcatcagttctttctagatcgatcagcacacctgaaagtttctgttcctgatgaaatgtctgcagatctagaaaagagaagacctgagctcattcctgaggatctgcatcgccactatatccaaactatgcaagaaagagtccatccagaagttcaaaggcacttagaagattttcggcagaaacgtagtatgggactgaccttggctgaaagcgagctgactaaacttgatgcagagcgagacaaggaccgattgactttggagaaggagcggacatgtgcagaacagattgttgccaaaattgaagaagtattgatgactgctcaggctgtagaggaagataagagctccaccatgcagtatgttattctcatgtatatgaagcatttgggagtaaaagtgaaagagcctcgaaatttggagcacaaacggggtcggattggatttcttcccaaaatcaagcaaagtatgaagaaagataaagaaggggaagaaaaagggaagcgaagaggattccccagcatcctgggacccccacggagaccaagccgtcatgacaacagtgcaattggcagagccatggaactacagaaggcgcgccaccctaagcacttatccacaccctcatctgtgagtcctgaacctcaggactctgccaagttgcgccagagtgggttagcaaatgaaggaacagacgctggatacctgcctgccaattccatgtcttctgtagcttcaggggcctctttttcccaggaaggagggaaagagaatgatacaggatcaaagcaagttggagaaacatcagcacctggagacaccttagatggcacacctcgtactctcaatactgtctttgatttcccaccacctccattagaccaagtgcaggaggaggaatgtgaagtagaaaggtaattcagtgatctcttagagaagcttagggcattacttaaagtttttaaattatatgctattcctatacttagtagcattctagcactgaagcctggcatggtggtatgtacctataatgccagctacttgggaggctgaggcaggagaatcaatcacttaaactcaggagtttgagaccagcctgggcaacgtagtgagcccccacttcaaactgtaaaaaataaaataaataaataaataaataagttgggtgcataaaagaactaaaacaccatttcagaactcataactgaaatgtagaaaggtactcaaattttcttcaatttattttatattaaattattacaatatcccaaagaattatttatcaagctgctggagtttaacctagctttgagtatctttggtataaatgtattgatcaccattttgttttcatgttactctttactttccattgttttagggtgactgaacatgggacaccaaagccctttcgaaagtaagtaaatcttaagcagctttcaataaaggcgcattttaagaaacgtaaccttttttcctctaaagtttcattttaaaggaaaagaaaccctgtataccaatctgttatgtagtataaaagaaagctcttaagaaacactggtcattcaaaagctgtattttgaagtatgtataaaacagccatttgtaggagaggatgaaatttcagtgctaagtcagattcaggaatctgattagaatttattgtaatataaagatttgtgctgtttctcattgtccacctaaagtcttcaaattgaattcactcttttttcttcataggtttgacagtgtagcttttggagaaagtcaaagtgaggatgaacaatttgaaaatgacttagagacagatccacccaactggcagcagcttgttagtcgagaagtgttactgggactaaaaccttgtgaaatcaaaagacaggaagtgattaatgaattgttctacactgaaagagctcatgttcgaacactgaaggttcttgatcaagtgttctatcagcgagtatccagagaaggaattctgtcaccctcagagctacggaaaattttttcaaacttggaagatattcttcaacttcatattggattgaatgaacaaatgaaggctgttcgaaagagaaatgagacctctgttatcgatcagattggggaagatttgctgacatggttcagcggaccaggagaggagaaattgaaacatgctgctgctaccttttgcagtaaccaacctttcgccctggaaatgatcaaatctcgtcagaaaaaggattctcgatttcagacttttgtgcaagatgctgaaagtaatccactgtgtcgtcgtcttcaactgaaggatattattcccactcaaatgcaaaggcttactaagtacccacttctgttggataatattgccaaatacacagaatggccaacagaaagggagaaggtgaagaaagctgcagatcactgtcgtcagatcttaaattatgtaaatcaggctgtcaaggaggcagaaaacaagcagcgcctagaagattatcagcgtcgccttgatacctccagcctgaagttgtcagagtacccaaatgttgaagagctcaggaatttggatttaacaaaaaggaagatgattcatgaagggccattggtttggaaggtgaatagagataaaactattgatttatacacgttgctgctggaagacattcttgtattgttacaaaagcaggatgatagactggttttaaggtgtcatagtaagattctggcatctacagctgatagcaaacacacgtttagccctgtcattaagttgagtacagtgttggttcgacaagtggcaacagataacaaagctttattcgtcatttccatgtcagacaatggcgctcagatttatgaactggtggcacagacagtttctgaaaagactgtctggcaggacctaatctgtcggatggctgcatcagtgaaggagcaatccacaaagccaattccattaccacagtcaacacctggcgaaggagataatgatgaagaagatccttcaaaattaaaagaggagcagcatggcatttcagtcactggtttgcagagtccagacagagatttgggattagaatctaccttaatatcgtcaaaacctcagtctcattcactgagtacctctgggaaatcagaggtacgtgatctgtttgtggctgagagacagtttgcaaaggaacaacatacagatgggacactaaaggaagttggagaagattatcaaatcgcaatcccagattcacacctgcctgtctcagaagaacggtgggcattggatgcactaagaaatttgggtttgttgaagcagttgctggtgcaacagctaggtttgactgagaagagcgttcaggaagactggcaacatttcccaagatacagaacagcctctcaggggccgcagacagacagtgtcatccagaactctgaaaatattaaggcctatcattctggtgaaggacatatgccctttagaactggaactggtgacattgcaacttgttacagtccacggacttcaactgaatcttttgctccacgggattcagtgggactggcaccccaggatagccaggcaagtaacattttagtaatggaccacatgattatgaccccagagatgcctaccatggagccagaagggggtcttgatgacagtggagagcacttttttgatgcccgtgaagcacatagtgatgagaatccatcagaaggtgatggagcagttaacaaggaagagaaggatgttaatttacgcatctcaggaaactatttgatccttgatggctatgacccagtgcaggagagttccacagatgaggaggttgcttcctcacttaccctgcagcccatgacaggcatccctgctgtggaatccacccaccagcagcaacattctcctcagaatactcactccgatggggcaatttcaccattcacccccgaatttctggtccagcagcgctggggagctatggagtattcctgttttgagatccagagtccctcctcttgtgcagattcacagagccagatcatggagtacattcataagatagaggctgaccttgaacacttaaagaaggtggaggaaagttacaccattctttgccaaaggctggctggatcagccctcacagacaagcactcagataaaagttagagccgcatgtcctggaggtgactgcaggttgttggatttggagtatcggccgtgtctcaccacatcctggctccagtgtggatgcagagagagtgtgacagaggatctgcctgtgaaccacctgggattagtcaagtcccaaggtgcccagagtgggactagttcttcacagtgtggcagctgcactaatctgtttgtgagggaatatccattccctcactctactctcctcactatcggaaattcattttgattcagaataaaaaccaaatgtatagagctttgggtgtaggatatgaaattgtacttagatttaagaaaaagagaaaatcagatgtatttatttgacttcattccgtatttgaaagcacattttaatttttatttgccttgttttgttttaattgagtagtgagagttttagacctttgtctttagtacacccaaggatcaactgctcctgaagcaaagaggtcaggatggagtatgcagaagttgggtagagaggttaagaagaggaggaagtgagacggggaagggaggagcaccttgcttcactatacagtattccaagctctctgctgtccagtaggctgcttctctgagggtcacctcaaaggtatgctatgccgtgtggctcttatgtgcccaggtggtgtggtcagagagtggatgggcttcctcccgccctgaggcaagcacctcttctctgtagctgggatcaaccacaattaataggaatcctcaacatactaaatagcaggcacttgaaaatgggtgtgttttcttccattgtcgtcttttctattgagggttgggatttgggtgggagaggaaagcaaattttattttcttgactataaatttgttattcttggtatcatttcatttttataattatacattagacattggcacttgtgtaaaactgtccctgcagattgagcaggaagtaaaaacaaatggaaatgcttcggatagtggcaggggtgggggttgctaaggaaagggtgggatgggagtgggtaaagagtttgggaaggttatctaactgaatcactactgagttgaatcatggctatcattagccacaggtactgctgattataaggccagtaaaattttagtacctggaggtttgactctaatttttgcactgatggtgccaaagggccctgagtcaaaaggatagccaagggtggagtggaaaaagatatggtgaaggcagaactgctcacaccagctccagaagcacgtcctctgacttcactgccgcagctctttccacacggggccgtgattgaccctaaaaattgcagaccagcacatacactggacactgcaggcaaggtgttggtaactgcctgctctaggatgaatagtagcgttagcagcaccctacagagggtaagtttcagaattgtaatttgagaactccttcaattatattgactttctttggttttccttgtgcattaggtatatattttttgaagtatttttgccaactaaaatgaagtctgtaaattctgttaataaacaaggagttcatccgttgctcacatctttcattggtgccctctgaactctgtgggttgctaggatgtaattttaatgcttccctgcagtccaaagatgattttttcaccacaaatggtaagggatgcccacctacttttataaacaccactgcaacttaacaagtttatttatctatgtccagatttctgtttctgtcctaaattgatctgtgtttttaggtggatcaacttggatctttagacctcatctataaattgaaattatatttttagtcataagccaagtacaatctaactcagaatgggattaaaaattttagaagcagaagctaatatataaatgaagtttgggatttggaactttctgtatctcttaggaggaacaagtaaaaaccaaatggttacattgtgctgctagaaataatgtcattctcaattaaaagggttacacctgtagccacttgacactaacaccatcgagggcaattaatcaggagaaaagtaaatataaaaactttgctcttaacgtcacacactacagggtaattatgtaattctctagcactcaattaagaagcttgtaggttagcaaaatttcagtttctctagttcagccagtgtcttgtccttagtaattatttgctttccctgcagttcaatttctccttggaactctaacaggactaactggaaaaatactttgaccatagctctagtacttccaaataaattcatatctagattttcaaacaaagccccaagatgaagtctaattctgaaaatatctcacaatttttgaatgttctttttatcttaccgacctaacttctcttttccctcccaacttggcctcccacacgttccatttcattttggccattatagtcacatccgtttgactttggttgtgacatcttcctttcaggatgatggaattagatgcagtctgtctttgagtgagactggtcaccatcagaggagttttttctaagtgacgtgactagaagttgaaatctacttccctgctaaagggcacaggggtggtgtacaaagaaagctaccttcccagagcaagcaggctgcattttagctatggaagtgacctgctgtgacactgtgctctcttctgtgggcttaatggttcctttgctatgaagtggcaaattacatgtagagtgtctccttccttttcagagaacagttaatcaaggcaaatcagcaagcccccaaagtgctgtaatttaacatcatgattaccaccttcgaagctatatattttgcatactttaaaatcacctaacttggactgcttgaattacattggcttttagaaccgaaattgtaactatgtattgtatttcatgggaggtatattttatgagctttttggctttcttttttcccacagcaactgccaatgaaggatgaatcccctttttaaaaagttgttgttgttgttgtttatttgattttgagttaggagggataatagagaagtccatttaaaaattatttttagaagctaaagaaagtaattatgcttcctgtgaattgtcttttactggcatctttgttttcctctttgatgttagtaaatttggtgtaatacgtggggcttccatatttcaaagtggaagctttcttctctgaagtcgatatatggttttgaattactagagctttggtcagtatttccttccctatatgtcacagagggcaccactgagaactgcgtgcataggacctcaaaatacaaaattagcagggcctcacagtcagcttcctcatggctagtttttcccccttatattacaatttttgttttataagtcatttttttcctgatatttccaccacttttcagagtcatctacaaaatttttctttcctcaagaaaagagttccttttgccttattccttatgccttccccactggtattgagggttttgataataaattggtaggaaaaaaaagtacctcctagaaggaagccttccccaccatttccaggtgccaactgctaagcagatatattccaaaaatggtaactgtcatgtgcacactgttggttatttttaataagcctcttcctactagaacattttattttccttgttcaccatacaatcatgtactctttaacagaaattgcttttaaaaaatatctggaactatctttaaaaaaactttattaataatcatgtatttttactgatcacattttgaaatgcctaaaagactttattgttctaattatccagatgtacctttgtaaaatagctcttttatgaattagctgataaggctgtatgtttctggaacaaaatattggtcatctaaaaactttctgttttctggggtctgggaaaatagaaaataagatttcaaatattaaataagcttaaaggaacca

SEQ ID NO: 439391 - DNA, 9616 bp, Homo sapiens
aggaagtttatccttgtgccttctggaggatttctctctagctcgactcactctggactgactcgctccctggctttctcagttcgttttgggagataacttgttttgctccaagccgcatccgttgaccccttacagtcggatggtctagatgactgaatggagttttgagttggacttttgtgtccctgacggagttgggcctgatcccagagcactgggggtggggaggaggtgttactgtaaaatgcaagttggataaaaggaggacctctcgccaagggccccaatgagtggcacacagtctactatcaccgacaggtttcccctcaaaaaacctataaggcatggaagtattttgaaccgagagtcaccaacagataagaagcagaaagttgagcgcattgcatcacatgattttgaccccacaggtcttgttcagcgttgcgtaatcatccagaaagatgacaatggatttgggctgacggtcagtggagacaatccagtcttcgtacagtctgtcaaagaagatggagcagccatgcgggctggagtacagacaggtgatcgaatcatcaaggtgaatggaactctggtgactcattcaaatcatctggaggtggtgaagctaatcaaatctggttcctatgtagctctcactgttcagggacgcccacctgggtcgccccagattccacttgccgactctgaagtagagccgtcagtcattggacatatgtctcccatcatgacatctcctcattcacctggagcatctgggaatatggagagaatcactagtcctgtgctcatgggggaggaaaacaatgtggttcataaccagaaagtagaaattctgagaaaaatgttacagaaagaacaggaacggctacagttattgcaggaagattacaaccgaacacctgcccaaagattgctaaaagagatccaagaggccaagaaacacattcctcagctgcaagagcagttatccaaagccacaggctctgctcaggatggagctgtagttacaccctccagacctttaggggacaccctaacagtcagtgaggcagaaacagatcctggagatgtactgggcaggactgactgtagcagtggagatgcttctcggcccagtagtgacaatgcagatagtcccaagagtggcccaaaagagagaatttatctagaggaaaacccagagaaaagtgaaacaattcaggacactgacactcaatcacttgtcggaagtccctcaacccgtatagcacctcatattattggagcagaagatgatgattttggtactgaacatgaacagatcaatggacagtgcagctgtttccagagcattgaattactaaaatctcgcccggctcatttggctgttttcttacaccatgtagtttcacaatttgaccctgcgactttgctctgttatctctattcagacctgtataaacataccaattccaaagaaactcgtcgcatcttccttgagtttcatcagttctttctagatcgatcagcacacctgaaagtttctgttcctgatgaaatgtctgcagatctagaaaagagaagacctgagctcattcctgaggatctgcatcgccactatatccaaactatgcaagaaagagtccatccagaagttcaaaggcacttagaagattttcggcagaaacgtagtatgggactgaccttggctgaaagcgagctgactaaacttgatgcagagcgagacaaggaccgattgactttggagaaggagcggacatgtgcagaacagattgttgccaaaattgaagaagtattgatgactgctcaggctgtagaggaagataagagctccaccatgcagtatgttattctcatgtatatgaagcatttgggagtaaaagtgaaagagcctcgaaatttggagcacaaacggggtcggattggatttcttcccaaaatcaagcaaagtatgaagaaagataaagaaggggaagaaaaagggaagcgaagaggattccccagcatcctgggacccccacggagaccaagccgtcatgacaacagtgcaattggcagagccatggaactacagaaggcgcgccaccctaagcacttatccacaccctcatctgtgagtcctgaacctcaggactctgccaagttgcgccagagtgggttagcaaatgaaggaacagacgctggatacctgcctgccaattccatgtcttctgtagcttcaggggcctctttttcccaggaaggagggaaagagaatgatacaggatcaaagcaagttggagaaacatcagcacctggagacaccttagatggcacacctcgtactctcaatactgtctttgatttcccaccacctccattagaccaagtgcaggaggaggaatgtgaagtagaaaggtaattcagtgatctcttagagaagcttagggcattacttaaagtttttaaattatatgctattcctatacttagtagcattctagcactgaagcctggcatggtggtatgtacctataatgccagctacttgggaggctgaggcaggagaatcaatcacttaaactcaggagtttgagaccagcctgggcaacgtagtgagcccccacttcaaactgtaaaaaataaaataaataaataaataaataagttgggtgcataaaagaactaaaacaccatttcagaactcataactgaaatgtagaaaggtactcaaattttcttcaatttattttatattaaattattacaatatcccaaagaattatttatcaagctgctggagtttaacctagctttgagtatctttggtataaatgtattgatcaccattttgttttcatgttactctttactttccattgttttagggtgactgaacatgggacaccaaagccctttcgaaagtaagtaaatcttaagcagctttcaataaaggcgcattttaagaaacgtaaccttttttcctctaaagtttcattttaaaggaaaagaaaccctgtataccaatctgttatgtagtataaaagaaagctcttaagaaacactggtcattcaaaagctgtattttgaagtatgtataaaacagccatttgtaggagaggatgaaatttcagtgctaagtcagattcaggaatctgattagaatttattgtaatataaagatttgtgctgtttctcattgtccacctaaagtcttcaaattgaattcactcttttttcttcataggtttgacagtgtagcttttggagaaagtcaaagtgaggatgaacaatttgaaaatgacttagagacagatccacccaactggcagcagcttgttagtcgagaagtgttactgggactaaaaccttgtgaaatcaaaagacaggaagtgattaatgaattgttctacactgaaagagctcatgttcgaacactgaaggttcttgatcaagtgttctatcagcgagtatccagagaaggaattctgtcaccctcagagctacggaaaattttttcaaacttggaagatattcttcaacttcatattggattgaatgaacaaatgaaggctgttcgaaagagaaatgagacctctgttatcgatcagattggggaagatttgctgacatggttcagcggaccaggagaggagaaattgaaacatgctgctgctaccttttgcagtaaccaacctttcgccctggaaatgatcaaatctcgtcagaaaaaggattctcgatttcagacttttgtgcaagatgctgaaagtaatccactgtgtcgtcgtcttcaactgaaggatattattcccactcaaatgcaaaggcttactaagtacccacttctgttggataatattgccaaatacacagaatggccaacagaaagggagaaggtgaagaaagctgcagatcactgtcgtcagatcttaaattatgtaaatcaggctgtcaaggaggcagaaaacaagcagcgcctagaagattatcagcgtcgccttgatacctccagcctgaagttgtcagagtacccaaatgttgaagagctcaggaatttggatttaacaaaaaggaagatgattcatgaagggccattggtttggaaggtgaatagagataaaactattgatttatacacgttgctgctggaagacattcttgtattgttacaaaagcaggatgatagactggttttaaggtgtcatagtaagattctggcatctacagctgatagcaaacacacgtttagccctgtcattaagttgagtacagtgttggttcgacaagtggcaacagataacaaagctttattcgtcatttccatgtcagacaatggcgctcagatttatgaactggtggcacagacagtttctgaaaagactgtctggcaggacctaatctgtcggatggctgcatcagtgaaggagcaatccacaaagccaattccattaccacagtcaacacctggcgaaggagataatgatgaagaagatccttcaaaattaaaagaggagcagcatggcatttcagtcactggtttgcagagtccagacagagatttgggattagaatctaccttaatatcgtcaaaacctcagtctcattcactgagtacctctgggaaatcagaggtacgtgatctgtttgtggctgagagacagtttgcaaaggaacaacatacagatgggacactaaaggaagttggagaagattatcaaatcgcaatcccagattcacacctgcctgtctcagaagaacggtgggcattggatgcactaagaaatttgggtttgttgaagcagttgctggtgcaacagctaggtttgactgagaagagcgttcaggaagactggcaacatttcccaagatacagaacagcctctcaggggccgcagacagacagtgtcatccagaactctgaaaatattaaggcctatcattctggtgaaggacatatgccctttagaactggaactggtgacattgcaacttgttacagtccacggacttcaactgaatcttttgctccacgggattcagtgggactggcaccccaggatagccaggcaagtaacattttagtaatggaccacatgattatgaccccagagatgcctaccatggagccagaagggggtcttgatgacagtggagagcacttttttgatgcccgtgaagcacatagtgatgagaatccatcagaaggtgatggagcagttaacaaggaagagaaggatgttaatttacgcatctcaggaaactatttgatccttgatggctatgacccagtgcaggagagttccacagatgaggaggttgcttcctcacttaccctgcagcccatgacaggcatccctgctgtggaatccacccaccagcagcaacattctcctcagaatactcactccgatggggcaatttcaccattcacccccgaatttctggtccagcagcgctggggagctatggagtattcctgttttgagatccagagtccctcctcttgtgcagattcacagagccagatcatggagtacattcataagatagaggctgaccttgaacacttaaagaaggtggaggaaagttacaccattctttgccaaaggctggctggatcagccctcacagacaagcactcagataaaagttagagccgcatgtcctggaggtgactgcaggttgttggatttggagtatcggccgtgtctcaccacatcctggctccagtgtggatgcagagagagtgtgacagaggatctgcctgtgaaccacctgggattagtcaagtcccaaggtgcccagagtgggactagttcttcacagtgtggcagctgcactaatctgtttgtgagggaatatccattccctcactctactctcctcactatcggaaattcattttgattcagaataaaaaccaaatgtatagagctttgggtgtaggatatgaaattgtacttagatttaagaaaaagagaaaatcagatgtatttatttgacttcattccgtatttgaaagcacattttaatttttatttgccttgttttgttttaattgagtagtgagagttttagacctttgtctttagtacacccaaggatcaactgctcctgaagcaaagaggtcaggatggagtatgcagaagttgggtagagaggttaagaagaggaggaagtgagacggggaagggaggagcaccttgcttcactatacagtattccaagctctctgctgtccagtaggctgcttctctgagggtcacctcaaaggtatgctatgccgtgtggctcttatgtgcccaggtggtgtggtcagagagtggatgggcttcctcccgccctgaggcaagcacctcttctctgtagctgggatcaaccacaattaataggaatcctcaacatactaaatagcaggcacttgaaaatgggtgtgttttcttccattgtcgtcttttctattgagggttgggatttgggtgggagaggaaagcaaattttattttcttgactataaatttgttattcttggtatcatttcatttttataattatacattagacattggcacttgtgtaaaactgtccctgcagattgagcaggaagtaaaaacaaatggaaatgcttcggatagtggcaggggtgggggttgctaaggaaagggtgggatgggagtgggtaaagagtttgggaaggttatctaactgaatcactactgagttgaatcatggctatcattagccacaggtactgctgattataaggccagtaaaattttagtacctggaggtttgactctaatttttgcactgatggtgccaaagggccctgagtcaaaaggatagccaagggtggagtggaaaaagatatggtgaaggcagaactgctcacaccagctccagaagcacgtcctctgacttcactgccgcagctctttccacacggggccgtgattgaccctaaaaattgcagaccagcacatacactggacactgcaggcaaggtgttggtaactgcctgctctaggatgaatagtagcgttagcagcaccctacagagggtaagtttcagaattgtaatttgagaactccttcaattatattgactttctttggttttccttgtgcattaggtatatattttttgaagtatttttgccaactaaaatgaagtctgtaaattctgttaataaacaaggagttcatccgttgctcacatctttcattggtgccctctgaactctgtgggttgctaggatgtaattttaatgcttccctgcagtccaaagatgattttttcaccacaaatggtaagggatgcccacctacttttataaacaccactgcaacttaacaagtttatttatctatgtccagatttctgtttctgtcctaaattgatctgtgtttttaggtggatcaacttggatctttagacctcatctataaattgaaattatatttttagtcataagccaagtacaatctaactcagaatgggattaaaaattttagaagcagaagctaatatataaatgaagtttgggatttggaactttctgtatctcttaggaggaacaagtaaaaaccaaatggttacattgtgctgctagaaataatgtcattctcaattaaaagggttacacctgtagccacttgacactaacaccatcgagggcaattaatcaggagaaaagtaaatataaaaactttgctcttaacgtcacacactacagggtaattatgtaattctctagcactcaattaagaagcttgtaggttagcaaaatttcagtttctctagttcagccagtgtcttgtccttagtaattatttgctttccctgcagttcaatttctccttggaactctaacaggactaactggaaaaatactttgaccatagctctagtacttccaaataaattcatatctagattttcaaacaaagccccaagatgaagtctaattctgaaaatatctcacaatttttgaatgttctttttatcttaccgacctaacttctcttttccctcccaacttggcctcccacacgttccatttcattttggccattatagtcacatccgtttgactttggttgtgacatcttcctttcaggatgatggaattagatgcagtctgtctttgagtgagactggtcaccatcagaggagttttttctaagtgacgtgactagaagttgaaatctacttccctgctaaagggcacaggggtggtgtacaaagaaagctaccttcccagagcaagcaggctgcattttagctatggaagtgacctgctgtgacactgtgctctcttctgtgggcttaatggttcctttgctatgaagtggcaaattacatgtagagtgtctccttccttttcagagaacagttaatcaaggcaaatcagcaagcccccaaagtgctgtaatttaacatcatgattaccaccttcgaagctatatattttgcatactttaaaatcacctaacttggactgcttgaattacattggcttttagaaccgaaattgtaactatgtattgtatttcatgggaggtatattttatgagctttttggctttcttttttcccacagcaactgccaatgaaggatgaatcccctttttaaaaagttgttgttgttgttgtttatttgattttgagttaggagggataatagagaagtccatttaaaaattatttttagaagctaaagaaagtaattatgcttcctgtgaattgtcttttactggcatctttgttttcctctttgatgttagtaaatttggtgtaatacgtggggcttccatatttcaaagtggaagctttcttctctgaagtcgatatatggttttgaattactagagctttggtcagtatttccttccctatatgtcacagagggcaccactgagaactgcgtgcataggacctcaaaatacaaaattagcagggcctcacagtcagcttcctcatggctagtttttcccccttatattacaatttttgttttataagtcatttttttcctgatatttccaccacttttcagagtcatctacaaaatttttctttcctcaagaaaagagttccttttgccttattccttatgccttccccactggtattgagggttttgataataaattggtaggaaaaaaaagtacctcctagaaggaagccttccccaccatttccaggtgccaactgctaagcagatatattccaaaaatggtaactgtcatgtgcacactgttggttatttttaataagcctcttcctactagaacattttattttccttgttcaccatacaatcatgtactctttaacagaaattgcttttaaaaaatatctggaactatctttaaaaaaactttattaataatcatgtatttttactgatcacattttgaaatgcctaaaagactttattgttctaattatccagatgtacctttgtaaaatagctcttttatgaattagctgataaggctgtatgtttctggaacaaaatattggtcatctaaaaactttctgttttctggggtctgggaaaatagaaaataagatttcaaatattaaataagcttaaaggaacca

SEQ ID NO: 439392 - DNA, 9324 bp, Homo sapiens
  misc_feature (37)..(38): n is a, c, g, or t
tgtgtggtaatcgcagttagtaatcaaagagtaaaannagcctggcacgcctgcgcagtttattactaatatataattattgtcttttcctttctctgttttctcttccttcttgttttacactgtggttcttgtgcaggtcttgttcagcgttgcgtaatcatccagaaagatgacaatggatttgggctgacggtcagtggagacaatccagtcttcgtacagtctgtcaaagaagatggagcagccatgcgggctggagtacagacaggtgatcgaatcatcaaggtgaatggaactctggtgactcattcaaatcatctggaggtggtgaagctaatcaaatctggttcctatgtagctctcactgttcagggacgcccacctgggtcgccccagattccacttgccgactctgaagtagagccgtcagtcattggacatatgtctcccatcatgacatctcctcattcacctggagcatctgggaatatggagagaatcactagtcctgtgctcatgggggaggaaaacaatgtggttcataaccagaaagtagaaattctgagaaaaatgttacagaaagaacaggaacggctacagttattgcaggaagattacaaccgaacacctgcccaaagattgctaaaagagatccaagaggccaagaaacacattcctcagctgcaagagcagttatccaaagccacaggctctgctcaggatggagctgtagttacaccctccagacctttaggggacaccctaacagtcagtgaggcagaaacagatcctggagatgtactgggcaggactgactgtagcagtggagatgcttctcggcccagtagtgacaatgcagatagtcccaagagtggcccaaaagagagaatttatctagaggaaaacccagagaaaagtgaaacaattcaggacactgacactcaatcacttgtcggaagtccctcaacccgtatagcacctcatattattggagcagaagatgatgattttggtactgaacatgaacagatcaatggacagtgcagctgtttccagagcattgaattactaaaatctcgcccggctcatttggctgttttcttacaccatgtagtttcacaatttgaccctgcgactttgctctgttatctctattcagacctgtataaacataccaattccaaagaaactcgtcgcatcttccttgagtttcatcagttctttctagatcgatcagcacacctgaaagtttctgttcctgatgaaatgtctgcagatctagaaaagagaagacctgagctcattcctgaggatctgcatcgccactatatccaaactatgcaagaaagagtccatccagaagttcaaaggcacttagaagattttcggcagaaacgtagtatgggactgaccttggctgaaagcgagctgactaaacttgatgcagagcgagacaaggaccgattgactttggagaaggagcggacatgtgcagaacagattgttgccaaaattgaagaagtattgatgactgctcaggctgtagaggaagataagagctccaccatgcagtatgttattctcatgtatatgaagcatttgggagtaaaagtgaaagagcctcgaaatttggagcacaaacggggtcggattggatttcttcccaaaatcaagcaaagtatgaagaaagataaagaaggggaagaaaaagggaagcgaagaggattccccagcatcctgggacccccacggagaccaagccgtcatgacaacagtgcaattggcagagccatggaactacagaaggcgcgccaccctaagcacttatccacaccctcatctgtgagtcctgaacctcaggactctgccaagttgcgccagagtgggttagcaaatgaaggaacagacgctggatacctgcctgccaattccatgtcttctgtagcttcaggggcctctttttcccaggaaggagggaaagagaatgatacaggatcaaagcaagttggagaaacatcagcacctggagacaccttagatggcacacctcgtactctcaatactgtctttgatttcccaccacctccattagaccaagtgcaggaggaggaatgtgaagtagaaaggtaattcagtgatctcttagagaagcttagggcattacttaaagtttttaaattatatgctattcctatacttagtagcattctagcactgaagcctggcatggtggtatgtacctataatgccagctacttgggaggctgaggcaggagaatcaatcacttaaactcaggagtttgagaccagcctgggcaacgtagtgagcccccacttcaaactgtaaaaaataaaataaataaataaataaataagttgggtgcataaaagaactaaaacaccatttcagaactcataactgaaatgtagaaaggtactcaaattttcttcaatttattttatattaaattattacaatatcccaaagaattatttatcaagctgctggagtttaacctagctttgagtatctttggtataaatgtattgatcaccattttgttttcatgttactctttactttccattgttttagggtgactgaacatgggacaccaaagccctttcgaaagtaagtaaatcttaagcagctttcaataaaggcgcattttaagaaacgtaaccttttttcctctaaagtttcattttaaaggaaaagaaaccctgtataccaatctgttatgtagtataaaagaaagctcttaagaaacactggtcattcaaaagctgtattttgaagtatgtataaaacagccatttgtaggagaggatgaaatttcagtgctaagtcagattcaggaatctgattagaatttattgtaatataaagatttgtgctgtttctcattgtccacctaaagtcttcaaattgaattcactcttttttcttcataggtttgacagtgtagcttttggagaaagtcaaagtgaggatgaacaatttgaaaatgacttagagacagatccacccaactggcagcagcttgttagtcgagaagtgttactgggactaaaaccttgtgaaatcaaaagacaggaagtgattaatgaattgttctacactgaaagagctcatgttcgaacactgaaggttcttgatcaagtgttctatcagcgagtatccagagaaggaattctgtcaccctcagagctacggaaaattttttcaaacttggaagatattcttcaacttcatattggattgaatgaacaaatgaaggctgttcgaaagagaaatgagacctctgttatcgatcagattggggaagatttgctgacatggttcagcggaccaggagaggagaaattgaaacatgctgctgctaccttttgcagtaaccaacctttcgccctggaaatgatcaaatctcgtcagaaaaaggattctcgatttcagacttttgtgcaagatgctgaaagtaatccactgtgtcgtcgtcttcaactgaaggatattattcccactcaaatgcaaaggcttactaagtacccacttctgttggataatattgccaaatacacagaatggccaacagaaagggagaaggtgaagaaagctgcagatcactgtcgtcagatcttaaattatgtaaatcaggctgtcaaggaggcagaaaacaagcagcgcctagaagattatcagcgtcgccttgatacctccagcctgaagttgtcagagtacccaaatgttgaagagctcaggaatttggatttaacaaaaaggaagatgattcatgaagggccattggtttggaaggtgaatagagataaaactattgatttatacacgttgctgctggaagacattcttgtattgttacaaaagcaggatgatagactggttttaaggtgtcatagtaagattctggcatctacagctgatagcaaacacacgtttagccctgtcattaagttgagtacagtgttggttcgacaagtggcaacagataacaaagctttattcgtcatttccatgtcagacaatggcgctcagatttatgaactggtggcacagacagtttctgaaaagactgtctggcaggacctaatctgtcggatggctgcatcagtgaaggagcaatccacaaagccaattccattaccacagtcaacacctggcgaaggagataatgatgaagaagatccttcaaaattaaaagaggagcagcatggcatttcagtcactggtttgcagagtccagacagagatttgggattagaatctaccttaatatcgtcaaaacctcagtctcattcactgagtacctctgggaaatcagaggtacgtgatctgtttgtggctgagagacagtttgcaaaggaacaacatacagatgggacactaaaggaagttggagaagattatcaaatcgcaatcccagattcacacctgcctgtctcagaagaacggtgggcattggatgcactaagaaatttgggtttgttgaagcagttgctggtgcaacagctaggtttgactgagaagagcgttcaggaagactggcaacatttcccaagatacagaacagcctctcaggggccgcagacagacagtgtcatccagaactctgaaaatattaaggcctatcattctggtgaaggacatatgccctttagaactggaactggtgacattgcaacttgttacagtccacggacttcaactgaatcttttgctccacgggattcagtgggactggcaccccaggatagccaggcaagtaacattttagtaatggaccacatgattatgaccccagagatgcctaccatggagccagaagggggtcttgatgacagtggagagcacttttttgatgcccgtgaagcacatagtgatgagaatccatcagaaggtgatggagcagttaacaaggaagagaaggatgttaatttacgcatctcaggaaactatttgatccttgatggctatgacccagtgcaggagagttccacagatgaggaggttgcttcctcacttaccctgcagcccatgacaggcatccctgctgtggaatccacccaccagcagcaacattctcctcagaatactcactccgatggggcaatttcaccattcacccccgaatttctggtccagcagcgctggggagctatggagtattcctgttttgagatccagagtccctcctcttgtgcagattcacagagccagatcatggagtacattcataagatagaggctgaccttgaacacttaaagaaggtggaggaaagttacaccattctttgccaaaggctggctggatcagccctcacagacaagcactcagataaaagttagagccgcatgtcctggaggtgactgcaggttgttggatttggagtatcggccgtgtctcaccacatcctggctccagtgtggatgcagagagagtgtgacagaggatctgcctgtgaaccacctgggattagtcaagtcccaaggtgcccagagtgggactagttcttcacagtgtggcagctgcactaatctgtttgtgagggaatatccattccctcactctactctcctcactatcggaaattcattttgattcagaataaaaaccaaatgtatagagctttgggtgtaggatatgaaattgtacttagatttaagaaaaagagaaaatcagatgtatttatttgacttcattccgtatttgaaagcacattttaatttttatttgccttgttttgttttaattgagtagtgagagttttagacctttgtctttagtacacccaaggatcaactgctcctgaagcaaagaggtcaggatggagtatgcagaagttgggtagagaggttaagaagaggaggaagtgagacggggaagggaggagcaccttgcttcactatacagtattccaagctctctgctgtccagtaggctgcttctctgagggtcacctcaaaggtatgctatgccgtgtggctcttatgtgcccaggtggtgtggtcagagagtggatgggcttcctcccgccctgaggcaagcacctcttctctgtagctgggatcaaccacaattaataggaatcctcaacatactaaatagcaggcacttgaaaatgggtgtgttttcttccattgtcgtcttttctattgagggttgggatttgggtgggagaggaaagcaaattttattttcttgactataaatttgttattcttggtatcatttcatttttataattatacattagacattggcacttgtgtaaaactgtccctgcagattgagcaggaagtaaaaacaaatggaaatgcttcggatagtggcaggggtgggggttgctaaggaaagggtgggatgggagtgggtaaagagtttgggaaggttatctaactgaatcactactgagttgaatcatggctatcattagccacaggtactgctgattataaggccagtaaaattttagtacctggaggtttgactctaatttttgcactgatggtgccaaagggccctgagtcaaaaggatagccaagggtggagtggaaaaagatatggtgaaggcagaactgctcacaccagctccagaagcacgtcctctgacttcactgccgcagctctttccacacggggccgtgattgaccctaaaaattgcagaccagcacatacactggacactgcaggcaaggtgttggtaactgcctgctctaggatgaatagtagcgttagcagcaccctacagagggtaagtttcagaattgtaatttgagaactccttcaattatattgactttctttggttttccttgtgcattaggtatatattttttgaagtatttttgccaactaaaatgaagtctgtaaattctgttaataaacaaggagttcatccgttgctcacatctttcattggtgccctctgaactctgtgggttgctaggatgtaattttaatgcttccctgcagtccaaagatgattttttcaccacaaatggtaagggatgcccacctacttttataaacaccactgcaacttaacaagtttatttatctatgtccagatttctgtttctgtcctaaattgatctgtgtttttaggtggatcaacttggatctttagacctcatctataaattgaaattatatttttagtcataagccaagtacaatctaactcagaatgggattaaaaattttagaagcagaagctaatatataaatgaagtttgggatttggaactttctgtatctcttaggaggaacaagtaaaaaccaaatggttacattgtgctgctagaaataatgtcattctcaattaaaagggttacacctgtagccacttgacactaacaccatcgagggcaattaatcaggagaaaagtaaatataaaaactttgctcttaacgtcacacactacagggtaattatgtaattctctagcactcaattaagaagcttgtaggttagcaaaatttcagtttctctagttcagccagtgtcttgtccttagtaattatttgctttccctgcagttcaatttctccttggaactctaacaggactaactggaaaaatactttgaccatagctctagtacttccaaataaattcatatctagattttcaaacaaagccccaagatgaagtctaattctgaaaatatctcacaatttttgaatgttctttttatcttaccgacctaacttctcttttccctcccaacttggcctcccacacgttccatttcattttggccattatagtcacatccgtttgactttggttgtgacatcttcctttcaggatgatggaattagatgcagtctgtctttgagtgagactggtcaccatcagaggagttttttctaagtgacgtgactagaagttgaaatctacttccctgctaaagggcacaggggtggtgtacaaagaaagctaccttcccagagcaagcaggctgcattttagctatggaagtgacctgctgtgacactgtgctctcttctgtgggcttaatggttcctttgctatgaagtggcaaattacatgtagagtgtctccttccttttcagagaacagttaatcaaggcaaatcagcaagcccccaaagtgctgtaatttaacatcatgattaccaccttcgaagctatatattttgcatactttaaaatcacctaacttggactgcttgaattacattggcttttagaaccgaaattgtaactatgtattgtatttcatgggaggtatattttatgagctttttggctttcttttttcccacagcaactgccaatgaaggatgaatcccctttttaaaaagttgttgttgttgttgtttatttgattttgagttaggagggataatagagaagtccatttaaaaattatttttagaagctaaagaaagtaattatgcttcctgtgaattgtcttttactggcatctttgttttcctctttgatgttagtaaatttggtgtaatacgtggggcttccatatttcaaagtggaagctttcttctctgaagtcgatatatggttttgaattactagagctttggtcagtatttccttccctatatgtcacagagggcaccactgagaactgcgtgcataggacctcaaaatacaaaattagcagggcctcacagtcagcttcctcatggctagtttttcccccttatattacaatttttgttttataagtcatttttttcctgatatttccaccacttttcagagtcatctacaaaatttttctttcctcaagaaaagagttccttttgccttattccttatgccttccccactggtattgagggttttgataataaattggtaggaaaaaaaagtacctcctagaaggaagccttccccaccatttccaggtgccaactgctaagcagatatattccaaaaatggtaactgtcatgtgcacactgttggttatttttaataagcctcttcctactagaacattttattttccttgttcaccatacaatcatgtactctttaacagaaattgcttttaaaaaatatctggaactatctttaaaaaaactttattaataatcatgtatttttactgatcacattttgaaatgcctaaaagactttattgttctaattatccagatgtacctttgtaaaatagctcttttatgaattagctgataaggctgtatgtttctggaacaaaatattggtcatctaaaaactttctgttttctggggtctgggaaaatagaaaataagatttcaaatattaaataagcttaaaggaacca

SEQ ID NO: 439393 - DNA, 7343 bp, Homo sapiens
  misc_feature (2)..(3): n is a, c, g, or t
tnnttttttttggtgaccagtgactttattaagtattaacactcttcaaatgtctgacttttgtctacaggatcaaagcaagttggagaaacatcagcacctggagacaccttagatggcacacctcgtactctcaatactgtctttgatttcccaccacctccattagaccaagtgcaggaggaggaatgtgaagtagaaaggtaattcagtgatctcttagagaagcttagggcattacttaaagtttttaaattatatgctattcctatacttagtagcattctagcactgaagcctggcatggtggtatgtacctataatgccagctacttgggaggctgaggcaggagaatcaatcacttaaactcaggagtttgagaccagcctgggcaacgtagtgagcccccacttcaaactgtaaaaaataaaataaataaataaataaataagttgggtgcataaaagaactaaaacaccatttcagaactcataactgaaatgtagaaaggtactcaaattttcttcaatttattttatattaaattattacaatatcccaaagaattatttatcaagctgctggagtttaacctagctttgagtatctttggtataaatgtattgatcaccattttgttttcatgttactctttactttccattgttttagggtgactgaacatgggacaccaaagccctttcgaaagtaagtaaatcttaagcagctttcaataaaggcgcattttaagaaacgtaaccttttttcctctaaagtttcattttaaaggaaaagaaaccctgtataccaatctgttatgtagtataaaagaaagctcttaagaaacactggtcattcaaaagctgtattttgaagtatgtataaaacagccatttgtaggagaggatgaaatttcagtgctaagtcagattcaggaatctgattagaatttattgtaatataaagatttgtgctgtttctcattgtccacctaaagtcttcaaattgaattcactcttttttcttcataggtttgacagtgtagcttttggagaaagtcaaagtgaggatgaacaatttgaaaatgacttagagacagatccacccaactggcagcagcttgttagtcgagaagtgttactgggactaaaaccttgtgaaatcaaaagacaggaagtgattaatgaattgttctacactgaaagagctcatgttcgaacactgaaggttcttgatcaagtgttctatcagcgagtatccagagaaggaattctgtcaccctcagagctacggaaaattttttcaaacttggaagatattcttcaacttcatattggattgaatgaacaaatgaaggctgttcgaaagagaaatgagacctctgttatcgatcagattggggaagatttgctgacatggttcagcggaccaggagaggagaaattgaaacatgctgctgctaccttttgcagtaaccaacctttcgccctggaaatgatcaaatctcgtcagaaaaaggattctcgatttcagacttttgtgcaagatgctgaaagtaatccactgtgtcgtcgtcttcaactgaaggatattattcccactcaaatgcaaaggcttactaagtacccacttctgttggataatattgccaaatacacagaatggccaacagaaagggagaaggtgaagaaagctgcagatcactgtcgtcagatcttaaattatgtaaatcaggctgtcaaggaggcagaaaacaagcagcgcctagaagattatcagcgtcgccttgatacctccagcctgaagttgtcagagtacccaaatgttgaagagctcaggaatttggatttaacaaaaaggaagatgattcatgaagggccattggtttggaaggtgaatagagataaaactattgatttatacacgttgctgctggaagacattcttgtattgttacaaaagcaggatgatagactggttttaaggtgtcatagtaagattctggcatctacagctgatagcaaacacacgtttagccctgtcattaagttgagtacagtgttggttcgacaagtggcaacagataacaaagctttattcgtcatttccatgtcagacaatggcgctcagatttatgaactggtggcacagacagtttctgaaaagactgtctggcaggacctaatctgtcggatggctgcatcagtgaaggagcaatccacaaagccaattccattaccacagtcaacacctggcgaaggagataatgatgaagaagatccttcaaaattaaaagaggagcagcatggcatttcagtcactggtttgcagagtccagacagagatttgggattagaatctaccttaatatcgtcaaaacctcagtctcattcactgagtacctctgggaaatcagaggtacgtgatctgtttgtggctgagagacagtttgcaaaggaacaacatacagatgggacactaaaggaagttggagaagattatcaaatcgcaatcccagattcacacctgcctgtctcagaagaacggtgggcattggatgcactaagaaatttgggtttgttgaagcagttgctggtgcaacagctaggtttgactgagaagagcgttcaggaagactggcaacatttcccaagatacagaacagcctctcaggggccgcagacagacagtgtcatccagaactctgaaaatattaaggcctatcattctggtgaaggacatatgccctttagaactggaactggtgacattgcaacttgttacagtccacggacttcaactgaatcttttgctccacgggattcagtgggactggcaccccaggatagccaggcaagtaacattttagtaatggaccacatgattatgaccccagagatgcctaccatggagccagaagggggtcttgatgacagtggagagcacttttttgatgcccgtgaagcacatagtgatgagaatccatcagaaggtgatggagcagttaacaaggaagagaaggatgttaatttacgcatctcaggaaactatttgatccttgatggctatgacccagtgcaggagagttccacagatgaggaggttgcttcctcacttaccctgcagcccatgacaggcatccctgctgtggaatccacccaccagcagcaacattctcctcagaatactcactccgatggggcaatttcaccattcacccccgaatttctggtccagcagcgctggggagctatggagtattcctgttttgagatccagagtccctcctcttgtgcagattcacagagccagatcatggagtacattcataagatagaggctgaccttgaacacttaaagaaggtggaggaaagttacaccattctttgccaaaggctggctggatcagccctcacagacaagcactcagataaaagttagagccgcatgtcctggaggtgactgcaggttgttggatttggagtatcggccgtgtctcaccacatcctggctccagtgtggatgcagagagagtgtgacagaggatctgcctgtgaaccacctgggattagtcaagtcccaaggtgcccagagtgggactagttcttcacagtgtggcagctgcactaatctgtttgtgagggaatatccattccctcactctactctcctcactatcggaaattcattttgattcagaataaaaaccaaatgtatagagctttgggtgtaggatatgaaattgtacttagatttaagaaaaagagaaaatcagatgtatttatttgacttcattccgtatttgaaagcacattttaatttttatttgccttgttttgttttaattgagtagtgagagttttagacctttgtctttagtacacccaaggatcaactgctcctgaagcaaagaggtcaggatggagtatgcagaagttgggtagagaggttaagaagaggaggaagtgagacggggaagggaggagcaccttgcttcactatacagtattccaagctctctgctgtccagtaggctgcttctctgagggtcacctcaaaggtatgctatgccgtgtggctcttatgtgcccaggtggtgtggtcagagagtggatgggcttcctcccgccctgaggcaagcacctcttctctgtagctgggatcaaccacaattaataggaatcctcaacatactaaatagcaggcacttgaaaatgggtgtgttttcttccattgtcgtcttttctattgagggttgggatttgggtgggagaggaaagcaaattttattttcttgactataaatttgttattcttggtatcatttcatttttataattatacattagacattggcacttgtgtaaaactgtccctgcagattgagcaggaagtaaaaacaaatggaaatgcttcggatagtggcaggggtgggggttgctaaggaaagggtgggatgggagtgggtaaagagtttgggaaggttatctaactgaatcactactgagttgaatcatggctatcattagccacaggtactgctgattataaggccagtaaaattttagtacctggaggtttgactctaatttttgcactgatggtgccaaagggccctgagtcaaaaggatagccaagggtggagtggaaaaagatatggtgaaggcagaactgctcacaccagctccagaagcacgtcctctgacttcactgccgcagctctttccacacggggccgtgattgacctgcctgctctaggatgaatagtagcgttagcagcaccctacagagggtaagtttcagaattgtaatttgagaactccttcaattatattgactttctttggttttccttgtgcattaggtatatattttttgaagtatttttgccaactaaaatgaagtctgtaaattctgttaataaacaaggagttcatccgttgctcacatctttcattggtgccctctgaactctgtgggttgctaggatgtaattttaatgcttccctgcagtccaaagatgattttttcaccacaaatggtaagggatgcccacctacttttataaacaccactgcaacttaacaagtttatttatctatgtccagatttctgtttctgtcctaaattgatctgtgtttttaggtggatcaacttggatctttagacctcatctataaattgaaattatatttttagtcataagccaagtacaatctaactcagaatgggattaaaaattttagaagcagaagctaatatataaatgaagtttgggatttggaactttctgtatctcttaggaggaacaagtaaaaaccaaatggttacattgtgctgctagaaataatgtcattctcaattaaaagggttacacctgtagccacttgacactaacaccatcgagggcaattaatcaggagaaaagtaaatataaaaactttgctcttaacgtcacacactacagggtaattatgtaattctctagcactcaattaagaagcttgtaggttagcaaaatttcagtttctctagttcagccagtgtcttgtccttagtaattatttgctttccctgcagttcaatttctccttggaactctaacaggactaactggaaaaatactttgaccatagctctagtacttccaaataaattcatatctagattttcaaacaaagccccaagatgaagtctaattctgaaaatatctcacaatttttgaatgttctttttatcttaccgacctaacttctcttttccctcccaacttggcctcccacacgttccatttcattttggccattatagtcacatccgtttgactttggttgtgacatcttcctttcaggatgatggaattagatgcagtctgtctttgagtgagactggtcaccatcagaggagttttttctaagtgacgtgactagaagttgaaatctacttccctgctaaagggcacaggggtggtgtacaaagaaagctaccttcccagagcaagcaggctgcattttagctatggaagtgacctgctgtgacactgtgctctcttctgtgggcttaatggttcctttgctatgaagtggcaaattacatgtagagtgtctccttccttttcagagaacagttaatcaaggcaaatcagcaagcccccaaagtgctgtaatttaacatcatgattaccaccttcgaagctatatattttgcatactttaaaatcacctaacttggactgcttgaattacattggcttttagaaccgaaattgtaactatgtattgtatttcatgggaggtatattttatgagctttttggctttcttttttcccacagcaactgccaatgaaggatgaatcccctttttaaaaagttgttgttgttgttgtttatttgattttgagttaggagggataatagagaagtccatttaaaaattatttttagaagctaaagaaagtaattatgcttcctgtgaattgtcttttactggcatctttgttttcctctttgatgttagtaaatttggtgtaatacgtggggcttccatatttcaaagtggaagctttcttctctgaagtcgatatatggttttgaattactagagctttggtcagtatttccttccctatatgtcacagagggcaccactgagaactgcgtgcataggacctcaaaatacaaaattagcagggcctcacagtcagcttcctcatggctagtttttcccccttatattacaatttttgttttataagtcatttttttcctgatatttccaccacttttcagagtcatctacaaaatttttctttcctcaagaaaagagttccttttgccttattccttatgccttccccactggtattgagggttttgataataaattggtaggaaaaaaaagtacctcctagaaggaagccttccccaccatttccaggtgccaactgctaagcagatatattccaaaaatggtaactgtcatgtgcacactgttggttatttttaataagcctcttcctactagaacattttattttccttgttcaccatacaatcatgtactctttaacagaaattgcttttaaaaaatatctggaactatctttaaaaaaactttattaataatcatgtatttttactgatcacattttgaaatgcctaaaagactttattgttctaattatccagatgtacctttgtaaaatagctcttttatgaattagctgataaggctgtatgtttctggaacaaaatattggtcatctaaaaactttctgttttctggggtctgggaaaatagaaaataagatttcaaatattaaataagcttaaaggaacca

SEQ ID NO: 439394 - DNA, 6755 bp, Homo sapiens
  misc_feature (2)..(3): n is a, c, g, or t
tnnttttttttggtgaccagtgactttattaagtattaacactcttcaaatgtctgacttttgtctacaggatcaaagcaagttggagaaacatcagcacctggagacaccttagatggcacacctcgtactctcaatactgtctttgatttcccaccacctccattagaccaagtgcaggaggaggaatgtgaagtagaaaggtaattcagtgatctcttagagaagcttagggcattacttaaagtttttaaattatatgctattcctatacttagtagcattctagcactgaagcctggcatggtggtatgtacctataatgccagctacttgggaggctgaggcaggagaatcaatcacttaaactcaggagtttgagaccagcctgggcaacgtagtgagcccccacttcaaactgtaaaaaataaaataaataaataaataaataagttgggtgcataaaagaactaaaacaccatttcagaactcataactgaaatgtagaaaggtactcaaattttcttcaatttattttatattaaattattacaatatcccaaagaattatttatcaagctgctggagtttaacctagctttgagtatctttggtataaatgtattgatcaccattttgttttcatgttactctttactttccattgttttagggtgactgaacatgggacaccaaagccctttcgaaagtaagtaaatcttaagcagctttcaataaaggcgcattttaagaaacgtaaccttttttcctctaaagtttcattttaaaggaaaagaaaccctgtataccaatctgttatgtagtataaaagaaagctcttaagaaacactggtcattcaaaagctgtattttgaagtatgtataaaacagccatttgtaggagaggatgaaatttcagtgctaagtcagattcaggaatctgattagaatttattgtaatataaagatttgtgctgtttctcattgtccacctaaagtcttcaaattgaattcactcttttttcttcataggtttgacagtgtagcttttggagaaagtcaaagtgaggatgaacaatttgaaaatgacttagagacagatccacccaactggcagcagcttgttagtcgagaagtgttactgggactaaaaccttgtgaaatcaaaagacaggaagtgattaatgaattgttctacactgaaagagctcatgttcgaacactgaaggttcttgatcaagtgttctatcagcgagtatccagagaaggaattctgtcaccctcagagctacggaaaattttttcaaacttggaagatattcttcaacttcatattggattgaatgaacaaatgaaggctgttcgaaagagaaatgagacctctgttatcgatcagattggggaagatttgctgacatggttcagcggaccaggagaggagaaattgaaacatgctgctgctaccttttgcagtaaccaacctttcgccctggaaatgatcaaatctcgtcagaaaaaggattctcgatttcagacttttgtgcaagatgctgaaagtaatccactgtgtcgtcgtcttcaactgaaggatattattcccactcaaatgcaaaggcttactaagtacccacttctgttggataatattgccaaatacacagaatggccaacagaaagggagaaggtgaagaaagctgcagatcactgtcgtcagatcttaaattatgtaaatcaggctgtcaaggaggcagaaaacaagcagcgcctagaagattatcagcgtcgccttgatacctccagcctgaagttgtcagagtacccaaatgttgaagagctcaggaatttggatttaacaaaaaggaagatgattcatgaagggccattggtttggaaggtgaatagagataaaactattgatttatacacgttgctgctggaagacattcttgtattgttacaaaagcaggatgatagactggttttaaggtgtcatagtaagattctggcatctacagctgatagcaaacacacgtttagccctgtcattaagttgagtacagtgttggttcgacaagtggcaacagataacaaagctttattcgtcatttccatgtcagacaatggcgctcagatttatgaactggtggcacagacagtttctgaaaagactgtctggcaggacctaatctgtcggatggctgcatcagtgaaggagcaatccacaaagccaattccattaccacagtcaacacctggcgaaggagataatgatgaagaagatccttcaaaattaaaagaggagcagcatggcatttcagtcactggtttgcagagtccagacagagatttgggattagaatctaccttaatatcgtcaaaacctcagtctcattcactgagtacctctgggaaatcagaggtacgtgatctgtttgtggctgagagacagtttgcaaaggaacaacatacagatgggacactaaaggaagttggagaagattatcaaatcgcaatcccagattcacacctgcctgtctcagaagaacggtgggcattggatgcactaagaaatttgggtttgttgaagcagttgctggtgcaacagctaggtttgactgagaagagcgttcaggaagactggcaacatttcccaagatacagaacagcctctcaggggccgcagacagacagtgtcatccagaactctgaaaatattaaggcctatcattctggtgaaggacatatgccctttagaactggaactggtgacattgcaacttgttacagtccacggacttcaactgaatcttttgctccacgggattcagtgggactggcaccccaggatagccaggcaagtaacattttagtaatggaccacatgattatgaccccagagatgcctaccatggagccagaagggggtcttgatgacagtggagagcacttttttgatgcccgtgaagcacatagtgatgagaatccatcagaaggtgatggagcagttaacaaggaagagaaggatgttaatttacgcatctcaggaaactatttgatccttgatggctatgacccagtgcaggagagttccacagatgaggaggttgcttcctcacttaccctgcagcccatgacaggcatccctgctgtggaatccacccaccagcagcaacattctcctcagaatactcactccgatggggcaatttcaccattcacccccgaatttctggtccagcagcgctggggagctatggagtattcctgttttgagatccagagtccctcctcttgtgcagattcacagagccagatcatggagtacattcataagatagaggctgaccttgaacacttaaagaaggtggaggaaagttacaccattctttgccaaaggctggctggatcagccctcacagacaagcactcagataaaagttagagccgcatgtcctggaggtgactgcaggttgttggatttggagtatcggccgtgtctcaccacatcctggctccagtgtggatgcagagagagtgtgacagaggatctgcctgtgaaccacctgggattagtcaagtcccaaggtgcccagagtgggactagttcttcacagtgtggcagctgcactaatctgtttgtgagggaatatccattccctcactctactctcctcactatcggaaattcattttgattcagaataaaaaccaaatgtatagagctttgggtgtaggatatgaaattgtacttagatttaagaaaaagagaaaatcagatgtatttatttgacttcattccgtatttgaaagcacattttaatttttatttgccttgttttgttttaattgagtagtgagagttttagacctttgtctttagtacacccaaggatcaactgctcctgaagcaaagaggtcaggatggagtatgcagaagttgggtagagaggttaagaagaggaggaagtgagacggggaagggaggagcaccttgcttcactatacagtattccaagctctctgctgtccagtaggctgcttctctgagggtcacctcaaaggtatgctatgccgtgtggctcttatgtgcccaggtggtgtggtcagagagtggatgggcttcctcccgccctgaggcaagcacctcttctctgtagctgggatcaaccacaattaataggaatcctcaacatactaaatagcaggcacttgaaaatgggtgtgttttcttccattgtcgtcttttctattgagggttgggatttgggtgggagaggaaagcaaattttattttcttgactataaatttgttattcttggtatcatttcatttttataattatacattagacattggcacttgtgtaaaactgtccctgcagattgagcaggaagtaaaaacaaatggaaatgcttcggatagtggcaggggtgggggttgctaaggaaagggtgggatgggagtgggtaaagagtttgggaaggttatctaactgaatcactactgagttgaatcatggctatcattagccacaggtactgctgattataaggccagtaaaattttagtacctggaggtttgactctaatttttgcactgatggtgccaaagggccctgagtcaaaaggatagccaagggtggagtggaaaaagatatggtgaaggcagaactgctcacaccagctccagaagcacgtcctctgacttcactgccgcagctctttccacacggggccgtgattgaccctaaaaattgcagaccagcacatacactggacactgcaggcaaggtgttggtaactgcctgctctaggatgaatagtagcgttagcagcaccctacagagggtaagtttcagaattgtaatttgagaactccttcaattatattgactttctttggttttccttgtgcattaggtatatattttttgaagtatttttgccaactaaaatgaagtctgtaaattctgttaataaacaaggagttcatccgttgctcacatctttcattggtgccctctgaactctgtgggttgctaggatgtaattttaatgcttccctgcagtccaaagatgattttttcaccacaaatggtaagggatgcccacctacttttataaacaccactgcaacttaacaagtttatttatctatgtccagatttctgtttctgtcctaaattgatctgtgtttttaggtggatcaacttggatctttagacctcatctataaattgaaattatatttttagtcataagccaagtacaatctaactcagaatgggattaaaaattttagaagcagaagctaatatataaatgaagtttgggatttggaactttctgtatctcttaggaggaacaagtaaaaaccaaatggttacattgtgctgctagaaataatgtcattctcaattaaaagggttacacctgtagccacttgacactaacaccatcgagggcaattaatcaggagaaaagtaaatataaaaactttgctcttaacgtcacacactacagggtaattatgtaattctctagcactcaattaagaagcttgtaggttagcaaaatttcagtttctctagttcagccagtgtcttgtccttagtaattatttgctttccctgcagttcaatttctccttggaactctaacaggactaactggaaaaatactttgaccatagctctagtacttccaaataaattcatatctagattttcaaacaaagccccaagatgaagtctaattctgaaaatatctcacaatttttgaatgttctttttatcttaccgacctaacttctcttttccctcccaacttggcctcccacacgttccatttcattttggccattatagtcacatccgtttgactttggttgtgacatcttcctttcaggatgatggaattagatgcagtctgtctttgagtgagactggtcaccatcagaggagttttttctaagtgacgtgactagaagttgaaatctacttccctgctaaagggcacaggggtggtgtacaaagaaagctaccttcccagaagggcaccactgagaactgcgtgcataggacctcaaaatacaaaattagcagggcctcacagtcagcttcctcatggctagtttttcccccttatattacaatttttgttttataagtcatttttttcctgatatttccaccacttttcagagtcatctacaaaatttttctttcctcaagaaaagagttccttttgccttattccttatgccttccccactggtattgagggttttgataataaattggtaggaaaaaaaagtacctcctagaaggaagccttccccaccatttccaggtgccaactgctaagcagatatattccaaaaatggtaactgtcatgtgcacactgttggttatttttaataagcctcttcctactagaacattttattttccttgttcaccatacaatcatgtactctttaacagaaattgcttttaaaaaatatctggaactatctttaaaaaaactttattaataatcatgtatttttactgatcacattttgaaatgcctaaaagactttattgttctaattatccagatgtacctttgtaaaatagctcttttatgaattagctgataaggctgtatgtttctggaacaaaatattggtcatctaaaaactttctgttttctggggtctgggaaaatagaaaataagatttcaaatattaaataagcttaaaggaacca

SEQ ID NO: 439395 - DNA, 1840 bp, Homo sapiens
ggaaaaatactttgaccatagctctagtacttccagtgtcttgtccttagaaattgaactgcagggaaagcaaataattactaaggacaagacactggctgaactagactaactggaaaaatactttgaccatagctctagtacttccaaataaattcatatctagattttcaaacaaagccccaagatgaagtctaattctgaaaatatctcacaatttttgaatgttctttttatcttaccgacctaacttctcttttccctcccaacttggcctcccacacgttccatttcattttggccattatagtcacatccgtttgactttggttgtgacatcttcctttcaggatgatggaattagatgcagtctgtctttgagtgagactggtcaccatcagaggagttttttctaagtgacgtgactagaagttgaaatctacttccctgctaaagggcacaggggtggtgtacaaagaaagctaccttcccagagcaagcaggctgcattttagctatggaagtgacctgctgtgacactgtgctctcttctgtgggcttaatggttcctttgctatgaagtggcaaattacatgtagagtgtctccttccttttcagagaacagttaatcaaggcaaatcagcaagcccccaaagtgctgtaatttaacatcatgattaccaccttcgaagctatatattttgcatactttaaaatcacctaacttggactgcttgaattacattggcttttagaaccgaaattgtaactatgtattgtatttcatgggaggtatattttatgagctttttggctttcttttttcccacagcaactgccaatgaaggatgaatcccctttttaaaaagttgttgttgttgttgtttatttgattttgagttaggagggataatagagaagtccatttaaaaattatttttagaagctaaagaaagtaattatgcttcctgtgaattgtcttttactggcatctttgttttcctctttgatgttagtaaatttggtgtaatacgtggggcttccatatttcaaagtggaagctttcttctctgaagtcgatatatggttttgaattactagagctttggtcagtatttccttccctatatgtcacagagggcaccactgagaactgcgtgcataggacctcaaaatacaaaattagcagggcctcacagtcagcttcctcatggctagtttttcccccttatattacaatttttgttttataagtcatttttttcctgatatttccaccacttttcagagtcatctacaaaatttttctttcctcaagaaaagagttccttttgccttattccttatgccttccccactggtattgagggttttgataataaattggtaggaaaaaaaagtacctcctagaaggaagccttccccaccatttccaggtgccaactgctaagcagatatattccaaaaatggtaactgtcatgtgcacactgttggttatttttaataagcctcttcctactagaacattttattttccttgttcaccatacaatcatgtactctttaacagaaattgcttttaaaaaatatctggaactatctttaaaaaaactttattaataatcatgtatttttactgatcacattttgaaatgcctaaaagactttattgttctaattatccagatgtacctttgtaaaatagctcttttatgaattagctgataaggctgtatgtttctggaacaaaatattggtcatctaaaaactttctgttttctggggtctgggaaaatagaaaataagatttcaaatattaaataagcttaaaggaacca

SEQ ID NO: 439396 - DNA, 2268 bp, Homo sapiens
  misc_feature (2)..(3): n is a, c, g, or t
tnnttttttttggtgaccagtgactttattaagtattaacactcttcaaatgtctgacttttgtctacaggatcaaagcaagttggagaaacatcagcacctggagacaccttagatggcacacctcgtactctcaatactgtctttgatttcccaccacctccattagaccaagtgcaggaggaggaatgtgaagtagaaaggtaattcagtgatctcttagagaagcttagggcattacttaaagtttttaaattatatgctattcctatacttagtagcattctagcactgaagcctggcatggtggtatgtacctataatgccagctacttgggaggctgaggcaggagaatcaatcacttaaactcaggagtttgagaccagcctgggcaacgtagtgagcccccacttcaaactgtaaaaaataaaataaataaataaataaataagttgggtgcataaaagaactaaaacaccatttcagaactcataactgaaatgtagaaaggtactcaaattttcttcaatttattttatattaaattattacaatatcccaaagaattatttatcaagctgctggagtttaacctagctttgagtatctttggtataaatgtattgatcaccattttgttttcatgttactctttactttccattgttttagggtgactgaacatgggacaccaaagccctttcgaaagtaagtaaatcttaagcagctttcaataaaggcgcattttaagaaacgtaaccttttttcctctaaagtttcattttaaaggaaaagaaaccctgtataccaatctgttatgtagtataaaagaaagctcttaagaaacactggtcattcaaaagctgtattttgaagtatgtataaaacagccatttgtaggagaggatgaaatttcagtgctaagtcagattcaggaatctgattagaatttattgtaatataaagatttgtgctgtttctcattgtccacctaaagtcttcaaattgaattcactcttttttcttcataggtttgacagtgtagcttttggagaaagtcaaagtgaggatgaacaatttgaaaatgacttagagacagatccacccaactggcagcagcttgttagtcgagaagtgttactgggactaaaaccttgtgaaatcaaaagacaggaagtgattaatgaattgttctacactgaaagagctcatgttcgaacactgaaggttcttgatcaagtgttctatcagcgagtatccagagaaggaattctgtcaccctcagagctacggaaaattttttcaaacttggaagatattcttcaacttcatattggattgaatgaacaaatgaaggctgttcgaaagagaaatgagacctctgttatcgatcagattggggaagatttgctgacatggttcagcggaccaggagaggagaaattgaaacatgctgctgctaccttttgcagtaaccaacctttcgccctggaaatgatcaaatctcgtcagaaaaaggattctcgatttcagacttttgtgcaagatgctgaaagtaatccactgtgtcgtcgtcttcaactgaaggatattattcccactcaaatgcaaaggcttactaagtacccacttctgttggataatattgccaaatacacagaatggccaacagaaagggagaaggtgaagaaagctgcagatcactgtcgtcagatcttaaattatgtaaatcaggctgtcaaggaggcagaaaacaagcagcgcctagaagattatcagcgtcgccttgatacctccagcctgaagttgtcagagtacccaaatgttgaagagctcaggaatttggatttaacaaaaaggaagatgattcatgaagggccattggtttggaaggtgaatagagataaaactattgatttatacacgttgctgctggaagacattcttgtattgttacaaaagcaggatgatagactggttttaaggtgtcatagtaagattctggcatctacagctgatagcaaacacacgtttagccctgtcattaagttgagtacagtgttggttcgacaagtggcaacagataacaaagctttattcgtcatttccatgtcagacaatggcgctcagatttatgaactggtggcacagacagtttctgaaaagactgtgtatgtatcagatatggctaccttgctatagctaatattttcattatcccaagcgtaatattccataaacttaactttgtttttataatgtatgga

SEQ ID NO: 439397 - DNA, 320 bp, Homo sapiens
ggctacctcaggaaacttctctattcccttcaggcagaaacgtagtatgggactgaccttggctgaaagcgagctgactaaacttgatgcagagcgagacaaggaccgattgactttggagaaggagcggacatgtgcagaacagattgttgccaaaattgaagaagtattgtaagtaatagaagtatatgtggaaatgccctctctgctgagatactagttatgcttgaagtgtcctttgggtaggtttagaaaaactgtcagattgtgtatgtggagccgtttattttgtcatagtacttgagaaactggattttttt

SEQ ID NO: 439398 - DNA, 812 bp, Homo sapiens
tcctgtaatcccagcactttgggaggccgagcgggcggattacgtaaggccaagagttcgagaccaagctggccaacatggtgaaaccccatctctactaaaaaccccaaaattagccaggcatggtggcactcctgtaatcccagctactcagaaggctgaggcacgagaatcacttgcgcccaggaggcggaggttgcagtgagccaggatcatgccattgcactccagcctgggtggcagagtgagactctgtctcaaaaaaattaattaaacttccatatttcatttttaaatttttttttcttttttttaaggatgactgctcaggctgtagaggaagataagaggtaacataactgttttttttcccctagaattttaagaaaaaaagaactatgtttttttcctttcagtcctaaattacaatttatttcttttaacttacaaatacagtttgtggtctctctctggtggcttgtatgttatttgactaatattctactgttgtcctgagtagaattctcttctctgtgcaatgactagttagttctttagtgtttgtttgatttatttcaataattccaaccttggggttttggaaatcatttgatgtctttattctaccaaccctcccttctcagaagtcttaatttacttcgtcctttctcctccagctccaccatgcagtatgttattctcatgtatatgaagcatttgggagtaaaagtgaaagagcctcgaaatttggagcacaaacggggtcggattggatttcttcccaaaatcaaggtaagaatgaaataatgtaa

SEQ ID NO: 439399 - DNA, 336 bp, Homo sapiens
ggtctggttgtgtcaagatcagacctttttaatggagaaccattgatattccacatagatatgcagttctgtgtattttgtcacttgaaatattgaaaggattctggttgtctgtcactttgtctggcttgtataagctcagtttcccattctcttttgtgttctttgcattcttggcacagttcagcggaccaggagaggagaaattgaaacatgctgctgctaccttttgcagtaaccaacctttcgccctggaaatgatcaaatctcgtcagaaaaaggattctcgatttcagacttttgtgcaatttgtgcaagtgagttgagtgagtcatg

SEQ ID NO: 439400 - DNA, 6530 bp, Homo sapiens
ttttttcccacagcaactgccaatgaaggatgaatcccctttttaaaaagttgttgttgttgttgtgtctttgatttcccaccacctccattagaccaagtgcaggaggaggaatgtgaagtagaaagggtgactgaacatgggacaccaaagccctttcgaaagtttgacagtgtagcttttggagaaagtcaaagtgaggatgaacaatttgaaaatgacttagagacagatccacccaactggcagcagcttgttagtcgagaagtgttactgggactaaaaccttgtgaaatcaaaagacaggaagtgattaatgaattgttctacactgaaagagctcatgttcgaacactgaaggttcttgatcaagtgttctatcagcgagtatccagagaaggaattctgtcaccctcagagctacggaaaattttttcaaacttggaagatattcttcaacttcatattggattgaatgaacaaatgaaggctgttcgaaagagaaatgagacctctgttatcgatcagattggggaagatttgctgacatggttcagcggaccaggagaggagaaattgaaacatgctgctgctaccttttgcagtaaccaacctttcgccctggaaatgatcaaatctcgtcagaaaaaggattctcgatttcagacttttgtgcaagatgctgaaagtaatccactgtgtcgtcgtcttcaactgaaggatattattcccactcaaatgcaaaggcttactaagtacccacttctgttggataatattgccaaatacacagaatggccaacagaaagggagaaggtgaagaaagctgcagatcactgtcgtcagatcttaaattatgtaaatcaggctgtcaaggaggcagaaaacaagcagcgcctagaagattatcagcgtcgccttgatacctccagcctgaagttgtcagagtacccaaatgttgaagagctcaggaatttggatttaacaaaaaggaagatgattcatgaagggccattggtttggaaggtgaatagagataaaactattgatttatacacgttgctgctggaagacattcttgtattgttacaaaagcaggatgatagactggttttaaggtgtcatagtaagattctggcatctacagctgatagcaaacacacgtttagccctgtcattaagttgagtacagtgttggttcgacaagtggcaacagataacaaagctttattcgtcatttccatgtcagacaatggcgctcagatttatgaactggtggcacagacagtttctgaaaagactgtctggcaggacctaatctgtcggatggctgcatcagtgaaggagcaatccacaaagccaattccattaccacagtcaacacctggcgaaggagataatgatgaagaagatccttcaaaattaaaagaggagcagcatggcatttcagtcactggtttgcagagtccagacagagatttgggattagaatctaccttaatatcgtcaaaacctcagtctcattcactgagtacctctgggaaatcagaggtacgtgatctgtttgtggctgagagacagtttgcaaaggaacaacatacagatgggacactaaaggaagttggagaagattatcaaatcgcaatcccagattcacacctgcctgtctcagaagaacggtgggcattggatgcactaagaaatttgggtttgttgaagcagttgctggtgcaacagctaggtttgactgagaagagcgttcaggaagactggcaacatttcccaagatacagaacagcctctcaggggccgcagacagacagtgtcatccagaactctgaaaatattaaggcctatcattctggtgaaggacatatgccctttagaactggaactggtgacattgcaacttgttacagtccacggacttcaactgaatcttttgctccacgggattcagtgggactggcaccccaggatagccaggcaagtaacattttagtaatggaccacatgattatgaccccagagatgcctaccatggagccagaagggggtcttgatgacagtggagagcacttttttgatgcccgtgaagcacatagtgatgagaatccatcagaaggtgatggagcagttaacaaggaagagaaggatgttaatttacgcatctcaggaaactatttgatccttgatggctatgacccagtgcaggagagttccacagatgaggaggttgcttcctcacttaccctgcagcccatgacaggcatccctgctgtggaatccacccaccagcagcaacattctcctcagaatactcactccgatggggcaatttcaccattcacccccgaatttctggtccagcagcgctggggagctatggagtattcctgttttgagatccagagtccctcctcttgtgcagattcacagagccagatcatggagtacattcataagatagaggctgaccttgaacacttaaagaaggtggaggaaagttacaccattctttgccaaaggctggctggatcagccctcacagacaagcactcagataaaagttagagccgcatgtcctggaggtgactgcaggttgttggatttggagtatcggccgtgtctcaccacatcctggctccagtgtggatgcagagagagtgtgacagaggatctgcctgtgaaccacctgggattagtcaagtcccaaggtgcccagagtgggactagttcttcacagtgtggcagctgcactaatctgtttgtgagggaatatccattccctcactctactctcctcactatcggaaattcattttgattcagaataaaaaccaaatgtatagagctttgggtgtaggatatgaaattgtacttagatttaagaaaaagagaaaatcagatgtatttatttgacttcattccgtatttgaaagcacattttaatttttatttgccttgttttgttttaattgagtagtgagagttttagacctttgtctttagtacacccaaggatcaactgctcctgaagcaaagaggtcaggatggagtatgcagaagttgggtagagaggttaagaagaggaggaagtgagacggggaagggaggagcaccttgcttcactatacagtattccaagctctctgctgtccagtaggctgcttctctgagggtcacctcaaaggtatgctatgccgtgtggctcttatgtgcccaggtggtgtggtcagagagtggatgggcttcctcccgccctgaggcaagcacctcttctctgtagctgggatcaaccacaattaataggaatcctcaacatactaaatagcaggcacttgaaaatgggtgtgttttcttccattgtcgtcttttctattgagggttgggatttgggtgggagaggaaagcaaattttattttcttgactataaatttgttattcttggtatcatttcatttttataattatacattagacattggcacttgtgtaaaactgtccctgcagattgagcaggaagtaaaaacaaatggaaatgcttcggatagtggcaggggtgggggttgctaaggaaagggtgggatgggagtgggtaaagagtttgggaaggttatctaactgaatcactactgagttgaatcatggctatcattagccacaggtactgctgattataaggccagtaaaattttagtacctggaggtttgactctaatttttgcactgatggtgccaaagggccctgagtcaaaaggatagccaagggtggagtggaaaaagatatggtgaaggcagaactgctcacaccagctccagaagcacgtcctctgacttcactgccgcagctctttccacacggggccgtgattgaccctaaaaattgcagaccagcacatacactggacactgcaggcaaggtgttggtaactgcctgctctaggatgaatagtagcgttagcagcaccctacagagggtaagtttcagaattgtaatttgagaactccttcaattatattgactttctttggttttccttgtgcattaggtatatattttttgaagtatttttgccaactaaaatgaagtctgtaaattctgttaataaacaaggagttcatccgttgctcacatctttcattggtgccctctgaactctgtgggttgctaggatgtaattttaatgcttccctgcagtccaaagatgattttttcaccacaaatggtaagggatgcccacctacttttataaacaccactgcaacttaacaagtttatttatctatgtccagatttctgtttctgtcctaaattgatctgtgtttttaggtggatcaacttggatctttagacctcatctataaattgaaattatatttttagtcataagccaagtacaatctaactcagaatgggattaaaaattttagaagcagaagctaatatataaatgaagtttgggatttggaactttctgtatctcttaggaggaacaagtaaaaaccaaatggttacattgtgctgctagaaataatgtcattctcaattaaaagggttacacctgtagccacttgacactaacaccatcgagggcaattaatcaggagaaaagtaaatataaaaactttgctcttaacgtcacacactacagggtaattatgtaattctctagcactcaattaagaagcttgtaggttagcaaaatttcagtttctctagttcagccagtgtcttgtccttagtaattatttgctttccctgcagttcaatttctccttggaactctaacaggactaactggaaaaatactttgaccatagctctagtacttccaaataaattcatatctagattttcaaacaaagccccaagatgaagtctaattctgaaaatatctcacaatttttgaatgttctttttatcttaccgacctaacttctcttttccctcccaacttggcctcccacacgttccatttcattttggccattatagtcacatccgtttgactttggttgtgacatcttcctttcaggatgatggaattagatgcagtctgtctttgagtgagactggtcaccatcagaggagttttttctaagtgacgtgactagaagttgaaatctacttccctgctaaagggcacaggggtggtgtacaaagaaagctaccttcccagagcaagcaggctgcattttagctatggaagtgacctgctgtgacactgtgctctcttctgtgggcttaatggttcctttgctatgaagtggcaaattacatgtagagtgtctccttccttttcagagaacagttaatcaaggcaaatcagcaagcccccaaagtgctgtaatttaacatcatgattaccaccttcgaagctatatattttgcatactttaaaatcacctaacttggactgcttgaattacattggcttttagaaccgaaattgtaactatgtattgtatttcatgggaggtatattttatgagctttttggctttcttttttcccacagcaactgccaatgaaggatgaatcccctttttaaaaagttgttgttgttgttgtttatttgattttgagttaggagggataatagagaagtccatttaaaaattatttttagaagctaaagaaagtaattatgcttcctgtgaattgtcttttactggcatctttgttttcctctttgatgttagtaaatttggtgtaatacgtggggcttccatatttcaaagtggaagctttcttctctgaagtcgatatatggttttgaattactagagctttggtcagtatttccttccctatatgtcacagagggcaccactgagaactgcgtgcataggacctcaaaatacaaaattagcagggcctcacagtcagcttcctcatggctagtttttcccccttatattacaatttttgttttataagtcatttttttcctgatatttccaccacttttcagagtcatctacaaaatttttctttcctcaagaaaagagttccttttgccttattccttatgccttccccactggtattgagggttttgataataaattggtaggaaaaaaaagtacctcctagaaggaagccttccccaccatttccaggtgccaactgctaagcagatatattccaaaaatggtaactgtcatgtgcacactgttggttatttttaataagcctcttcctactagaacattttattttccttgttcaccatacaatcatgtactctttaacagaaattgcttttaaaaaatatctggaactatctttaaaaaaactttattaataatcatgtatttttactgatcacattttgaaatgcctaaaagactttattgttctaattatccagatgtacctttgtaaaatagctcttttatgaattagctgataaggctgtatgtttctggaacaaaatattggtcatctaaaaactttctgttttctggggtctgggaaaatagaaaataagatttcaaatattaaataagcttaaaggaacca

SEQ ID NO: 439401 - DNA, 6850 bp, Homo sapiens
  misc_feature (3)..(3): n is a, c, g, or t
gcngccttttaaatgcttgatctgtatgaaattagtttttcattagaggaatatcttgcataaaactgtaatattacatgacagcaattggcaggagactaagggacactaattattataaaatttaattttattgtgttctgtagtttgtttcagacagggtcttgctctgttgcccaggctggaatgcagtggtgcagtcttggctcactgaagccttggcctcctggactcaggcagtccacccacctcagcctccctagcagctaggactataggtatatgccaccatacccagctaattctgtgttttgtaaagacaaggtctcgctgtgttgtcaggttggtccagatttcctgggctcaagtgctcctttctcagcctcccacagtgcagggattacaggcatgagccactatgcccagcctgtgttctgtagtttaaataagggtaggactgtttggtaactttccagatcatttaataacacaagatagcatactattttctcatgaggctcttcagaagcataaaagttggaaccattacaggaacgatagtaaaatgtttactaattgccacttctagtatgtgggcttatgtgttaactttttcggattttaagtgtttttgtaccatttcactaggtggtggttttggcagatttatttggtggctgttaaaatagacttttatgtcatatattaatacttcgtcaacaagcacgtaaatgtgcttattccccttagcttccaaagaatgagagttttctagagctgctaatactaaaagatgattctcttactaataagttgttaatatttagaccaagtctgagtagtacctggacttttcatgagtactatttcttagaactttctttgaaattagagccttggaactcagaagccactttcttatagacaagcatatgtaccatgctcatccagttattcataggaaaattaaaggatacgttgagaatctagtgactgaatgtttgtaacttgatcttcataatctgttatcatctgtttagagtgaggtttgaagatagtactcctgaatgttcttctgcaagataccttttcctttttagaaaattgtatgcagattactttaatatggcttttgtgccattttcaagaactgacaaatagcaataatgatagttgaatgtaaatggtgtattttatattaagaatttctttaaaagagactgtattatatagataatcatgttactgagtgcttggaaattatttgtgcatgattttctttattttgccagaatttggatttaacaaaaaggaagatgattcatgaagggccattggtttggaaggtgaatagagataaaactattgatttatacacgttgctgctggaagacattcttgtattgttacaaaagcaggatgatagactggttttaaggtgtcatagtaagattctggcatctacagctgatagcaaacacacgtttagccctgtcattaagttgagtacagtgttggttcgacaagtggcaacagataacaaagctttattcgtcatttccatgtcagacaatggcgctcagatttatgaactggtggcacagacagtttctgaaaagactgtctggcaggacctaatctgtcggatggctgcatcagtgaaggagcaatccacaaagccaattccattaccacagtcaacacctggcgaaggagataatgatgaagaagatccttcaaaattaaaagaggagcagcatggcatttcagtcactggtttgcagagtccagacagagatttgggattagaatctaccttaatatcgtcaaaacctcagtctcattcactgagtacctctgggaaatcagaggtacgtgatctgtttgtggctgagagacagtttgcaaaggaacaacatacagatgggacactaaaggaagttggagaagattatcaaatcgcaatcccagattcacacctgcctgtctcagaagaacggtgggcattggatgcactaagaaatttgggtttgttgaagcagttgctggtgcaacagctaggtttgactgagaagagcgttcaggaagactggcaacatttcccaagatacagaacagcctctcaggggccgcagacagacagtgtcatccagaactctgaaaatattaaggcctatcattctggtgaaggacatatgccctttagaactggaactggtgacattgcaacttgttacagtccacggacttcaactgaatcttttgctccacgggattcagtgggactggcaccccaggatagccaggcaagtaacattttagtaatggaccacatgattatgaccccagagatgcctaccatggagccagaagggggtcttgatgacagtggagagcacttttttgatgcccgtgaagcacatagtgatgagaatccatcagaaggtgatggagcagttaacaaggaagagaaggatgttaatttacgcatctcaggaaactatttgatccttgatggctatgacccagtgcaggagagttccacagatgaggaggttgcttcctcacttaccctgcagcccatgacaggcatccctgctgtggaatccacccaccagcagcaacattctcctcagaatactcactccgatggggcaatttcaccattcacccccgaatttctggtccagcagcgctggggagctatggagtattcctgttttgagatccagagtccctcctcttgtgcagattcacagagccagatcatggagtacattcataagatagaggctgaccttgaacacttaaagaaggtggaggaaagttacaccattctttgccaaaggctggctggatcagccctcacagacaagcactcagataaaagttagagccgcatgtcctggaggtgactgcaggttgttggatttggagtatcggccgtgtctcaccacatcctggctccagtgtggatgcagagagagtgtgacagaggatctgcctgtgaaccacctgggattagtcaagtcccaaggtgcccagagtgggactagttcttcacagtgtggcagctgcactaatctgtttgtgagggaatatccattccctcactctactctcctcactatcggaaattcattttgattcagaataaaaaccaaatgtatagagctttgggtgtaggatatgaaattgtacttagatttaagaaaaagagaaaatcagatgtatttatttgacttcattccgtatttgaaagcacattttaatttttatttgccttgttttgttttaattgagtagtgagagttttagacctttgtctttagtacacccaaggatcaactgctcctgaagcaaagaggtcaggatggagtatgcagaagttgggtagagaggttaagaagaggaggaagtgagacggggaagggaggagcaccttgcttcactatacagtattccaagctctctgctgtccagtaggctgcttctctgagggtcacctcaaaggtatgctatgccgtgtggctcttatgtgcccaggtggtgtggtcagagagtggatgggcttcctcccgccctgaggcaagcacctcttctctgtagctgggatcaaccacaattaataggaatcctcaacatactaaatagcaggcacttgaaaatgggtgtgttttcttccattgtcgtcttttctattgagggttgggatttgggtgggagaggaaagcaaattttattttcttgactataaatttgttattcttggtatcatttcatttttataattatacattagacattggcacttgtgtaaaactgtccctgcagattgagcaggaagtaaaaacaaatggaaatgcttcggatagtggcaggggtgggggttgctaaggaaagggtgggatgggagtgggtaaagagtttgggaaggttatctaactgaatcactactgagttgaatcatggctatcattagccacaggtactgctgattataaggccagtaaaattttagtacctggaggtttgactctaatttttgcactgatggtgccaaagggccctgagtcaaaaggatagccaagggtggagtggaaaaagatatggtgaaggcagaactgctcacaccagctccagaagcacgtcctctgacttcactgccgcagctctttccacacggggccgtgattgaccctaaaaattgcagaccagcacatacactggacactgcaggcaaggtgttggtaactgcctgctctaggatgaatagtagcgttagcagcaccctacagagggtaagtttcagaattgtaatttgagaactccttcaattatattgactttctttggttttccttgtgcattaggtatatattttttgaagtatttttgccaactaaaatgaagtctgtaaattctgttaataaacaaggagttcatccgttgctcacatctttcattggtgccctctgaactctgtgggttgctaggatgtaattttaatgcttccctgcagtccaaagatgattttttcaccacaaatggtaagggatgcccacctacttttataaacaccactgcaacttaacaagtttatttatctatgtccagatttctgtttctgtcctaaattgatctgtgtttttaggtggatcaacttggatctttagacctcatctataaattgaaattatatttttagtcataagccaagtacaatctaactcagaatgggattaaaaattttagaagcagaagctaatatataaatgaagtttgggatttggaactttctgtatctcttaggaggaacaagtaaaaaccaaatggttacattgtgctgctagaaataatgtcattctcaattaaaagggttacacctgtagccacttgacactaacaccatcgagggcaattaatcaggagaaaagtaaatataaaaactttgctcttaacgtcacacactacagggtaattatgtaattctctagcactcaattaagaagcttgtaggttagcaaaatttcagtttctctagttcagccagtgtcttgtccttagtaattatttgctttccctgcagttcaatttctccttggaactctaacaggactaactggaaaaatactttgaccatagctctagtacttccaaataaattcatatctagattttcaaacaaagccccaagatgaagtctaattctgaaaatatctcacaatttttgaatgttctttttatcttaccgacctaacttctcttttccctcccaacttggcctcccacacgttccatttcattttggccattatagtcacatccgtttgactttggttgtgacatcttcctttcaggatgatggaattagatgcagtctgtctttgagtgagactggtcaccatcagaggagttttttctaagtgacgtgactagaagttgaaatctacttccctgctaaagggcacaggggtggtgtacaaagaaagctaccttcccagagcaagcaggctgcattttagctatggaagtgacctgctgtgacactgtgctctcttctgtgggcttaatggttcctttgctatgaagtggcaaattacatgtagagtgtctccttccttttcagagaacagttaatcaaggcaaatcagcaagcccccaaagtgctgtaatttaacatcatgattaccaccttcgaagctatatattttgcatactttaaaatcacctaacttggactgcttgaattacattggcttttagaaccgaaattgtaactatgtattgtatttcatgggaggtatattttatgagctttttggctttcttttttcccacagcaactgccaatgaaggatgaatcccctttttaaaaagttgttgttgttgttgtttatttgattttgagttaggagggataatagagaagtccatttaaaaattatttttagaagctaaagaaagtaattatgcttcctgtgaattgtcttttactggcatctttgttttcctctttgatgttagtaaatttggtgtaatacgtggggcttccatatttcaaagtggaagctttcttctctgaagtcgatatatggttttgaattactagagctttggtcagtatttccttccctatatgtcacagagggcaccactgagaactgcgtgcataggacctcaaaatacaaaattagcagggcctcacagtcagcttcctcatggctagtttttcccccttatattacaatttttgttttataagtcatttttttcctgatatttccaccacttttcagagtcatctacaaaatttttctttcctcaagaaaagagttccttttgccttattccttatgccttccccactggtattgagggttttgataataaattggtaggaaaaaaaagtacctcctagaaggaagccttccccaccatttccaggtgccaactgctaagcagatatattccaaaaatggtaactgtcatgtgcacactgttggttatttttaataagcctcttcctactagaacattttattttccttgttcaccatacaatcatgtactctttaacagaaattgcttttaaaaaatatctggaactatctttaaaaaaactttattaataatcatgtatttttactgatcacattttgaaatgcctaaaagactttattgttctaattatccagatgtacctttgtaaaatagctcttttatgaattagctgataaggctgtatgtttctggaacaaaatattggtcatctaaaaactttctgttttctggggtctgggaaaatagaaaataagatttcaaatattaaataagcttaaaggaacca

SEQ ID NO: 439402 - DNA, 576 bp, Homo sapiens
cttggaacccatgaggctagttttacctctgtgagtttctgagttgtaatagagatacaatattatgcaatgatattctaaattattatttgacttgaaacttctgaactactcagctttgaattatttgatttctgtgaatctgatcttcagatttatggtataagctttatatctgccatgtaagcttctttaaaacatgccaaggtagagatgtagttgtgttctatttgtctttaaaaataaatatcaatatattttctattttagggcatttgatgtagaactactgtacatagcacagttctttaaaattccaatagcagaaattgctgtcaactggacagaaattgaaggttctaaattagttccattctggagctggctacaaatgggtaaagacctactttttatacgacttcgatatttgactggtgcctggaggcttgagcaaactcggaaaatgaattaggttgtttgcagtcttcagttgtgttcttatgcttcagtgtcacatttcatttcatttgaaactaaaattttaagtaaagctgaaataaacttcttgtcattgtc

SEQ ID NO: 439403 - DNA, 675 bp, Homo sapiens
cttggaacccatgaggctagttttacctctgtgagtttctgagttgtaatagagatacaatattatgcaatgatattctaaattattatttgacttgaaacttctgaactactcagctttgaattatttgatttctgtgaatctgatcttcagatttatggtataagctttatatctgccatgtaagcttctttaaaacatgccaaggtagagatgtagttgtgttctatttgtctttaaaaataaatatcaatatattttctattttagggcatttgatgtagaactactgtacatagcacagttctttaaaattccaatagcagaaattgctgtcaactggacagaaattgaaggttctaaattagttccattctggagctggctacaaatgggtaaagacctactttttatacgacttcgatatttgactggtgcctggaggcttgagcaaactcggaaaatgaattaggttgtttgcagtcttcagttgtgttcttatgcttcagtgtcacatttcatttcatttgaaactaaaattttaagtaaagctgaaataaacttcttgtcattgtcagccttttgataattttaaagaaataactttccataagtaaaaaattatatatctctttggatataaatgatttttaaaagatgtttatttaaaaagtc

SEQ ID NO: 439404 - DNA, 352 bp, Homo sapiens
acattctcattttataaatacattatggggggggggggccttcttgggctacagatgtcagactcttgtacatagcacagttctttaaaattccaatagcagaaattgctgtcaactggacagaaattgaaggttctaaattagttccattctggagctggctacaaatgggtaaagacctactttttatacgacttcgatatttgactggtgcctggaggcttgagcaaactcggaaaatgaattaggttgtttgcagtcttcagttgtgttcttatgcttcagtgtcacatttcatttcatttgaaactaaaattttaagtaaagctgaaataaacttcttgtcattgtc

SEQ ID NO: 439405 - DNA, 627 bp, Homo sapiens
  misc_feature (457)..(458): n is a, c, g, or t
  misc_feature (525)..(525): n is a, c, g, or t
gcgcttccgcctgtgtggaggtgcgggattgggcgggctgccacggcatggagaatggctccgcttctgttgcagctggcggtgctcggcgcggcgctggcggccgcagccctcgtactgaaacgagatcctgcgttcacttatgaagtgatagtagttgatgatggcagtaaagatcagacctcaaaggtagcttttaaatattgccagaaatatggaagtgacaaagtacgtgtgataaccctggtgaagaatcgtggaaaaggtggagcgattagaatgggtatattcagttctcgaggagaaaagatccttatggcagatgctgatggagccacaaagtttccagatgttgagaaattagaaaaggggctaaatgatctacagccttggcctaatcaaatggctatagcatgtggatctcgagctcatttagaaaaagaatcaattgctcagnnagcgttcttaacttcggtaccctcttctcaatggtatgggggttcccaccttttctgggtggtggtntcccctttggtggttcaaagggatatcagggggaccacaccagtgggtgggtttccaaattatttttacttcggaagaaagcagctttcaccggaccgtttt

SEQ ID NO: 439406 - DNA, 1098 bp, Homo sapiens
gcgcttccgcctgtgtggaggtgcgggattgggcgggctgccacggcatggagaatggctccgcttctgttgcagctggcggtgctcggcgcggcgctggcggccgcagccctcgtactgatttccatcgttgcatttacaactgctacaaaaatgccagcactccatcgacatgaagaagagaaattcttcttaaatgccaaaggccagaaagaaactttacccagcatatgggactcacctaccaaacaactttctgtcgttgtgccttcatacaatgaagaaaaacggttgcctgtgatgatggatgaagctctgagctatctagagaagagacagaaacgagatcctgcgttcacttatgaagtgatagtagttgatgatggcagtaaagatcagacctcaaaggtagcttttaaatattgccagaaatatggaagtgacaaagtacgtgtgataaccctggtgaagaatcgtggaaaaggtggagcgattagaatgggtatattcagttctcgaggagaaaagatccttatggcagatgctgatggagccacaaagtttccagatgttgagaaattagaaaaggggctaaatgatctacagccttggcctaatcaaatggctatagcatgtggatctcgagctcatttagaaaaagaatcaattgctcagccactttctggtgtggttcctttgtgtcaaaggaatcagggacacacagtgtgggttcaaattatttactcgagaagcagcttcacggacgttttcatctctacacgttgaacgatgggcatttgatgtagaactactgtacatagcacagttctttaaaattccaatagcagaaattgctgtcaactggacagaaattgaaggttctaaattagttccattctggagctggctacaaatgggtaaagacctactttttatacgacttcgatatttgactggtgcctggaggcttgagcaaactcggaaaatgaattaggttgtttgcagtcttcagttgtgttcttatgcttcagtgtcacatttcatttcatttgaaactaaaattttaagtaaagctgaaataaacttcttgtcattgtc

SEQ ID NO: 439407 - DNA, 1297 bp, Homo sapiens
cgccattctcctgcctcagcctcccgagtagctggaactacagacgcccgccaccgcgccccgctaattttttgtatttttagtacagacggggtttcaccgtgttagccaggatggtctcgatctcctgaccttgtgatccgcccgcctcgtcctcccaaagtgctgggattacaggcgtgagccacggcgctcggccgagaaacctgaactttctgtgcgctcattgtccgcaccacgttctgctctgcaggtcccggagctgagggctcctaagcatcaccttgtgttgtagactgtgtcgtgctcaaggctgccatctccctcctagatttccatcgttgcatttacaactgctacaaaaatgccagcactccatcgacatgaagaagagaaattcttcttaaatgccaaaggccagaaagaaactttacccagcatatgggactcacctaccaaacaactttctgtcgttgtgccttcatacaatgaagaaaaacggtaaacgagatcctgcgttcacttatgaagtgatagtagttgatgatggcagtaaagatcagacctcaaaggtagcttttaaatattgccagaaatatggaagtgacaaagtacgtgtgataaccctggtgaagaatcgtggaaaaggtggagcgattagaatgggtatattcagttctcgaggagaaaagatccttatggcagatgctgatggagccacaaagtttccagatgttgagaaattagaaaaggggctaaatgatctacagccttggcctaatcaaatggctatagcatgtggatctcgagctcatttagaaaaagaatcaattgctcagcgttcttacttccgtactcttctcatgtatgggttccactttctggtgtggttcctttgtgtcaaaggaatcagggacacacagtgtgggttcaaattatttactcgagaagcagcttcacggacgttttcatctctacacgttgaacgatgggcatttgatgtagaactactgtacatagcacagttctttaaaattccaatagcagaaattgctgtcaactggacagaaattgaaggttctaaattagttccattctggagctggctacaaatgggtaaagacctactttttatacgacttcgatatttgactggtgcctggaggcttgagcaaactcggaaaatgaattaggttgtttgcagtcttcagttgtgttcttatgcttcagtgtcacatttcatttcatttgaaactaaaattttaagtaaagctgaaataaacttcttgtcattgtc

SEQ ID NO: 439408 - DNA, 981 bp, Homo sapiens
gcgcttccgcctgtgtggaggtgcgggattgggcgggctgccacggcatggagaatggctccgcttctgttgcagctggcggtgctcggcgcggcgctggcggccgcagccctcgtactgatttccatcgttgcatttacaactgctacaaaaatgccagcactccatcgacatgaagaagagaaattcttcttaaatgccaaaggccagaaagaaactttacccagcatatgggactcacctaccaaacaactttctgtcgttgtgccttcatacaatgaagaaaaacggttgcctgtgatgatggatgaagctctgagctatctagagaagagacagaaacgagatcctgcgttcacttatgaagtgatagtagttgatgatggcagtaaagatcagacctcaaaggtagcttttaaatattgccagaaatatggaagtgacaaagtacgtgtgataaccctggtgaagaatcgtggaaaaggtggagcgattagaatgggtatattcagttctcgaggagaaaagatccttatggcagatgctgatggagccacaaagtttccagatgttgagaaattagaaaaggggctaaatgatctacagccttggcctaatcaaatggctatagcatgtggatctcgagctcatttagaaaaagaatcaattgctcagggcatttgatgtagaactactgtacatagcacagttctttaaaattccaatagcagaaattgctgtcaactggacagaaattgaaggttctaaattagttccattctggagctggctacaaatgggtaaagacctactttttatacgacttcgatatttgactggtgcctggaggcttgagcaaactcggaaaatgaattaggttgtttgcagtcttcagttgtgttcttatgcttcagtgtcacatttcatttcatttgaaactaaaattttaagtaaagctgaaataaacttcttgtcattgtc

SEQ ID NO: 439409 - DNA, 921 bp, Homo sapiens
gcgcttccgcctgtgtggaggtgcgggattgggcgggctgccacggcatggagaatggctccgcttctgttgcagctggcggtgctcggcgcggcgctggcggccgcagccctcgtactgatttccatcgttgcatttacaactgctacaaaaatgccagcactccatcgacatgaagaagagaaattcttcttaaatgccaaaggccagaaagaaactttacccagcatatgggactcacctaccaaacaactttctgtcgttgtgccttcatacaatgaagaaaaacggttgcctgtgatgatggatgaagctctgagctatctagagaagagacagaaacgagatcctgcgttcacttatgaagtgatagtagttgatgatggcagtaaagatcagacctcaaaggtagcttttaaatattgccagaaatatggaagtgacaaagtacgtgtgataaccctggtgaagaatcgtggaaaaggtggagcgattagaatgggtatattcagttctcgaggagaaaagatccttatggcagatgctgatggagccacaaagtttccagatgttgagaaattagaaaaggggctaaatgatctacagccttggcctggcatttgatgtagaactactgtacatagcacagttctttaaaattccaatagcagaaattgctgtcaactggacagaaattgaaggttctaaattagttccattctggagctggctacaaatgggtaaagacctactttttatacgacttcgatatttgactggtgcctggaggcttgagcaaactcggaaaatgaattaggttgtttgcagtcttcagttgtgttcttatgcttcagtgtcacatttcatttcatttgaaactaaaattttaagtaaagctgaaataaacttcttgtcattgtc

SEQ ID NO: 439410 - DNA, 1133 bp, Homo sapiens
gcgcttccgcctgtgtggaggtgcgggattgggcgggctgccacggcatggagaatggctccgcttctgttgcagctggcggtgctcggcgcggcgctggcggccgcagccctcgtactgatttccatcgttgcatttacaactgctacaaaaatgccagcactccatcgacatgaagaagagaaattcttcttaaatgccaaaggccagaaagaaactttacccagcatatgggactcacctaccaaacaactttctgtcgttgtgccttcatacaatgaagaaaaacggttgcctgtgatgatggatgaagctctgagctatctagagaagagacagaaacgagatcctgcgttcacttatgaagtgatagtagttgatgatggcagtaaagatcagacctcaaaggtagcttttaaatattgccagaaatatggaagtgacaaagtacgtgtgataaccctggtgaagaatcgtggaaaaggtggagcgattagaatgggtatattcagttctcgaggagaaaagatccttatggcagatgctgatggagccacaaagtttccagatgttgagaaattagaaaaggggctaaatgatctacagccttggcctaatcaaatggctatagcatgtggatctcgagctcatttagaaaaagaatcaattgctcagcgttcttacttccgtactcttctcatgtatgggttccactttctggtgtggttcctttgtgtcaaaggaatcagggacacacagtgtgggttcaaattatttactcgagaagcagcttcacggacgttttcatctctacacgttgaacgatgggcatttgatgtagaactactgtacatagcacagttctttaaaattccaatagcagaaattgctgtcaactggacagaaattgaaggttctaaattagttccattctggagctggctacaaatgggtaaagacctactttttatacgacttcgatatttgactggtgcctggaggcttgagcaaactcggaaaatgaattaggttgtttgcagtcttcagttgtgttcttatgcttcagtgtcacatttcatttcatttgaaactaaaattttaagtaaagctgaaataaacttcttgtcattgtc

SEQ ID NO: 439411 - DNA, 1232 bp, Homo sapiens
gcgcttccgcctgtgtggaggtgcgggattgggcgggctgccacggcatggagaatggctccgcttctgttgcagctggcggtgctcggcgcggcgctggcggccgcagccctcgtactgatttccatcgttgcatttacaactgctacaaaaatgccagcactccatcgacatgaagaagagaaattcttcttaaatgccaaaggccagaaagaaactttacccagcatatgggactcacctaccaaacaactttctgtcgttgtgccttcatacaatgaagaaaaacggttgcctgtgatgatggatgaagctctgagctatctagagaagagacagaaacgagatcctgcgttcacttatgaagtgatagtagttgatgatggcagtaaagatcagacctcaaaggtagcttttaaatattgccagaaatatggaagtgacaaagtacgtgtgataaccctggtgaagaatcgtggaaaaggtggagcgattagaatgggtatattcagttctcgaggagaaaagatccttatggcagatgctgatggagccacaaagtttccagatgttgagaaattagaaaaggggctaaatgatctacagccttggcctaatcaaatggctatagcatgtggatctcgagctcatttagaaaaagaatcaattgctcagcgttcttacttccgtactcttctcatgtatgggttccactttctggtgtggttcctttgtgtcaaaggaatcagggacacacagtgtgggttcaaattatttactcgagaagcagcttcacggacgttttcatctctacacgttgaacgatgggcatttgatgtagaactactgtacatagcacagttctttaaaattccaatagcagaaattgctgtcaactggacagaaattgaaggttctaaattagttccattctggagctggctacaaatgggtaaagacctactttttatacgacttcgatatttgactggtgcctggaggcttgagcaaactcggaaaatgaattaggttgtttgcagtcttcagttgtgttcttatgcttcagtgtcacatttcatttcatttgaaactaaaattttaagtaaagctgaaataaacttcttgtcattgtcagccttttgataattttaaagaaataactttccataagtaaaaaattatatatctctttggatataaatgatttttaaaagatgtttatttaaaaagtc

SEQ ID NO: 439412 - DNA, 779 bp, Homo sapiens
cgctttagaaaattattagttgtgatgctggcagtaaacgatcagacctcaaaggtagcttttaaatattgccagaaatatggaagtgacaaagtacgtgtgataaccctggtgaagaatcgtggaaaaggtggagcgattagaatgggtatattcagttctcgaggagaaaagatccttatggcagatgctgatggagccacaaagtttccagatgttgagaaattagaaaaggggctaaatgatctacagccttggcctaatcaaatggctatagcatgtggatctcgagctcatttagaaaaagaatcaattgctcagcgttcttacttccgtactcttctcatgtatgggttccactttctggtgtggttcctttgtgtcaaaggaatcagggacacacagtgtgggttcaaattatttactcgagaagcagcttcacggacgttttcatctctacacgttgaacgatgggcatttgatgtagaactactgtacatagcacagttctttaaaattccaatagcagaaattgctgtcaactggacagaaattgaaggttctaaattagttccattctggagctggctacaaatgggtaaagacctactttttatacgacttcgatatttgactggtgcctggaggcttgagcaaactcggaaaatgaattaggttgtttgcagtcttcagttgtgttcttatgcttcagtgtcacatttcatttcatttgaaactaaaattttaagtaaagctgaaataaacttcttgtcattgtc

SEQ ID NO: 439413 - DNA, 1019 bp, Homo sapiens
gcgcttccgcctgtgtggaggtgcgggattgggcgggctgccacggcatggagaatggctccgcttctgttgcagctggcggtgctcggcgcggcgctggcggccgcagccctcgtactgatttccatcgttgcatttacaactgctacaaaaatgccagcactccatcgacatgaagaagagaaattcttcttaaatgccaaaggccagaaagaaactttacccagcatatgggactcacctaccaaacaactttctgtcgttgtgccttcatacaatgaagaaaaacggttgcctgtgatgatggatgaagctctgagctatctagagaagagacagaaacgagatcctgcgttcacttatgaagtgatagtagttgatgatggcagtaaagatcagacctcaaaggtagcttttaaatattgccagaaatatggaagtgacaaagtacgtgtgataaccctggtgaagaatcgtggaaaaggtggagcgattagaatgaatcaaatggctatagcatgtggatctcgagctcatttagaaaaagaatcaattgctcagcgttcttacttccgtactcttctcatgtatgggttccactttctggtgtggttcctttgtgtcaaaggaatcagggacacacagtgtgggttcaaattatttactcgagaagcagcttcacggacgttttcatctctacacgttgaacgatgggcatttgatgtagaactactgtacatagcacagttctttaaaattccaatagcagaaattgctgtcaactggacagaaattgaaggttctaaattagttccattctggagctggctacaaatgggtaaagacctactttttatacgacttcgatatttgactggtgcctggaggcttgagcaaactcggaaaatgaattaggttgtttgcagtcttcagttgtgttcttatgcttcagtgtcacatttcatttcatttgaaactaaaattttaagtaaagctgaaataaacttcttgtcattgtc

SEQ ID NO: 439414 - DNA, 574 bp, Homo sapiens
  misc_feature (454)..(454): n is a, c, g, or t
  misc_feature (456)..(457): n is a, c, g, or t
  misc_feature (538)..(538): n is a, c, g, or t
  misc_feature (574)..(574): n is a, c, g, or t
gcgcttccgcctgtgtggaggtgcgggattgggcgggctgccacggcatggagaatggctccgcttctgttgcagctggcggtgctcggcgcggcgctggcggccgcagccctcgtactgatttccatcgttgcatttacaactgctacaaaaatgccagcactccatcgacatgaagaagagaaattcttcttaaatgccaaaggccagaaagaaactttacccagcatatgggactcacctaccaaacaactttctgtcgttgtgccttcatacaatgaagaaaaacggttgcctgtgatgatggatgaagctctgagctatgctagatgaagggagggggaatccaagggtaaagaacaacgcccggggaggggggaaaatttaaagccaacttttggggggcaacccggggctttgtgtttgcggggcccccaaagggggggccctcttngnnaataaaattgtttatctcattgtcatacacaggccttttcagtttcctgctaacagattcaggttagataaggattacagnaagtgatactcccaagttcctctctataacagtcgn

SEQ ID NO: 439415 - DNA, 179 bp, Homo sapiens
tagttattgggctgtatttccacctatctccttctatcctgtcctgcatgaagaaagggacttcatgactgttctttgctgaatttgttatgttctaggcctgtcatgtcataacctttccagaattgttttttttctttggtttggttttggtattgagacagagtctcactgtcacc

SEQ ID NO: 439416 - DNA, 892 bp, Homo sapiens
gagtctctagagacaaggatctgattgcaggtggagaggggatgttgagacaggggcaggagactgcctgtgagagagggatgatctcaagaagagacctggcacaggaaaccaaaaggaggcaactgtagggaatgaaacttaagggtctgggaaagcgctgtaaaaggagagaggacctggagatccgctttatcctcatccagaaccgggcaggcaagacgcgcctggccaagtggtacatgcagtttgatgatgatgagaaacagaagctgatcgaggaggtgcatgccgtggtcaccgtccgagacgccaaacacaccaactttgtggagttccggaactttaagatcatttaccgccgctatgctggcctctacttctgcatctgtgtggatgtcaatgacaacaacctggcttacctggaggccattcacaacttcgtggaggtcttaaacgaatatttccacaatgtctgtgaactggacctggtgttcaacttctacaaggtttacacggtcgtggacgagatgttcctggctggcgaaatccgagagaccagccagacgaaggtgctgaaacagctgctgatgctacagtccctggagtgagggcaggcgagccccaccccggccccggcccctcctggactcgcctgctcgcttccccttcccaggcccgtggccaacccagcagtccttccctcagctgcctaggaggaagggacccagctgggtctgggccacaagggaggagactgcaccccactgcctctgggccctggctgtgggcagaggccaccgtgtgtgtcccgagtaaccgtgccgttgtcgtgtgatgccataagcgtctgtgcgtggagtccccaataaacctgtggtcctgcctggcc

SEQ ID NO: 439417 - DNA, 362 bp, Homo sapiens
tgtaatggttggggttagtgtcctactcatcatccagagtgtgatgctggtcgtccttttccctcagagcagtgacagcattagtgccccgcggacccaggattcaggcattgccccagggtgtggtagtcgcttccccttcccaggcccgtggccaacccagcagtccttccctcagctgcctaggaggaagggacccagctgggtctgggccacaagggaggagactgcaccccactgcctctgggccctggctgtgggcagaggccaccgtgtgtgtcccgagtaaccgtgccgttgtcgtgtgatgccataagcgtctgtgcgtggagtccccaataaacctgtggtcctgcctggcc

SEQ ID NO: 439418 - DNA, 912 bp, Homo sapiens
gactggctctgactcttcacccatcttcacccaggctggcccctttggtgaaactacaactcccaggggtctgtgcgcgagaaggcaggcgggtttttctaccggaagtccgctctagctctgggccctacaactgcaccctgagccggagctgcccagtcgccgcgggaccggggccgctggggtctggacgggggtcgccatgatccgctttatcctcatccagaaccgggcaggcaagacgcgcctggccaagtggtacatgcagtttgatgatgatgagaaacagaagctgatcgaggaggtgcatgccgtggtcaccgtccgagacgccaaacacaccaactttgtggagttccggaactttaagatcatttaccgccgctatgctggcctctacttctgcatctgtgtggatgtcaatgacaacaacctggcttacctggaggccattcacaacttcgtggaggtcttaaacgaatatttccacaatgtctgtgaactggacctggtgttcaacttctacaaggtttacacggtcgtggacgagatgttcctggctggcgaaatccgagagaccagccagacgaaggtgctgaaacagctgctgatgctacagtccctggagtgagggcaggcgagccccaccccggccccggcccctcctggactcgcctgctcgcttccccttcccaggcccgtggccaacccagcagtccttccctcagctgcctaggaggaagggacccagctgggtctgggccacaagggaggagactgcaccccactgcctctgggccctggctgtgggcagaggccaccgtgtgtgtcccgagtaaccgtgccgttgtcgtgtgatgccataagcgtctgtgcgtggagtccccaataaacctgtggtcctgcctggcc

SEQ ID NO: 439419 - DNA, 1186 bp, Homo sapiens
ggcccctgggcgcgcgccgcgaagggacaaccagcgaggcagtgggaagaggtcagagcgcgtgcgcacccgaggggcttactgccacagccgctgcctgaggctggagtgcagtggcacgatctcggctcactgcaacctccatctccagggttcaagtgcttctcctgcctcagcctcccaagtagctggtattacaggctggcccctttggtgaaactacaactcccaggggtctgtgcgcgagaaggcaggcgggtttttctaccggaagtccgctctagctctgggccctacaactgcaccctgagccggagctgcccagtcgccgcgggaccggggccgctggggtctggacgggggtcgccatggtaacgggggagcgctacgccggggactggcggagggggggcccacgcgtaaatagccgaggctggatcgggcgctgacaagtcccttctctgccgcggatggtctggatccgctttatcctcatccagaaccgggcaggcaagacgcgcctggccaagtggtacatgcagtttgatgatgatgagaaacagaagctgatcgaggaggtgcatgccgtggtcaccgtccgagacgccaaacacaccaactttgtggagttccggaactttaagatcatttaccgccgctatgctggcctctacttctgcatctgtgtggatgtcaatgacaacaacctggcttacctggaggccattcacaacttcgtggaggtcttaaacgaatatttccacaatgtctgtgaactggacctggtgttcaacttctacaaggtttacacggtcgtggacgagatgttcctggctggcgaaatccgagagaccagccagacgaaggtgctgaaacagctgctgatgctacagtccctggagtgagggcaggcgagccccaccccggccccggcccctcctggactcgcctgctcgcttccccttcccaggcccgtggccaacccagcagtccttccctcagctgcctaggaggaagggacccagctgggtctgggccacaagggaggagactgcaccccactgcctctgggccctggctgtgggcagaggccaccgtgtgtgtcccgagtaaccgtgccgttgtcgtgtgatgccataagcgtctgtgcgtggagtccccaataaacctgtggtcctgcctggcc

SEQ ID NO: 439420 - DNA, 894 bp, Homo sapiens
ttttggtaaagcttccccagcaacgtcagctagagttgcaaatcactgctcaacagaacctcttacgaagcaaagacataaagaaaaataagccgggcagagtgggtcatgcctgtaatcccagcactttgggaggctgaggcaggcggatcacataaggtcaggagttcgagaccagcctggccaacgtggtgagaccccgtctctactaaaaatacaaaaataagccaggtacgtggggtaggaggtcgtggggtaggaggtcctcctaccccacatcgaggaggtgcatgccgtggtcaccgtccgagacgccaaacacaccaactttgtggagttccggaactttaagatcatttaccgccgctatgctggcctctacttctgcatctgtgtggatgtcaatgacaacaacctggcttacctggaggccattcacaacttcgtggaggtcttaaacgaatatttccacaatgtctgtgaactggacctggtgttcaacttctacaaggtttacacggtcgtggacgagatgttcctggctggcgaaatccgagagaccagccagacgaaggtgctgaaacagctgctgatgctacagtccctggagtgagggcaggcgagccccaccccggccccggcccctcctggactcgcctgctcgcttccccttcccaggcccgtggccaacccagcagtccttccctcagctgcctaggaggaagggacccagctgggtctgggccacaagggaggagactgcaccccactgcctctgggccctggctgtgggcagaggccaccgtgtgtgtcccgagtaaccgtgccgttgtcgtgtgatgccataagcgtctgtgcgtggagtccccaataaacctgtggtcctgcctggcc

SEQ ID NO: 439421 - DNA, 1374 bp, Homo sapiens
ggcccctgggcgcgcgccgcgaagggacaaccagcgaggcagtgggaagaggtcagagcgcgtgcgcacccgaggggcttactgccacagccgctgcctgaggctggagtgcagtggcacgatctcggctcactgcaacctccatctccagggttcaagtgcttctcctgcctcagcctcccaagtagctggtattacaggctggcccctttggtgaaactacaactcccaggggtctgtgcgcgagaaggcaggcgggtttttctaccggaagtccgctctagctctgggccctacaactgcaccctgagccggagctgcccagtcgccgcgggaccggggccgctggggtctggacgggggtcgccatgatccgctttatcctcatccagaaccgggcaggcaagacgcgcctggccaagtggtacatgcagtttgatgatgatgagaaacagaagctgatcgaggaggtgcatgccgtggtcaccgtccgagacgccaaacacaccaactttgtggagttccggaactttaagatcatttaccgccgctatgctggcctctacttctgcatctgtgtggatgtcaatgacaacaacctggcttacctggaggccattcacaacttcgtggaggtcttaaacgaatatttccacaatgtctgtgaactggacctggtgttcaacttctacaaggtttacacggtcgtggacgagatgttcctggctggcgaaatccgagagaccagccagacgaaggtgctgaaacagctgctgatgctacagtccctggagtgagggcaggcgagccccaccccggccccggcccctcctggactcgcctgctcgcttccccttcccaggcccgtggccaacccagcagtccttccctcagctgcctaggaggaagggacccagctgggtctgggccacaagggaggagactgcaccccactgcctctgggccctggctgtgggcagaggccaccgtgtgtgtcccgagtaaccgtgccgttgtcgtgtgatgccataagcgtctgtgcgtggagtccccaataaacctgtggtcctgcctggcccaaaaaaaaaaaaaaaatgggctcttggccaacgggtggagccttggggccgttcctttagtgagggtaattctgatcctcgtttcgtattccttgccgtcggacgtctgctgcggaaacggttttatctactcaaggcgggatgtcggtttcccgagagcaaggatacccgagaaagaattttgtgcaaaggcgcacgaatgcgggaacctagcagccggggtgtagggtgttcttagtgtccgaccctgctagtttcaaatttcactcgtagtataggtcgtaactcccaggtt

SEQ ID NO: 439422 - DNA, 928 bp, Homo sapiens
ggcccctgggcgcgcgccgcgaagggacaaccagcgaggcagtgggaagaggtcagagcgcgtgcgcacccgaggggcttactgccacagccgctgcctgaggctggagtgcagtggcacgatctcggctcactgcaacctccatctccagggttcaagtgcttctcctgcctcagcctcccaagtagctggtattacaggctggcccctttggtgaaactacaactcccaggggtctgtgcgcgagaaggcaggcgggtttttctaccggaagtccgctctagctctgggccctacaactgcaccctgagccggagctgcccagtcgccgcgggaccggggccgctggggtctggacgggggtcgccatgttccggaactttaagatcatttaccgccgctatgctggcctctacttctgcatctgtgtggatgtcaatgacaacaacctggcttacctggaggccattcacaacttcgtggaggtcttaaacgaatatttccacaatgtctgtgaactggacctggtgttcaacttctacaaggtttacacggtcgtggacgagatgttcctggctggcgaaatccgagagaccagccagacgaaggtgctgaaacagctgctgatgctacagtccctggagtgagggcaggcgagccccaccccggccccggcccctcctggactcgcctgctcgcttccccttcccaggcccgtggccaacccagcagtccttccctcagctgcctaggaggaagggacccagctgggtctgggccacaagggaggagactgcaccccactgcctctgggccctggctgtgggcagaggccaccgtgtgtgtcccgagtaaccgtgccgttgtcgtgtgatgccataagcgtctgtgcgtggagtccccaataaacctgtggtcctgcctggcc

SEQ ID NO: 439423 - DNA, 798 bp, Homo sapiens
gactggctctgactcttcacccatcttcacccaggctggcccctttggtgaaactacaactcccaggggtctgtgcgcgagaaggcaggcgggtttttctaccggaagtccgctctagctctgggccctacaactgcaccctgagccggagctgcccagtcgccgcgggaccggggccgctggggtctggacgggggtcgccatgatccgctttatcctcatccagaaccgggcaggcaagacgcgcctggccaagtggtacatgcagtttgatgatgatgagaaacagaagctgatcgaggaggtgcatgccgtggtcaccgtccgagacgccaaacacaccaactttgtggaggtcttaaacgaatatttccacaatgtctgtgaactggacctggtgttcaacttctacaaggtttacacggtcgtggacgagatgttcctggctggcgaaatccgagagaccagccagacgaaggtgctgaaacagctgctgatgctacagtccctggagtgagggcaggcgagccccaccccggccccggcccctcctggactcgcctgctcgcttccccttcccaggcccgtggccaacccagcagtccttccctcagctgcctaggaggaagggacccagctgggtctgggccacaagggaggagactgcaccccactgcctctgggccctggctgtgggcagaggccaccgtgtgtgtcccgagtaaccgtgccgttgtcgtgtgatgccataagcgtctgtgcgtggagtccccaataaacctgtggtcctgcctggcc

SEQ ID NO: 439424 - DNA, 300 bp, Homo sapiens
gtctccttgcctctctccctgtcactgtctctctctctcccctgcctcccccttggtctctttttttgctgtctctttctgatgaccttgttcccatctctgtgcgtgtgtggctctctccctgcccatctcttaccatctctgccttcctctcccaggtcttaaacgaatatttccacaatgtctgtgaactggacctggtgttcaacttctacaaggtaggctcctggtgaagaggaggctgaaggagccagaggagggggacgggggggacccgtggtgcactagccacccggagcc

SEQ ID NO: 439425 - DNA, 1078 bp, Homo sapiens
ggcccctgggcgcgcgccgcgaagggacaaccagcgaggcagtgggaagaggtcagagcgcgtgcgcacccgaggggcttactgccacagccgctgcctgaggctggagtgcagtggcacgatctcggctcactgcaacctccatctccagggttcaagtgcttctcctgcctcagcctcccaagtagctggtattacaggctggcccctttggtgaaactacaactcccaggggtctgtgcgcgagaaggcaggcgggtttttctaccggaagtccgctctagctctgggccctacaactgcaccctgagccggagctgcccagtcgccgcgggaccggggccgctggggtctggacgggggtcgccatgatccgctttatcctcatccagaaccgggcaggcaagacgcgcctggccaagtggtacatgcagtttgatgatgatgagaaacagaagctgatcgaggaggtgcatgccgtggtcaccgtccgagacgccaaacacaccaactttgtggagttccggaactttaagatcatttaccgccgctatgctggcctctacttctgcatctgtgtggatgtcaatgacaacaacctggcttacctggaggccattcacaacttcgtggaggtcttaaacgaatatttccacaatgtctgtgaactggacctggtgttcaacttctacaaggtttacacggtcgtggacgagatgttcctggctggcgaaatccgagagaccagccagacgaaggtgctgaaacagctgctgatgctacagtccctggagtgagggcaggcgagccccaccccggccccggcccctcctggactcgcctgctcgcttccccttcccaggcccgtggccaacccagcagtccttccctcagctgcctaggaggaagggacccagctgggtctgggccacaagggaggagactgcaccccactgcctctgggccctggctgtgggcagaggccaccgtgtgtgtcccgagtaaccgtgccgttgtcgtgtgatgccataagcgtctgtgcgtggagtccccaataaacctgtggtcctgcctggcc

SEQ ID NO: 439426 - DNA, 1168 bp, Homo sapiens
  misc_feature (1092)..(1096): n is a, c, g, or t
  misc_feature (1099)..(1128): n is a, c, g, or t
  misc_feature (1131)..(1132): n is a, c, g, or t
  misc_feature (1143)..(1143): n is a, c, g, or t
  misc_feature (1145)..(1145): n is a, c, g, or t
  misc_feature (1148)..(1148): n is a, c, g, or t
  misc_feature (1150)..(1150): n is a, c, g, or t
ggcccctgggcgcgcgccgcgaagggacaaccagcgaggcagtgggaagaggtcagagcgcgtgcgcacccgaggggcttactgccacagccgctgcctgaggctggagtgcagtggcacgatctcggctcactgcaacctccatctccagggttcaagtgcttctcctgcctcagcctcccaagtagctggtattacaggctggcccctttggtgaaactacaactcccaggggtctgtgcgcgagaaggcaggcgggtttttctaccggaagtccgctctagctctgggccctacaactgcaccctgagccggagctgcccagtcgccgcgggaccggggccgctggggtctggacgggggtcgccatgatccgctttatcctcatccagaaccgggcaggcaagacgcgcctggccaagtggtacatgcagtttgatgatgatgagaaacagaagctgatcgaggaggtgcatgccgtggtcaccgtccgagacgccaaacacaccaactttgtggagttccggaactttaagatcatttaccgccgctatgctggcctctacttctgcatctgtgtggatgtcaatgacaacaacctggcttacctggaggccattcacaacttcgtggaggtcttaaacgaatatttccacaatgtctgtgaactggacctggtgttcaacttctacaaggtttacacggtcgtggacgagatgttcctggctggcgaaatccgagagaccagccagacgaaggtgctgaaacagctgctgatgctacagtccctggagtgagggcaggcgagccccaccccggccccggcccctcctggactcgcctgctcgcttccccttcccaggcccgtggccaacccagcagtccttccctcagctgcctaggaggaagggacccagctgggtctgggccacaagggaggagactgcaccccactgcctctgggccctggctgtgggcagaggccaccgtgtgtgtcccgagtaaccgtgccgttgtcgtgtgatgccataagcgtctgtgcgtggagtccccaataaacctgtggtcctgcctggccaaaaaaaaaagtannnnncannnnnnnnnnnnnnnnnnnnnnnnnnnnnnagnntgtaaaatttntnttntntttttttttttttttttt

SEQ ID NO: 439427 - DNA, 645 bp, Homo sapiens
acgccatgagacccgtacgacgaagcgtatcgaggaggtgcatgccgtggtcaccgtccgagacgccaaacacaccaactttgtggagttccggaactttaagatcatttaccgccgctatgctggcctctacttctgcatctgtgtggatgtcaatgacaacaacctggcttacctggaggccattcacaacttcgtggaggtcttaaacgaatatttccacaatgtctgtgaactggacctggtgttcaacttctacaaggtttacacggtcgtggacgagatgttcctggctggcgaaatccgagagaccagccagacgaaggtgctgaaacagctgctgatgctacagtccctggagtgagggcaggcgagccccaccccggccccggcccctcctggactcgcctgctcgcttccccttcccaggcccgtggccaacccagcagtccttccctcagctgcctaggaggaagggacccagctgggtctgggccacaagggaggagactgcaccccactgcctctgggccctggctgtgggcagaggccaccgtgtgtgtcccgagtaaccgtgccgttgtcgtgtgatgccataagcgtctgtgcgtggagtccccaataaacctgtggtcctgcctggcc

SEQ ID NO: 439428 - DNA, 954 bp, Homo sapiens
gactggctctgactcttcacccatcttcacccaggctggcccctttggtgaaactacaactcccaggggtctgtgcgcgagaaggcaggcgggtttttctaccggaagtccgctctagctctgggccctacaactgcaccctgagccggagctgcccagtcgccgcgggaccggggccgctggggtctggacgggggtcgccatgatccgctttatcctcatccagaaccgggcaggcaagacgcgcctggccaagtggtacatgcagtttgatgatgatgagaaacagaagctgatcgaggaggtgcatgccgtggtcaccgtccgagacgccaaacacaccaactttgtggaggtcctggcaagctccgttgctgacagcctctctgttctgcagttccggaactttaagatcatttaccgccgctatgctggcctctacttctgcatctgtgtggatgtcaatgacaacaacctggcttacctggaggccattcacaacttcgtggaggtcttaaacgaatatttccacaatgtctgtgaactggacctggtgttcaacttctacaaggtttacacggtcgtggacgagatgttcctggctggcgaaatccgagagaccagccagacgaaggtgctgaaacagctgctgatgctacagtccctggagtgagggcaggcgagccccaccccggccccggcccctcctggactcgcctgctcgcttccccttcccaggcccgtggccaacccagcagtccttccctcagctgcctaggaggaagggacccagctgggtctgggccacaagggaggagactgcaccccactgcctctgggccctggctgtgggcagaggccaccgtgtgtgtcccgagtaaccgtgccgttgtcgtgtgatgccataagcgtctgtgcgtggagtccccaataaacctgtggtcctgcctggcc

SEQ ID NO: 439429 - DNA, 640 bp, Homo sapiens
aaggagtgaatgttttggccccactctgtctggcacgttaggtcctggcaagctccgttgctgacagcctctctgttctgcagttccggaactttaagatcatttaccgccgctatgctggcctctacttctgcatctgtgtggatgtcaatgacaacaacctggcttacctggaggccattcacaacttcgtggaggtcttaaacgaatatttccacaatgtctgtgaactggacctggtgttcaacttctacaaggtttacacggtcgtggacgagatgttcctggctggcgaaatccgagagaccagccagacgaaggtgctgaaacagctgctgatgctacagtccctggagtgagggcaggcgagccccaccccggccccggcccctcctggactcgcctgctcgcttccccttcccaggcccgtggccaacccagcagtccttccctcagctgcctaggaggaagggacccagctgggtctgggccacaagggaggagactgcaccccactgcctctgggccctggctgtgggcagaggccaccgtgtgtgtcccgagtaaccgtgccgttgtcgtgtgatgccataagcgtctgtgcgtggagtccccaataaacctgtggtcctgcctggcc

SEQ ID NO: 439430 - DNA, 840 bp, Homo sapiens
gactggctctgactcttcacccatcttcacccaggctggcccctttggtgaaactacaactcccaggggtctgtgcgcgagaaggcaggcgggtttttctaccggaagtccgctctagctctgggccctacaactgcaccctgagccggagctgcccagtcgccgcgggaccggggccgctggggtctggacgggggtcgccatgatccgctttatcctcatccagaaccgggcaggcaagacgcgcctggccaagtggtacatgcagtttgatgatgatgagaaacagaagctgatcgaggaggtgcatgccgtggtcaccgtccgagacgccaaacacaccaactttgtggagttccggaactttaagatcatttaccgccgctatgctggcctctacttctgcatctgtgtggatgtcaatgacaacaacctggcttacctggaggccattcacaacttcgtggaggtcttaaacgaatatttccacaatgtctgtgaactggacctggtgttcaacttctacaaggtttacacggtcgtggacgagatgttcctggctggcgaaatccgagagaccagccagacgaaggtgctgaaacagctgtcgcttccccttcccaggcccgtggccaacccagcagtccttccctcagctgcctaggaggaagggacccagctgggtctgggccacaagggaggagactgcaccccactgcctctgggccctggctgtgggcagaggccaccgtgtgtgtcccgagtaaccgtgccgttgtcgtgtgatgccataagcgtctgtgcgtggagtccccaataaacctgtggtcctgcctggcc

SEQ ID NO: 439431 - DNA, 1669 bp, Homo sapiens
agtgtgggcgcgtaataggaatcaccctcctactgcgcgttttcaaagaccaagcgctgggcgctcccgggccgcgcgtctgcgttaggcagggcagggtagtgcagggaaccttccccggggttcggggttcggggttcggttgcagggctgcagcgcccttggctttctccctcacccaagtttccggagagccgacctaaaagtaacaatagataaggtttcctgctccagtgtatctcaaaagaccgggcgccaggggggggggacctagggcgacgtcttcagagtccgccagtgttggcgttgttcgcgcaaacctgcaggctcccgagtggggcctgccttggtctctagagggttgctgcctttcaagcggtgcctaagaagttattttcttgtttaacatatatatttattaatttatttgtcgtgttggaaaatgtgtctctgctttccttttctctgcttgcctagccccaggtcttttctttgggaccctgggggcgggcatggaagtggaagtaggggcaagctcttgccccactccctggccatctcaacgcctctcctcaatgctgggccctcttatctcatcctttcctctagcttttctatttttgattgtgttgagtgaagtttggagatttttcatacttttcttactatagtctcttgtttgtcttattaggataatacataaatgataatgtgggttatcctcctctccatgcacagtggaaagtcctgaactcctggctttccaggagacatatataggggaacatcaccctatatataatttgagtgtatatatatttatatatatgatgtggacatatgtatacttatcttgctccattgtcatgagtccatgagtctaagtatagccactgatggtgacaggtgtgagtctggctggaacactttcagtttcaggagtgcaagcagcactcaaacctggagctgaggaatctaattcagacagagactttaatcactgctgaagatgcccctgctccctctgggttccagcagaggtgattcttacatatgatccagttaacatcatcactttttttgaggacattgaaagtgaaataatttgtgtctgtgtttaatattaccaactacattggaagcctgagcagggcgaggaccaataattttaattatttatatttcctgtattgctttagtatgctggcttgtacatagtaggcactaaatacatgtttgttggttgattgtttaagccagagtgtattacaacaatctggagatactaaatctggggttctcaggttcactcattgacatgatatacaatggttaaaatcactattgaaaaatacgttttgtgtatatttgcttcaacaactttgtgctttcctgaaagcagtaaccaagagttaagatatccctaatgttttgcttaaactaatgaacaaatatgctttgggtcataaatcagaaagtttagatctgtcccttaataaaaatatatattactactcctttggaaaatagatttttaatggttaagaactgtgaaatttacaaatcaaaatcttaatcattatccttctaagaggatacaaatttagtgctcttaacttgttaccattgtaatattaactaaataaacagatgtattatgctgttgcaa

SEQ ID NO: 439432 - DNA, 3946 bp, Homo sapiens
gttctccgcccccgccgccgccattacggagctcccagtggttgattcttcaccacactgaaaccattaggaaaaatccttgtggttaacagcagaggcttcagagtgtaacctgtactcgggcctagaaattatttaaaatggcgactgatacgtctcaaggtgaactcgtccatcctaaggcactcccacttatagtaggagctcagctgatccacgcggacaagttaggtgagaaggtagaagatagcaccatgccgattcgtcgaactgtgaattctacccgggaaactcctcccaaaagcaagcttgctgaaggggaggaagaaaagccagaaccagacataagttcagaggaatctgtctccactgtagaagaacaagagaatgaaactccacctgctacttcgagtgaggcagagcagccaaagggggaacctgagaatgaagagaaggaagaaaataagtcttctgaggaaaccaaaaaggatgagaaagatcagtctaaagaaaaggagaagaaagtgaaaaaaacaattccttcctgggctaccctttctgccagccagctagccagggcccagaaacaaacaccgatggcttcttccccacgtcccaagatggatgcaatcttaactgaggccattaaggcatgcttccagaagagtggtgcatcagtggttgctattcgaaaatacatcatccataagtatccttctctggagctggagagaaggggttatctccttaaacaagcactgaaaagagaattaaatagaggagtcatcaaacaggttaaaggaaaaggtgcttctggaagttttgttgtggttcagaaatcaagaaaaacacctcagaaatccagaaacagaaagaataggagctctgcagtggatccagaaccacaagtaaaattggaggatgtcctcccactggcctttactcgcctttgtgaacctaaagaagcttcctacagtctcatcaggaaatatgtgtctcagtattatcctaagcttagagtggacatcaggcctcagctgttgaagaacgctctgcagagagcagtagagaggggccagttagaacagataactggcaaaggtgcttcggggacattccagctgaagaaatcaggggagaaacccctgcttggtggaagcctgatggaatatgcaatcttgtctgccattgctgccatgaatgagccgaagacctgctctaccactgctctgaagaagtatgtcctagagaatcacccaggaaccaattctaactatcaaatgcatttgctgaaaaaaaccctgcagaaatgcgaaaagaatgggtggatggaacagatctctgggaaagggttcagtggcaccttccagctctgttttccctattatcccagcccaggagttctgtttccgaagaaagagccagatgattctagagatgaggatgaagatgaagatgagtcatcagaagaagactctgaggatgaagagccgccacctaagagaaggttgcagaagaaaaccccagccaagtccccagggaaggccgcatctgtgaagcagagagggtccaaacctgcacctaaagtctcagctgcccagcgggggaaagctaggcccttgcctaagaaagcacctcctaaggccaaaacgcctgccaagaagaccagaccctcatccacagtcatcaagaaacctagtggtggctcctcaaagaagcctgcaaccagtgcaagaaaggaagtaaaattgccgggcaagggcaaatccaccatgaagaagtctttcagagtgaaaaagtaaattttataggaaaaaagggtatcatgatgaaattcaaaatcttattttctaaggtcagtgtgcatttgtttagttttgatgcttttcaaattacattattttcctcccctatgaacattgtggggagggactctaaataaaccagtttaggcatttgctagctttaggtgcttttattggtgcctgcccttttccttgttcattttaatttctgcaataatcctggactttcctaaactatgtaatgtatacttgtcctttttctctgcctcccccaaccccctgttgtttttatggtcagctttgccttttttttttcttccaattttatctaaacagttgcagagatttttatatttgtagaaagcatcaagaacggtatgccagtcaggtcctggaagtaaaatggaggcacaatatagcactgactgagttgtaaagcctcctgcctggagacttcagttatagctgtaataattaatcttatttataaaagccactccactaaccttttctctccaactgtaaacacagagacagctttgggaataagccaaaaacagggtgatctcattagattttgaagatatatgactcctttgggctacatttcatattgatcaatttctaggtatttttcactggcccaaagtattgcattcccttaacagcaagcacaagttctctatatcacttgttttttgttgttgttgttgttgtcgtcgttgttttgagacggagtcttgctcaggtgccccggagtgcagtggtgcaatctcagctcactgcaacctccacctcctgggttcaagcaattctcctgcttcagcctcccgagtagctgggattacaggtgtgtaccaccacgcctggcaatttttttgtatttttagtagagatggggtttcgccgtgttggtcaggctggtctcgaactcctgacctcaggtgatccgcctgcctcggcctcccaaagtgctgggattacaggagtgagccactgtgcctggcctatcccacttggtttttgactgaaggggaagtgtagaaatatattgatttgtgatttctggtgtcacctgtgttaccaaaaatcaaaacaaatcttttttattttttattattattattatttttgagacagagtctcgctctgtcgcccagtgtggagtgcagtggtgtgatcttggctcactgcaaactccgcctcccaggttcaagcgattctcccacctcagcctcctgagttgggtcctacaggcgcacacgaccacgcccagctaattttttgtatttttagtagagttggggtttcaccatgttagccaggatggtctcgatctcctgacctcgtgatccactcacctcagcctcccaaaatcctggggttacagatgtgagctaccactcacggcccaaatcttcttgatcatatgtttaaatatattttttaatatttggagcatgagttgtcacttcttgtttgccttttttataaggaaatgttggagagttacatcattgctaatgtagaaatgttaagtggaaaaatatacagtttggtaaaataaactagattctacatttatttgtgggtttttttcccctcctttctttccacagcacttttgatatcaagcaagtggcttcctttttgagatattaaaaaaaaaaagaaaaggaaaaaagtaaatgaagcccaactacctaaccctttcttatttgtatttgttttagtattgtgaagttgtgttaaatagtactagctagaaatacaaatttctggttatcatttctcttccctgtggcacttgacattttaattgtcttaaagtttttgaagtacatcttctggccccttgagtactgccagaggcaaaagatgtttgtttcttattcattccacttttgtctcctgggatcccttctgtagcctaaagtatggctgggaaatggacttgagaagattggcttgaattagatcataatcatgtgtgatcccatcatgaattcattggaatttgtgttgcatgtaaggcaatctttcctgttgtaaatcttccttttttaatgtacatatattttgaaaaatatgaataaacatgaaattttaaaagctaaaaaaaaatagcttatatttaaagg

SEQ ID NO: 439433 - DNA, 2427 bp, Homo sapiens
tcaaggggtcctccagcgtcagcctcccaaagtgctgggattgtaggtgtgagcctataatccgtcttccccaattttttttttttaatgagaagtcgtcaggcactgtttacatttttgcaaacatctttaacatctagcataacagaagacagctagtatctgttccagtttattttgggttacttatttgaagaaaatctaaccttacacagaaatacaattagaaaaggatggaatattttaagataactttgagatagttgtagaaattattctttgatactacaccaaaactcaacaaatcgttatttttttaacagctttattgaggttgatttgcataccttatacaatttaatttatataattacagtttataactcagtgattttcagtaactttatagaattgtacaactatcacagtccaattttcggacatttctgtcacccaaaaaagatcccttgtagccatttgcagtcactccctattccaccagcagcctcaggcaacctctagtctgttctgtctctctgcagatttgcattttgttcacatttcatatggatagaatctagaatcatgtactatatgatcttttgtgtctggcttcttttggcatgatgtttttgaattttatccacgttgcagcatgtaccagtgctttcattcttttttattgtccaatagtatttcattctatggatgtcacattttgtttatccattcatgagatgatgatggacatttggattatttctacttttcagctaattatgaataatactgcctatgaacatttatgttcaagtctgcgtggatatgtttttaggacttgctgggccatatggtaaatttatgttctaagaaactggcagtgtttataagggctcaagtcgtttgtgtgtttgagatggggtctcactctgtcacccaggctagagtgcagtggtgtgatcttggctcactgcaacctccacctccctggctcaagcaatcctcccatcttagcctccctaatagctgggattataggcgtgcaccaccaccatgcctgattaattttgtatttttgtagaaatggggtttcgccgtgttgcccaggctactcttgaactcctgggttcagtgaagtagtctgcctgcctcagcttcccaaagtgttggaattacaggtgtgatccaccacacctgaccagggctcgagtttctccatatcctcctcaacgtttgttactcttttttattatagccatactagtggatatagggtatctcgttgtagttttgattggcatttccctaataattactgatgttgagcatctcttgtgcttaaggccatttgtttattgtctgtagtgaaatgtttattcaaatcttttgcccatttttaaaagggggttggttattcgttaacaagaattcattactctagacataaagtctcatcagattttttctcctattctgtgactttctcagtagtatcttttgaagcgtttactttttgatgaagtcctatttatcatttttaaaaattgcttttgcagttttatggttatctaagaaacattgcctaattaaaggtaatgaaaatttactcgtacgtttaagagtttataattttggctcctacatttaggtctgtgatctatattgttttgtttatagtgagaggtaagggtataatttatctttttgcatgtgggtgtgtgattattccagcaccttttattgaaaagactgtcccttccctattgaattgccgtagcatcttatgaaaatcaattgaccataaatataagggtttatttccggattctgagttctcttttgttctgtaggtgtatccttcatgctaatactgcactgtcttactgactgtagctttatagtgaattttgaaatttggaattataagccctctaactttttcaggaatgttttgactatgccgggtcctgtacagttccatacaaattgtccatttctgccaaaaaaaaaaaaccaaaaaaacagctggagttttggtaggaattgccttgaacctatagatcaatttggggagactcactgtcaacaacgttgagttttccaatccatgacacagaggtctctttatttaatttctctcagcagtgttttgtagttgttcggtgtacgagtcttgaattttttttgttaaatttattgccaagtattttattctttttccatgctgtcttgaatggtggaagtgttttctaattttcgttttcaggttgttaacgctaacctgtagaaatacaatcgatttgtccattgctcttgtatccttcgcccttgctgaactcaccagttgtagtagtttctttgtgaattccttacagttttctacatacaggatctgttatctgcaaataaagagcattttacttcttt

SEQ ID NO: 439434 - DNA, 4366 bp, Homo sapiens
gagtgtgggagcgccgaggctcgcgttccgccgctgcttccgtcgccggggcgggcgccgcggtgtccctgccgagcgtgagccccgaactgtcaccgcgccgagccccagcctcatccgtcggtgtccgcggtccgagctttccccgcctcgctggcggcccgcgctctcccccgccgtgcgcgttcgccgctgtggcctgtagctacctcgcctcgctgctttgtctccgctgctcttgccgtccttcccgcggccttctgcgggcggggctgtcggctgtcgctttgctgctccgcgacggcggccttgagtctcgctcccccggtgggaaacgtagaactggttactcgccaccttaggcggtggggtttgaatgagagcggtgcctcggtaggtcgtcagaaagttacagtcgcccatctgagcgtttgtaagagatggaggcaggagtggtgaggttgattcttcaccacactgaaaccattaggaaaaatccttgtggttaacagcagaggcttcagagtgtaacctgtactcgggcctagaaattatttaaaatggcgactgatacgtctcaaggtgaactcgtccatcctaaggcactcccacttatagtaggagctcagctgatccacgcggacaagttaggtgagaaggtagaagatagcaccatgccgattcgtcgaactgtgaattctacccgggaaactcctcccaaaagcaagcttgctgaaggggaggaagaaaagccagaaccagacataagttcagaggaatctgtctccactgtagaagaacaagagaatgaaactccacctgctacttcgagtgaggcagagcagccaaagggggaacctgagaatgaagagaaggaagaaaataagtcttctgaggaaaccaaaaaggatgagaaagatcagtctaaagaaaaggagaagaaagtgaaaaaaacaattccttcctgggctaccctttctgccagccagctagccagggcccagaaacaaacaccgatggcttcttccccacgtcccaagatggatgcaatcttaactgaggccattaaggcatgcttccagaagagtggtgcatcagtggttgctattcgaaaatacatcatccataagtatccttctctggagctggagagaaggggttatctccttaaacaagcactgaaaagagaattaaatagaggagtcatcaaacaggttaaaggaaaaggtgcttctggaagttttgttgtggttcagaaatcaagaaaaacacctcagaaatccagaaacagaaagaataggagctctgcagtggatccagaaccacaagtaaaattggaggatgtcctcccactggcctttactcgcctttgtgaacctaaagaagcttcctacagtctcatcaggaaatatgtgtctcagtattatcctaagcttagagtggacatcaggcctcagctgttgaagaacgctctgcagagagcagtagagaggggccagttagaacagataactggcaaaggtgcttcggggacattccagctgaagaaatcaggggagaaacccctgcttggtggaagcctgatggaatatgcaatcttgtctgccattgctgccatgaatgagccgaagacctgctctaccactgctctgaagaagtatgtcctagagaatcacccaggaaccaattctaactatcaaatgcatttgctgaaaaaaaccctgcagaaatgcgaaaagaatgggtggatggaacagatctctgggaaagggttcagtggcaccttccagctctgttttccctattatcccagcccaggagttctgtttccgaagaaagagccagatgattctagagatgaggatgaagatgaagatgagtcatcagaagaagactctgaggatgaagagccgccacctaagagaaggttgcagaagaaaaccccagccaagtccccagggaaggccgcatctgtgaagcagagagggtccaaacctgcacctaaagtctcagctgcccagcgggggaaagctaggcccttgcctaagaaagcacctcctaaggccaaaacgcctgccaagaagaccagaccctcatccacagtcatcaagaaacctagtggtggctcctcaaagaagcctgcaaccagtgcaagaaaggaagtaaaattgccgggcaagggcaaatccaccatgaagaagtctttcagagtgaaaaagtaaattttataggaaaaaagggtatcatgatgaaattcaaaatcttattttctaaggtcagtgtgcatttgtttagttttgatgcttttcaaattacattattttcctcccctatgaacattgtggggagggactctaaataaaccagtttaggcatttgctagctttaggtgcttttattggtgcctgcccttttccttgttcattttaatttctgcaataatcctggactttcctaaactatgtaatgtatacttgtcctttttctctgcctcccccaaccccctgttgtttttatggtcagctttgccttttttttttcttccaattttatctaaacagttgcagagatttttatatttgtagaaagcatcaagaacggtatgccagtcaggtcctggaagtaaaatggaggcacaatatagcactgactgagttgtaaagcctcctgcctggagacttcagttatagctgtaataattaatcttatttataaaagccactccactaaccttttctctccaactgtaaacacagagacagctttgggaataagccaaaaacagggtgatctcattagattttgaagatatatgactcctttgggctacatttcatattgatcaatttctaggtatttttcactggcccaaagtattgcattcccttaacagcaagcacaagttctctatatcacttgttttttgttgttgttgttgttgtcgtcgttgttttgagacggagtcttgctcaggtgccccggagtgcagtggtgcaatctcagctcactgcaacctccacctcctgggttcaagcaattctcctgcttcagcctcccgagtagctgggattacaggtgtgtaccaccacgcctggcaatttttttgtatttttagtagagatggggtttcgccgtgttggtcaggctggtctcgaactcctgacctcaggtgatccgcctgcctcggcctcccaaagtgctgggattacaggagtgagccactgtgcctggcctatcccacttggtttttgactgaaggggaagtgtagaaatatattgatttgtgatttctggtgtcacctgtgttaccaaaaatcaaaacaaatcttttttattttttattattattattatttttgagacagagtctcgctctgtcgcccagtgtggagtgcagtggtgtgatcttggctcactgcaaactccgcctcccaggttcaagcgattctcccacctcagcctcctgagttgggtcctacaggcgcacacgaccacgcccagctaattttttgtatttttagtagagttggggtttcaccatgttagccaggatggtctcgatctcctgacctcgtgatccactcacctcagcctcccaaaatcctggggttacagatgtgagctaccactcacggcccaaatcttcttgatcatatgtttaaatatattttttaatatttggagcatgagttgtcacttcttgtttgccttttttataaggaaatgttggagagttacatcattgctaatgtagaaatgttaagtggaaaaatatacagtttggtaaaataaactagattctacatttatttgtgggtttttttcccctcctttctttccacagcacttttgatatcaagcaagtggcttcctttttgagatattaaaaaaaaaaagaaaaggaaaaaagtaaatgaagcccaactacctaaccctttcttatttgtatttgttttagtattgtgaagttgtgttaaatagtactagctagaaatacaaatttctggttatcatttctcttccctgtggcacttgacattttaattgtcttaaagtttttgaagtacatcttctggccccttgagtactgccagaggcaaaagatgtttgtttcttattcattccacttttgtctcctgggatcccttctgtagcctaaagtatggctgggaaatggacttgagaagattggcttgaattagatcataatcatgtgtgatcccatcatgaattcattggaatttgtgttgcatgtaaggcaatctttcctgttgtaaatcttccttttttaatgtacatatattttgaaaaatatgaataaacatgaaattttaaaagctaaaaaaaaatagcttatatttaaagg

SEQ ID NO: 439435 - DNA, 3828 bp, Homo sapiens
agcggagagctcggcggctgggactggaggacagcggtggcggaggcgactagcggcggcgggagcggcgccgagaggccgtgcgggacgcgggcgccaggaccggccgaacgcagagaaggtagaagatagcaccatgccgattcgtcgaactgtgaattctacccgggaaactcctcccaaaagcaagcttgctgaaggggaggaagaaaagccagaaccagacataagttcagaggaatctgtctccactgtagaagaacaagagaatgaaactccacctgctacttcgagtgaggcagagcagccaaagggggaacctgagaatgaagagaaggaagaaaataagtcttctgaggaaaccaaaaaggatgagaaagatcagtctaaagaaaaggagaagaaagtgaaaaaaacaattccttcctgggctaccctttctgccagccagctagccagggcccagaaacaaacaccgatggcttcttccccacgtcccaagatggatgcaatcttaactgaggccattaaggcatgcttccagaagagtggtgcatcagtggttgctattcgaaaatacatcatccataagtatccttctctggagctggagagaaggggttatctccttaaacaagcactgaaaagagaattaaatagaggagtcatcaaacaggttaaaggaaaaggtgcttctggaagttttgttgtggttcagaaatcaagaaaaacacctcagaaatccagaaacagaaagaataggagctctgcagtggatccagaaccacaagtaaaattggaggatgtcctcccactggcctttactcgcctttgtgaacctaaagaagcttcctacagtctcatcaggaaatatgtgtctcagtattatcctaagcttagagtggacatcaggcctcagctgttgaagaacgctctgcagagagcagtagagaggggccagttagaacagataactggcaaaggtgcttcggggacattccagctgaagaaatcaggggagaaacccctgcttggtggaagcctgatggaatatgcaatcttgtctgccattgctgccatgaatgagccgaagacctgctctaccactgctctgaagaagtatgtcctagagaatcacccaggaaccaattctaactatcaaatgcatttgctgaaaaaaaccctgcagaaatgcgaaaagaatgggtggatggaacagatctctgggaaagggttcagtggcaccttccagctctgttttccctattatcccagcccaggagttctgtttccgaagaaagagccagatgattctagagatgaggatgaagatgaagatgagtcatcagaagaagactctgaggatgaagagccgccacctaagagaaggttgcagaagaaaaccccagccaagtccccagggaaggccgcatctgtgaagcagagagggtccaaacctgcacctaaagtctcagctgcccagcgggggaaagctaggcccttgcctaagaaagcacctcctaaggccaaaacgcctgccaagaagaccagaccctcatccacagtcatcaagaaacctagtggtggctcctcaaagaagcctgcaaccagtgcaagaaaggaagtaaaattgccgggcaagggcaaatccaccatgaagaagtctttcagagtgaaaaagtaaattttataggaaaaaagggtatcatgatgaaattcaaaatcttattttctaaggtcagtgtgcatttgtttagttttgatgcttttcaaattacattattttcctcccctatgaacattgtggggagggactctaaataaaccagtttaggcatttgctagctttaggtgcttttattggtgcctgcccttttccttgttcattttaatttctgcaataatcctggactttcctaaactatgtaatgtatacttgtcctttttctctgcctcccccaaccccctgttgtttttatggtcagctttgccttttttttttcttccaattttatctaaacagttgcagagatttttatatttgtagaaagcatcaagaacggtatgccagtcaggtcctggaagtaaaatggaggcacaatatagcactgactgagttgtaaagcctcctgcctggagacttcagttatagctgtaataattaatcttatttataaaagccactccactaaccttttctctccaactgtaaacacagagacagctttgggaataagccaaaaacagggtgatctcattagattttgaagatatatgactcctttgggctacatttcatattgatcaatttctaggtatttttcactggcccaaagtattgcattcccttaacagcaagcacaagttctctatatcacttgttttttgttgttgttgttgttgtcgtcgttgttttgagacggagtcttgctcaggtgccccggagtgcagtggtgcaatctcagctcactgcaacctccacctcctgggttcaagcaattctcctgcttcagcctcccgagtagctgggattacaggtgtgtaccaccacgcctggcaatttttttgtatttttagtagagatggggtttcgccgtgttggtcaggctggtctcgaactcctgacctcaggtgatccgcctgcctcggcctcccaaagtgctgggattacaggagtgagccactgtgcctggcctatcccacttggtttttgactgaaggggaagtgtagaaatatattgatttgtgatttctggtgtcacctgtgttaccaaaaatcaaaacaaatcttttttattttttattattattattatttttgagacagagtctcgctctgtcgcccagtgtggagtgcagtggtgtgatcttggctcactgcaaactccgcctcccaggttcaagcgattctcccacctcagcctcctgagttgggtcctacaggcgcacacgaccacgcccagctaattttttgtatttttagtagagttggggtttcaccatgttagccaggatggtctcgatctcctgacctcgtgatccactcacctcagcctcccaaaatcctggggttacagatgtgagctaccactcacggcccaaatcttcttgatcatatgtttaaatatattttttaatatttggagcatgagttgtcacttcttgtttgccttttttataaggaaatgttggagagttacatcattgctaatgtagaaatgttaagtggaaaaatatacagtttggtaaaataaactagattctacatttatttgtgggtttttttcccctcctttctttccacagcacttttgatatcaagcaagtggcttcctttttgagatattaaaaaaaaaaagaaaaggaaaaaagtaaatgaagcccaactacctaaccctttcttatttgtatttgttttagtattgtgaagttgtgttaaatagtactagctagaaatacaaatttctggttatcatttctcttccctgtggcacttgacattttaattgtcttaaagtttttgaagtacatcttctggccccttgagtactgccagaggcaaaagatgtttgtttcttattcattccacttttgtctcctgggatcccttctgtagcctaaagtatggctgggaaatggacttgagaagattggcttgaattagatcataatcatgtgtgatcccatcatgaattcattggaatttgtgttgcatgtaaggcaatctttcctgttgtaaatcttccttttttaatgtacatatattttgaaaaatatgaataaacatgaaattttaaaagctaaaaaaaaatagcttatatttaaagg

SEQ ID NO: 439436 - DNA, 3519 bp, Homo sapiens
ccaatccggcacccgacataaaccatatcggctaggtcgagcggtgttgatcggccgaggcagtgagaaagatcagtctaaagaaaaggagaagaaagtgaaaaaaacaattccttcctgggctaccctttctgccagccagctagccagggcccagaaacaaacaccgatggcttcttccccacgtcccaagatggatgcaatcttaactgaggccattaaggcatgcttccagaagagtggtgcatcagtggttgctattcgaaaatacatcatccataagtatccttctctggagctggagagaaggggttatctccttaaacaagcactgaaaagagaattaaatagaggagtcatcaaacaggttaaaggaaaaggtgcttctggaagttttgttgtggttcagaaatcaagaaaaacacctcagaaatccagaaacagaaagaataggagctctgcagtggatccagaaccacaagtaaaattggaggatgtcctcccactggcctttactcgcctttgtgaacctaaagaagcttcctacagtctcatcaggaaatatgtgtctcagtattatcctaagcttagagtggacatcaggcctcagctgttgaagaacgctctgcagagagcagtagagaggggccagttagaacagataactggcaaaggtgcttcggggacattccagctgaagaaatcaggggagaaacccctgcttggtggaagcctgatggaatatgcaatcttgtctgccattgctgccatgaatgagccgaagacctgctctaccactgctctgaagaagtatgtcctagagaatcacccaggaaccaattctaactatcaaatgcatttgctgaaaaaaaccctgcagaaatgcgaaaagaatgggtggatggaacagatctctgggaaagggttcagtggcaccttccagctctgttttccctattatcccagcccaggagttctgtttccgaagaaagagccagatgattctagagatgaggatgaagatgaagatgagtcatcagaagaagactctgaggatgaagagccgccacctaagagaaggttgcagaagaaaaccccagccaagtccccagggaaggccgcatctgtgaagcagagagggtccaaacctgcacctaaagtctcagctgcccagcgggggaaagctaggcccttgcctaagaaagcacctcctaaggccaaaacgcctgccaagaagaccagaccctcatccacagtcatcaagaaacctagtggtggctcctcaaagaagcctgcaaccagtgcaagaaaggaagtaaaattgccgggcaagggcaaatccaccatgaagaagtctttcagagtgaaaaagtaaattttataggaaaaaagggtatcatgatgaaattcaaaatcttattttctaaggtcagtgtgcatttgtttagttttgatgcttttcaaattacattattttcctcccctatgaacattgtggggagggactctaaataaaccagtttaggcatttgctagctttaggtgcttttattggtgcctgcccttttccttgttcattttaatttctgcaataatcctggactttcctaaactatgtaatgtatacttgtcctttttctctgcctcccccaaccccctgttgtttttatggtcagctttgccttttttttttcttccaattttatctaaacagttgcagagatttttatatttgtagaaagcatcaagaacggtatgccagtcaggtcctggaagtaaaatggaggcacaatatagcactgactgagttgtaaagcctcctgcctggagacttcagttatagctgtaataattaatcttatttataaaagccactccactaaccttttctctccaactgtaaacacagagacagctttgggaataagccaaaaacagggtgatctcattagattttgaagatatatgactcctttgggctacatttcatattgatcaatttctaggtatttttcactggcccaaagtattgcattcccttaacagcaagcacaagttctctatatcacttgttttttgttgttgttgttgttgtcgtcgttgttttgagacggagtcttgctcaggtgccccggagtgcagtggtgcaatctcagctcactgcaacctccacctcctgggttcaagcaattctcctgcttcagcctcccgagtagctgggattacaggtgtgtaccaccacgcctggcaatttttttgtatttttagtagagatggggtttcgccgtgttggtcaggctggtctcgaactcctgacctcaggtgatccgcctgcctcggcctcccaaagtgctgggattacaggagtgagccactgtgcctggcctatcccacttggtttttgactgaaggggaagtgtagaaatatattgatttgtgatttctggtgtcacctgtgttaccaaaaatcaaaacaaatcttttttattttttattattattattatttttgagacagagtctcgctctgtcgcccagtgtggagtgcagtggtgtgatcttggctcactgcaaactccgcctcccaggttcaagcgattctcccacctcagcctcctgagttgggtcctacaggcgcacacgaccacgcccagctaattttttgtatttttagtagagttggggtttcaccatgttagccaggatggtctcgatctcctgacctcgtgatccactcacctcagcctcccaaaatcctggggttacagatgtgagctaccactcacggcccaaatcttcttgatcatatgtttaaatatattttttaatatttggagcatgagttgtcacttcttgtttgccttttttataaggaaatgttggagagttacatcattgctaatgtagaaatgttaagtggaaaaatatacagtttggtaaaataaactagattctacatttatttgtgggtttttttcccctcctttctttccacagcacttttgatatcaagcaagtggcttcctttttgagatattaaaaaaaaaaagaaaaggaaaaaagtaaatgaagcccaactacctaaccctttcttatttgtatttgttttagtattgtgaagttgtgttaaatagtactagctagaaatacaaatttctggttatcatttctcttccctgtggcacttgacattttaattgtcttaaagtttttgaagtacatcttctggccccttgagtactgccagaggcaaaagatgtttgtttcttattcattccacttttgtctcctgggatcccttctgtagcctaaagtatggctgggaaatggacttgagaagattggcttgaattagatcataatcatgtgtgatcccatcatgaattcattggaatttgtgttgcatgtaaggcaatctttcctgttgtaaatcttccttttttaatgtacatatattttgaaaaatatgaataaacatgaaattttaaaagctaaaaaaaaatagcttatatttaaagg

SEQ ID NO: 439437 - DNA, 4285 bp, Homo sapiens
gagtgtgggagcgccgaggctcgcgttccgccgctgcttccgtcgccggggcgggcgccgcggtgtccctgccgagcgtgagccccgaactgtcaccgcgccgagccccagcctcatccgtcggtgtccgcggtccgagctttccccgcctcgctggcggcccgcgctctcccccgccgtgcgcgttcgccgctgtggcctgtagctacctcgcctcgctgctttgtctccgctgctcttgccgtccttcccgcggccttctgcgggcggggctgtcggctgtcgctttgctgctccgcgacggcggccttgagtctcgctcccccggtgggaaacgtagaactggttactcgccaccttaggcggtggggtttgaatgagagcggtgcctcggtaggtcgtcagaaagttacagtcgcccatctgagcgtttgtaagagatggaggcaggagtggtgaggttgattcttcaccacactgaaaccattaggaaaaatccttgtggttaacagcagaggcttcagagtgtaacctgtactcgggcctagaaattatttaaaatggcgactgatacgtctcaaggtgaactcgtccatcctaaggcactcccacttatagtaggagctcagctgatccacgcggacaagttaggtgagaaggtagaagatagcaccatgccgattcgtcgaactgtgaattctacccgggaaactcctcccaaaagcaagcttgctgaaggggaggaagaaaagccagaaccagacataagttcagaggaatctgtctccactgtagaagaacaagagaatgaaactccacctgctacttcgagtgaggcagagcagccaaagggggaacctgagaatgaagagaaggaagaaaataagtcttctgaggaaaccaaaaaggatgagaaagatcagtctaaagaaaaggagaagaaagtgaaaaaaacaattccttcctgggctaccctttctgccagccagctagccagggcccagaaacaaacaccgatggcttcttccccacgtcccaagatggatgcaatcttaactgaggccattaaggcatgcttccagaagagtggtgcatcagtggttgctattcgaaaatacatcatccataagtatccttctctggagctggagagaaggggttatctccttaaacaagcactgaaaagagaattaaatagaggagtcatcaaacagaataggagctctgcagtggatccagaaccacaagtaaaattggaggatgtcctcccactggcctttactcgcctttgtgaacctaaagaagcttcctacagtctcatcaggaaatatgtgtctcagtattatcctaagcttagagtggacatcaggcctcagctgttgaagaacgctctgcagagagcagtagagaggggccagttagaacagataactggcaaaggtgcttcggggacattccagctgaagaaatcaggggagaaacccctgcttggtggaagcctgatggaatatgcaatcttgtctgccattgctgccatgaatgagccgaagacctgctctaccactgctctgaagaagtatgtcctagagaatcacccaggaaccaattctaactatcaaatgcatttgctgaaaaaaaccctgcagaaatgcgaaaagaatgggtggatggaacagatctctgggaaagggttcagtggcaccttccagctctgttttccctattatcccagcccaggagttctgtttccgaagaaagagccagatgattctagagatgaggatgaagatgaagatgagtcatcagaagaagactctgaggatgaagagccgccacctaagagaaggttgcagaagaaaaccccagccaagtccccagggaaggccgcatctgtgaagcagagagggtccaaacctgcacctaaagtctcagctgcccagcgggggaaagctaggcccttgcctaagaaagcacctcctaaggccaaaacgcctgccaagaagaccagaccctcatccacagtcatcaagaaacctagtggtggctcctcaaagaagcctgcaaccagtgcaagaaaggaagtaaaattgccgggcaagggcaaatccaccatgaagaagtctttcagagtgaaaaagtaaattttataggaaaaaagggtatcatgatgaaattcaaaatcttattttctaaggtcagtgtgcatttgtttagttttgatgcttttcaaattacattattttcctcccctatgaacattgtggggagggactctaaataaaccagtttaggcatttgctagctttaggtgcttttattggtgcctgcccttttccttgttcattttaatttctgcaataatcctggactttcctaaactatgtaatgtatacttgtcctttttctctgcctcccccaaccccctgttgtttttatggtcagctttgccttttttttttcttccaattttatctaaacagttgcagagatttttatatttgtagaaagcatcaagaacggtatgccagtcaggtcctggaagtaaaatggaggcacaatatagcactgactgagttgtaaagcctcctgcctggagacttcagttatagctgtaataattaatcttatttataaaagccactccactaaccttttctctccaactgtaaacacagagacagctttgggaataagccaaaaacagggtgatctcattagattttgaagatatatgactcctttgggctacatttcatattgatcaatttctaggtatttttcactggcccaaagtattgcattcccttaacagcaagcacaagttctctatatcacttgttttttgttgttgttgttgttgtcgtcgttgttttgagacggagtcttgctcaggtgccccggagtgcagtggtgcaatctcagctcactgcaacctccacctcctgggttcaagcaattctcctgcttcagcctcccgagtagctgggattacaggtgtgtaccaccacgcctggcaatttttttgtatttttagtagagatggggtttcgccgtgttggtcaggctggtctcgaactcctgacctcaggtgatccgcctgcctcggcctcccaaagtgctgggattacaggagtgagccactgtgcctggcctatcccacttggtttttgactgaaggggaagtgtagaaatatattgatttgtgatttctggtgtcacctgtgttaccaaaaatcaaaacaaatcttttttattttttattattattattatttttgagacagagtctcgctctgtcgcccagtgtggagtgcagtggtgtgatcttggctcactgcaaactccgcctcccaggttcaagcgattctcccacctcagcctcctgagttgggtcctacaggcgcacacgaccacgcccagctaattttttgtatttttagtagagttggggtttcaccatgttagccaggatggtctcgatctcctgacctcgtgatccactcacctcagcctcccaaaatcctggggttacagatgtgagctaccactcacggcccaaatcttcttgatcatatgtttaaatatattttttaatatttggagcatgagttgtcacttcttgtttgccttttttataaggaaatgttggagagttacatcattgctaatgtagaaatgttaagtggaaaaatatacagtttggtaaaataaactagattctacatttatttgtgggtttttttcccctcctttctttccacagcacttttgatatcaagcaagtggcttcctttttgagatattaaaaaaaaaaagaaaaggaaaaaagtaaatgaagcccaactacctaaccctttcttatttgtatttgttttagtattgtgaagttgtgttaaatagtactagctagaaatacaaatttctggttatcatttctcttccctgtggcacttgacattttaattgtcttaaagtttttgaagtacatcttctggccccttgagtactgccagaggcaaaagatgtttgtttcttattcattccacttttgtctcctgggatcccttctgtagcctaaagtatggctgggaaatggacttgagaagattggcttgaattagatcataatcatgtgtgatcccatcatgaattcattggaatttgtgttgcatgtaaggcaatctttcctgttgtaaatcttccttttttaatgtacatatattttgaaaaatatgaataaacatgaaattttaaaagctaaaaaaaaatagcttatatttaaagg

SEQ ID NO: 439438 - DNA, 3773 bp, Homo sapiens
agcggagagctcggcggctgggactggaggacagcggtggcggaggcgactagcggcggcgggagcggcgccgagaggccgtgcgggacgcgggcgccaggaccggccgaacgcagagaaggtagaagatagcaccatgccgattcgtcgaactgtgaattctacccgggaaactcctcccaaaagcaagcttgctgaaggggaggaagaaaagccagaaccagacataagttcagaggaatctgtctccactgtagaagaacaagagaatgaaactccacctgctacttcgagtgaggcagagcagccaaagggggaacctgagaatgaagagaaggaagaaaataagtcttctgaggaaaccaaaaaggatgagaaagatcagtctaaagaaaaggagaagaaagtgaaaaaaacaattccttcctgggctaccctttctgccagccagctagccagggcccagaaacaaacaccgatggcttcttccccacgtcccaagatggatgcaatcttaactgaggccattaaggcatgcttccagaagagtggtgcatcagtggttgctattcgaaaatacatcatccataagtatccttctctggagctggagagaaggggttatctccttaaacaagcactgaaaagagaattaaatagaggagtcatcaaacaggttaaaggaaaaggtgcttctggaagttttgttgtggttcagaaatcaagaaaaacacctcagaaatccagaaacagaaagaataggagctctgcagtggatccagaaccacaaaagcttcctacagtctcatcaggaaatatgtgtctcagtattatcctaagcttagagtggacatcaggcctcagctgttgaagaacgctctgcagagagcagtagagaggggccagttagaacagataactggcaaaggtgcttcggggacattccagctgaagaaatcaggggagaaacccctgcttggtggaagcctgatggaatatgcaatcttgtctgccattgctgccatgaatgagccgaagacctgctctaccactgctctgaagaagtatgtcctagagaatcacccaggaaccaattctaactatcaaatgcatttgctgaaaaaaaccctgcagaaatgcgaaaagaatgggtggatggaacagatctctgggaaagggttcagtggcaccttccagctctgttttccctattatcccagcccaggagttctgtttccgaagaaagagccagatgattctagagatgaggatgaagatgaagatgagtcatcagaagaagactctgaggatgaagagccgccacctaagagaaggttgcagaagaaaaccccagccaagtccccagggaaggccgcatctgtgaagcagagagggtccaaacctgcacctaaagtctcagctgcccagcgggggaaagctaggcccttgcctaagaaagcacctcctaaggccaaaacgcctgccaagaagaccagaccctcatccacagtcatcaagaaacctagtggtggctcctcaaagaagcctgcaaccagtgcaagaaaggaagtaaaattgccgggcaagggcaaatccaccatgaagaagtctttcagagtgaaaaagtaaattttataggaaaaaagggtatcatgatgaaattcaaaatcttattttctaaggtcagtgtgcatttgtttagttttgatgcttttcaaattacattattttcctcccctatgaacattgtggggagggactctaaataaaccagtttaggcatttgctagctttaggtgcttttattggtgcctgcccttttccttgttcattttaatttctgcaataatcctggactttcctaaactatgtaatgtatacttgtcctttttctctgcctcccccaaccccctgttgtttttatggtcagctttgccttttttttttcttccaattttatctaaacagttgcagagatttttatatttgtagaaagcatcaagaacggtatgccagtcaggtcctggaagtaaaatggaggcacaatatagcactgactgagttgtaaagcctcctgcctggagacttcagttatagctgtaataattaatcttatttataaaagccactccactaaccttttctctccaactgtaaacacagagacagctttgggaataagccaaaaacagggtgatctcattagattttgaagatatatgactcctttgggctacatttcatattgatcaatttctaggtatttttcactggcccaaagtattgcattcccttaacagcaagcacaagttctctatatcacttgttttttgttgttgttgttgttgtcgtcgttgttttgagacggagtcttgctcaggtgccccggagtgcagtggtgcaatctcagctcactgcaacctccacctcctgggttcaagcaattctcctgcttcagcctcccgagtagctgggattacaggtgtgtaccaccacgcctggcaatttttttgtatttttagtagagatggggtttcgccgtgttggtcaggctggtctcgaactcctgacctcaggtgatccgcctgcctcggcctcccaaagtgctgggattacaggagtgagccactgtgcctggcctatcccacttggtttttgactgaaggggaagtgtagaaatatattgatttgtgatttctggtgtcacctgtgttaccaaaaatcaaaacaaatcttttttattttttattattattattatttttgagacagagtctcgctctgtcgcccagtgtggagtgcagtggtgtgatcttggctcactgcaaactccgcctcccaggttcaagcgattctcccacctcagcctcctgagttgggtcctacaggcgcacacgaccacgcccagctaattttttgtatttttagtagagttggggtttcaccatgttagccaggatggtctcgatctcctgacctcgtgatccactcacctcagcctcccaaaatcctggggttacagatgtgagctaccactcacggcccaaatcttcttgatcatatgtttaaatatattttttaatatttggagcatgagttgtcacttcttgtttgccttttttataaggaaatgttggagagttacatcattgctaatgtagaaatgttaagtggaaaaatatacagtttggtaaaataaactagattctacatttatttgtgggtttttttcccctcctttctttccacagcacttttgatatcaagcaagtggcttcctttttgagatattaaaaaaaaaaagaaaaggaaaaaagtaaatgaagcccaactacctaaccctttcttatttgtatttgttttagtattgtgaagttgtgttaaatagtactagctagaaatacaaatttctggttatcatttctcttccctgtggcacttgacattttaattgtcttaaagtttttgaagtacatcttctggccccttgagtactgccagaggcaaaagatgtttgtttcttattcattccacttttgtctcctgggatcccttctgtagcctaaagtatggctgggaaatggacttgagaagattggcttgaattagatcataatcatgtgtgatcccatcatgaattcattggaatttgtgttgcatgtaaggcaatctttcctgttgtaaatcttccttttttaatgtacatatattttgaaaaatatgaataaacatgaaattttaaaagctaaaaaaaaatagcttatatttaaagg

SEQ ID NO: 439439 - DNA, 3195 bp, Homo sapiens
cctccagcctcccaaagtgctggggctataggtgtgagcacccagccaaaagaatcttaatttttagggacataactggttaacctgcttattgggtacagttgtcagtatctttgggctaggttggctattattttagggtggatggagggtagatggaaggagaaaatatccataggagggttgggacttctcagttagattgaatacctgttgaatgggaagagaaagtccctaagctgacaatttattgtaaaacatatctgtgctaatgcaggaactccgacccacctggtgcagaggagtcttgtcttgacctgctttgggagagtgttgtcttgatgcttttctcttcctccttggaaaacagctgaagaaatcaggggagaaacccctgcttggtggaagcctgatggaatatgcaatcttgtctgccattgctgccatgaatgagccgaagacctgctctaccactgctctgaagaagtatgtcctagagaatcacccaggaaccaattctaactatcaaatgcatttgctgaaaaaaaccctgcagaaatgcgaaaagaatgggtggatggaacagatctctgggaaagggttcagtggcaccttccagctctgttttccctattatcccagcccaggagttctgtttccgaagaaagagccagatgattctagagatgaggatgaagatgaagatgagtcatcagaagaagactctgaggatgaagagccgccacctaagagaaggttgcagaagaaaaccccagccaagtccccagggaaggccgcatctgtgaagcagagagggtccaaacctgcacctaaagtctcagctgcccagcgggggaaagctaggcccttgcctaagaaagcacctcctaaggccaaaacgcctgccaagaagaccagaccctcatccacagtcatcaagaaacctagtggtggctcctcaaagaagcctgcaaccagtgcaagaaaggaagtaaaattgccgggcaagggcaaatccaccatgaagaagtctttcagagtgaaaaagtaaattttataggaaaaaagggtatcatgatgaaattcaaaatcttattttctaaggtcagtgtgcatttgtttagttttgatgcttttcaaattacattattttcctcccctatgaacattgtggggagggactctaaataaaccagtttaggcatttgctagctttaggtgcttttattggtgcctgcccttttccttgttcattttaatttctgcaataatcctggactttcctaaactatgtaatgtatacttgtcctttttctctgcctcccccaaccccctgttgtttttatggtcagctttgccttttttttttcttccaattttatctaaacagttgcagagatttttatatttgtagaaagcatcaagaacggtatgccagtcaggtcctggaagtaaaatggaggcacaatatagcactgactgagttgtaaagcctcctgcctggagacttcagttatagctgtaataattaatcttatttataaaagccactccactaaccttttctctccaactgtaaacacagagacagctttgggaataagccaaaaacagggtgatctcattagattttgaagatatatgactcctttgggctacatttcatattgatcaatttctaggtatttttcactggcccaaagtattgcattcccttaacagcaagcacaagttctctatatcacttgttttttgttgttgttgttgttgtcgtcgttgttttgagacggagtcttgctcaggtgccccggagtgcagtggtgcaatctcagctcactgcaacctccacctcctgggttcaagcaattctcctgcttcagcctcccgagtagctgggattacaggtgtgtaccaccacgcctggcaatttttttgtatttttagtagagatggggtttcgccgtgttggtcaggctggtctcgaactcctgacctcaggtgatccgcctgcctcggcctcccaaagtgctgggattacaggagtgagccactgtgcctggcctatcccacttggtttttgactgaaggggaagtgtagaaatatattgatttgtgatttctggtgtcacctgtgttaccaaaaatcaaaacaaatcttttttattttttattattattattatttttgagacagagtctcgctctgtcgcccagtgtggagtgcagtggtgtgatcttggctcactgcaaactccgcctcccaggttcaagcgattctcccacctcagcctcctgagttgggtcctacaggcgcacacgaccacgcccagctaattttttgtatttttagtagagttggggtttcaccatgttagccaggatggtctcgatctcctgacctcgtgatccactcacctcagcctcccaaaatcctggggttacagatgtgagctaccactcacggcccaaatcttcttgatcatatgtttaaatatattttttaatatttggagcatgagttgtcacttcttgtttgccttttttataaggaaatgttggagagttacatcattgctaatgtagaaatgttaagtggaaaaatatacagtttggtaaaataaactagattctacatttatttgtgggtttttttcccctcctttctttccacagcacttttgatatcaagcaagtggcttcctttttgagatattaaaaaaaaaaagaaaaggaaaaaagtaaatgaagcccaactacctaaccctttcttatttgtatttgttttagtattgtgaagttgtgttaaatagtactagctagaaatacaaatttctggttatcatttctcttccctgtggcacttgacattttaattgtcttaaagtttttgaagtacatcttctggccccttgagtactgccagaggcaaaagatgtttgtttcttattcattccacttttgtctcctgggatcccttctgtagcctaaagtatggctgggaaatggacttgagaagattggcttgaattagatcataatcatgtgtgatcccatcatgaattcattggaatttgtgttgcatgtaaggcaatctttcctgttgtaaatcttccttttttaatgtacatatattttgaaaaatatgaataaacatgaaattttaaaagctaaaaaaaaatagcttatatttaaagg

SEQ ID NO: 439440 - DNA, 2755 bp, Homo sapiens
atttcgcgaattcaccatgaagaagtctttcagagtgaacaagtaaatttcataggaaaaaagggtatcatgatgaaattcaaaatcttattttctaaggtcagtgtgcatttgtttagttttgatgcttttcaaattacattattttcctcccctatgaacattgtggggagggactctaaataaaccagtttaggcatttgctagctttaggtgcttttattggtgagccagatgattctagagatgaggatgaagatgaagatgagtcatcagaagaagactctgaggatgaagagccgccacctaagagaaggttgcagaagaaaaccccagccaagtccccagggaaggccgcatctgtgaagcagagagggtccaaacctgcacctaaagtctcagctgcccagcgggggaaagctaggcccttgcctaagaaagcacctcctaaggccaaaacgcctgccaagaagaccagaccctcatccacagtcatcaagaaacctagtggtggctcctcaaagaagcctgcaaccagtgcaagaaaggaagtaaaattgccgggcaagggcaaatccaccatgaagaagtctttcagagtgaaaaagtaaattttataggaaaaaagggtatcatgatgaaattcaaaatcttattttctaaggtcagtgtgcatttgtttagttttgatgcttttcaaattacattattttcctcccctatgaacattgtggggagggactctaaataaaccagtttaggcatttgctagctttaggtgcttttattggtgcctgcccttttccttgttcattttaatttctgcaataatcctggactttcctaaactatgtaatgtatacttgtcctttttctctgcctcccccaaccccctgttgtttttatggtcagctttgccttttttttttcttccaattttatctaaacagttgcagagatttttatatttgtagaaagcatcaagaacggtatgccagtcaggtcctggaagtaaaatggaggcacaatatagcactgactgagttgtaaagcctcctgcctggagacttcagttatagctgtaataattaatcttatttataaaagccactccactaaccttttctctccaactgtaaacacagagacagctttgggaataagccaaaaacagggtgatctcattagattttgaagatatatgactcctttgggctacatttcatattgatcaatttctaggtatttttcactggcccaaagtattgcattcccttaacagcaagcacaagttctctatatcacttgttttttgttgttgttgttgttgtcgtcgttgttttgagacggagtcttgctcaggtgccccggagtgcagtggtgcaatctcagctcactgcaacctccacctcctgggttcaagcaattctcctgcttcagcctcccgagtagctgggattacaggtgtgtaccaccacgcctggcaatttttttgtatttttagtagagatggggtttcgccgtgttggtcaggctggtctcgaactcctgacctcaggtgatccgcctgcctcggcctcccaaagtgctgggattacaggagtgagccactgtgcctggcctatcccacttggtttttgactgaaggggaagtgtagaaatatattgatttgtgatttctggtgtcacctgtgttaccaaaaatcaaaacaaatcttttttattttttattattattattatttttgagacagagtctcgctctgtcgcccagtgtggagtgcagtggtgtgatcttggctcactgcaaactccgcctcccaggttcaagcgattctcccacctcagcctcctgagttgggtcctacaggcgcacacgaccacgcccagctaattttttgtatttttagtagagttggggtttcaccatgttagccaggatggtctcgatctcctgacctcgtgatccactcacctcagcctcccaaaatcctggggttacagatgtgagctaccactcacggcccaaatcttcttgatcatatgtttaaatatattttttaatatttggagcatgagttgtcacttcttgtttgccttttttataaggaaatgttggagagttacatcattgctaatgtagaaatgttaagtggaaaaatatacagtttggtaaaataaactagattctacatttatttgtgggtttttttcccctcctttctttccacagcacttttgatatcaagcaagtggcttcctttttgagatattaaaaaaaaaaagaaaaggaaaaaagtaaatgaagcccaactacctaaccctttcttatttgtatttgttttagtattgtgaagttgtgttaaatagtactagctagaaatacaaatttctggttatcatttctcttccctgtggcacttgacattttaattgtcttaaagtttttgaagtacatcttctggccccttgagtactgccagaggcaaaagatgtttgtttcttattcattccacttttgtctcctgggatcccttctgtagcctaaagtatggctgggaaatggacttgagaagattggcttgaattagatcataatcatgtgtgatcccatcatgaattcattggaatttgtgttgcatgtaaggcaatctttcctgttgtaaatcttccttttttaatgtacatatattttgaaaaatatgaataaacatgaaattttaaaagctaaaaaaaaatagcttatatttaaagg

SEQ ID NO: 439441 - DNA, 2699 bp, Homo sapiens
agcggagagctcggcggctgggactggaggacagcggtggcggaggcgactagcggcggcgggagcggcgccgagaggccgtgcgggacgcgggcgccaggaccggccgaacgcagagaaggtagaagatagcaccatgccgattcgtcgaactgtgaattctacccgggaaactcctcccaaaagcaagcttgctgaaggggaggaagaaaagccagaaccagacataagttcagaggaatctgtctccactgtagaaggttgcagaagaaaaccccagccaagtccccagggaaggccgcatctgtgaagcagagagggtccaaacctgcacctaaagtctcagctgcccagcgggggaaagctaggcccttgcctaagaaagcacctcctaaggccaaaacgcctgccaagaagaccagaccctcatccacagtcatcaagaaacctagtggtggctcctcaaagaagcctgcaaccagtgcaagaaaggaagtaaaattgccgggcaagggcaaatccaccatgaagaagtctttcagagtgaaaaagtaaattttataggaaaaaagggtatcatgatgaaattcaaaatcttattttctaaggtcagtgtgcatttgtttagttttgatgcttttcaaattacattattttcctcccctatgaacattgtggggagggactctaaataaaccagtttaggcatttgctagctttaggtgcttttattggtgcctgcccttttccttgttcattttaatttctgcaataatcctggactttcctaaactatgtaatgtatacttgtcctttttctctgcctcccccaaccccctgttgtttttatggtcagctttgccttttttttttcttccaattttatctaaacagttgcagagatttttatatttgtagaaagcatcaagaacggtatgccagtcaggtcctggaagtaaaatggaggcacaatatagcactgactgagttgtaaagcctcctgcctggagacttcagttatagctgtaataattaatcttatttataaaagccactccactaaccttttctctccaactgtaaacacagagacagctttgggaataagccaaaaacagggtgatctcattagattttgaagatatatgactcctttgggctacatttcatattgatcaatttctaggtatttttcactggcccaaagtattgcattcccttaacagcaagcacaagttctctatatcacttgttttttgttgttgttgttgttgtcgtcgttgttttgagacggagtcttgctcaggtgccccggagtgcagtggtgcaatctcagctcactgcaacctccacctcctgggttcaagcaattctcctgcttcagcctcccgagtagctgggattacaggtgtgtaccaccacgcctggcaatttttttgtatttttagtagagatggggtttcgccgtgttggtcaggctggtctcgaactcctgacctcaggtgatccgcctgcctcggcctcccaaagtgctgggattacaggagtgagccactgtgcctggcctatcccacttggtttttgactgaaggggaagtgtagaaatatattgatttgtgatttctggtgtcacctgtgttaccaaaaatcaaaacaaatcttttttattttttattattattattatttttgagacagagtctcgctctgtcgcccagtgtggagtgcagtggtgtgatcttggctcactgcaaactccgcctcccaggttcaagcgattctcccacctcagcctcctgagttgggtcctacaggcgcacacgaccacgcccagctaattttttgtatttttagtagagttggggtttcaccatgttagccaggatggtctcgatctcctgacctcgtgatccactcacctcagcctcccaaaatcctggggttacagatgtgagctaccactcacggcccaaatcttcttgatcatatgtttaaatatattttttaatatttggagcatgagttgtcacttcttgtttgccttttttataaggaaatgttggagagttacatcattgctaatgtagaaatgttaagtggaaaaatatacagtttggtaaaataaactagattctacatttatttgtgggtttttttcccctcctttctttccacagcacttttgatatcaagcaagtggcttcctttttgagatattaaaaaaaaaaagaaaaggaaaaaagtaaatgaagcccaactacctaaccctttcttatttgtatttgttttagtattgtgaagttgtgttaaatagtactagctagaaatacaaatttctggttatcatttctcttccctgtggcacttgacattttaattgtcttaaagtttttgaagtacatcttctggccccttgagtactgccagaggcaaaagatgtttgtttcttattcattccacttttgtctcctgggatcccttctgtagcctaaagtatggctgggaaatggacttgagaagattggcttgaattagatcataatcatgtgtgatcccatcatgaattcattggaatttgtgttgcatgtaaggcaatctttcctgttgtaaatcttccttttttaatgtacatatattttgaaaaatatgaataaacatgaaattttaaaagctaaaaaaaaatagcttatatttaaagg

SEQ ID NO: 439442 - DNA, 3838 bp, Homo sapiens
gagtgtgggagcgccgaggctcgcgttccgccgctgcttccgtcgccggggcgggcgccgcggtgtccctgccgagcgtgagccccgaactgtcaccgcgccgagccccagcctcatccgtcggtgtccgcggtccgagctttccccgcctcgctggcggcccgcgctctcccccgccgtgcgcgttcgccgctgtggcctgtagctacctcgcctcgctgctttgtctccgctgctcttgccgtccttcccgcggccttctgcgggcggggctgtcggctgtcgctttgctgctccgcgacggcggccttgagtctcgctcccccggtgggaaacgtagaactggttactcgccaccttaggcggtggggtttgaatgagagcggtgcctcggtaggtcgtcagaaagttacagtcgcccatctgagcgtttgtaagagatggaggcaggagtggtgaggttgattcttcaccacactgaaaccattaggaaaaatccttgtggttaacagcagaggcttcagagtgtaacctgtactcgggcctagaaattatttaaaatggcgactgatacgtctcaaggtgaactcgtccatcctaaggcactcccacttatagtaggagctcagctgatccacgcggacaagttaggtgagaaggtagaagatagcaccatgccgattcgtcgaactgtgaattctacccgggaaactcctcccaaaagcaagcttgctgaaggggaggaagaaaagccagaaccagacataagttcagaggaatctgtctccactgtagaagaacaagagaatgaaactccacctgctacttcgagtgaggcagagcagccaaagggggaacctgagaatgaagagaaggaagaaaataagtcttctgaggaaaccaaaaaggatgagaaagatcagtctaaagaaaaggagaagaaagtgaaaaaaacaattccttcctgggctaccctttctgccagccagctagccagggcccagaaacaaacaccgatggcttcttccccacgtcccaagatggatgcaatcttaactgaggccattaaggcatgcttccagaagagtggtgcatcagtggttgctattcgaaaatacatcatccataagtatccttctctggagctggagagaaggggttatctccttaaacaagcactgaaaagagaattaaatagaggagtcatcaaacaggttaaaggaaaaggtgcttctggaagttttgttgtggttcagaaatcaagaaaaacacctcagaaatccagaaacagaaagaataggagctctgcagtggatccagaaccacaagtaaaattggaggatgtcctcccactggcctttactcgcctttgtgaacctaaagaagcttcctacagtctcatcaggaaatatgtgtctcagtattatcctaagcttagagtggacatcaggcctcagctgttgaagaacgctctgcagagagcagtagagaggggccagttagaacagataactggcaaaggtgcttcggggacattccagctgaagaaatcaggggagaaacccctgcttggtggaagcctgatggaatatgcaatcttgtctgccattgctgccatgaatgagccgaagacctgctctaccactgctctgaagaagtatgtcctagagaatcacccaggaaccaattctaactatcaaatgcatttgctgaaaaaaaccctgcagaaatgcgaaaagaatgggtggatggaacagatctctgggaaagggttcagtggcaccttccagctctgttttccctattatcccagcccaggagttctgtttccgaagaaagagccagatgattctagagatgaggatgaagatgaagatgagtcatcagaagaagactctgaggatgaagagccgccacctaagagaaggttgcagaagaaaaccccagccaagtccccagggaaggccgcatctgtgaagcagagagggtccaaacctgcacctaaagtctcagctgcccagcgggggaaagctaggcccttgcctaagaaagcacctcctaaggccaaaacgcctgccaagaagaccagaccctcatccacagtcatcaagaaacctagtggtggctcctcaaagaagcctgcaaccagtgcaagaaaggaagtaaaattgccgggcaagggcaaatccaccatgaagaagtctttcagagtgaaaaagtaaattttataggaaaaaagggtatcatgatgaaattcaaaatcttattttctaaggtcagtgtgcatttgtttagttttgatgcttttcaaattacattattttcctcccctatgaacattgtggggagggactctaaataaaccagtttaggcatttgctagctttaggtgcttttattggtgcctgcccttttccttgttcattttaatttctgcaataatcctggactttcctaaactatgtaatgtatacttgtcctttttctctgcctcccccaaccccctgttgtttttatggtcagctttgccttttttttttcttccaattttatctaaacagttgcagagatttttatatttgtagaaagcatcaagaacggtatgccagtcaggtcctggaagtaaaatggaggcacaatatagcactgactgagttgtaaagcctcctgcctggagacttcagttatagctgtaataattaatcttatttataaaagccactccactaaccttttctctccaactgtaaacacagagacagctttgggaataagccaaaaacagggtgatctcattagattttgaagatatatgactcctttgggctacatttcatattgatcaatttctaggtatttttcactggcccaaagtattgcattcccttaacagcaagcacaagttctctatatcacttgttttttgttgttgttgttgttgtcgtcgttgttttgagacggagtcttgctcaggtgccccggagtgcagtggtgcaatctcagctcactgcaacctccacctcctgggttcaagcaattctcctgcttcagcctccccctcagcctcccaaaatcctggggttacagatgtgagctaccactcacggcccaaatcttcttgatcatatgtttaaatatattttttaatatttggagcatgagttgtcacttcttgtttgccttttttataaggaaatgttggagagttacatcattgctaatgtagaaatgttaagtggaaaaatatacagtttggtaaaataaactagattctacatttatttgtgggtttttttcccctcctttctttccacagcacttttgatatcaagcaagtggcttcctttttgagatattaaaaaaaaaaagaaaaggaaaaaagtaaatgaagcccaactacctaaccctttcttatttgtatttgttttagtattgtgaagttgtgttaaatagtactagctagaaatacaaatttctggttatcatttctcttccctgtggcacttgacattttaattgtcttaaagtttttgaagtacatcttctggccccttgagtactgccagaggcaaaagatgtttgtttcttattcattccacttttgtctcctgggatcccttctgtagcctaaagtatggctgggaaatggacttgagaagattggcttgaattagatcataatcatgtgtgatcccatcatgaattcattggaatttgtgttgcatgtaaggcaatctttcctgttgtaaatcttccttttttaatgtacatatattttgaaaaatatgaataaacatgaaattttaaaagctaaaaaaaaatagcttatatttaaagg

SEQ ID NO: 439443 - DNA, 1059 bp, Homo sapiens
aaaattgggtttttatgttttaaactaaataattgacaccccccccacacgacacttctgccccggggtgggggggggggggaggtgcagtggtgtgatcttggctcactgcaaactccgcctcccaggttcaagcgattctcccacctcagcctcctgagttgggtcctacaggcgcacacgaccacgcccagctaattttttgtatttttagtagagttggggtttcaccatgttagccaggatggtctcgatctcctgacctcgtgatccactcacctcagcctcccaaaatcctggggttacagatgtgagctaccactcacggcccaaatcttcttgatcatatgtttaaatatattttttaatatttggagcatgagttgtcacttcttgtttgccttttttataaggaaatgttggagagttacatcattgctaatgtagaaatgttaagtggaaaaatatacagtttggtaaaataaactagattctacatttatttgtgggtttttttcccctcctttctttccacagcacttttgatatcaagcaagtggcttcctttttgagatattaaaaaaaaaaagaaaaggaaaaaagtaaatgaagcccaactacctaaccctttcttatttgtatttgttttagtattgtgaagttgtgttaaatagtactagctagaaatacaaatttctggttatcatttctcttccctgtggcacttgacattttaattgtcttaaagtttttgaagtacatcttctggccccttgagtactgccagaggcaaaagatgtttgtttcttattcattccacttttgtctcctgggatcccttctgtagcctaaagtatggctgggaaatggacttgagaagattggcttgaattagatcataatcatgtgtgatcccatcatgaattcattggaatttgtgttgcatgtaaggcaatctttcctgttgtaaatcttccttttttaatgtacatatattttgaaaaatatgaataaacatgaaattttaaaagctaaaaaaaaatagcttatatttaaagg

SEQ ID NO: 439444 - DNA, 2797 bp, Homo sapiens
gagtgtgggagcgccgaggctcgcgttccgccgctgcttccgtcgccggggcgggcgccgcggtgtccctgccgagcgtgagccccgaactgtcaccgcgccgagccccagcctcatccgtcggtgtccgcggtccgagctttccccgcctcgctggcggcccgcgctctcccccgccgtgcgcgttcgccgctgtggcctgtagctacctcgcctcgctgctttgtctccgctgctcttgccgtccttcccgcggccttctgcgggcggggctgtcggctgtcgctttgctgctccgcgacggcggccttgagtctcgctcccccggtgggaaacgtagaactggttactcgccaccttaggcggtggggtttgaatgagagcggtgcctcggtaggtcgtcagaaagttacagtcgcccatctgagcgtttgtaagagatggaggcaggagtggtgaggttgattcttcaccacactgaaaccattaggaaaaatccttgtggttaacagcagaggcttcagagtgtaacctgtactcgggcctagaaattatttaaaatggcgactgatacgtctcaaggtgaactcgtccatcctaaggcactcccacttatagtaggagctcagctgatccacgcggacaagttaggtgagaaggtagaagatagcaccatgccgattcgtcgaactgtgaattctacccgggaaactcctcccaaaagcaagcttgctgaaggggaggaagaaaagccagaaccagacataagttcagaggaatctgtctccactgtagaagaacaagagaatgaaactccacctgctacttcgagtgaggcagagcagccaaagggggaacctgagaatgaagagaaggaagaaaataagtcttctgaggaaaccaaaaaggatgagaaagatcagtctaaagaaaaggagaagaaagtgaaaaaaacaattccttcctgggctaccctttctgccagccagctagccagggcccagaaacaaacaccgatggcttcttccccacgtcccaagatggatgcaatcttaactgaggccattaaggcatgcttccagaagagtggtgcatcagtggttgctattcgaaaatacatcatccataagtatccttctctggagctggagagaaggggttatctccttaaacaagcactgaaaagagaattaaatagaggagtcatcaaacaggttaaaggaaaaggtgcttctggaagttttgttgtggttcagaaatcaagaaaaacacctcagaaatccagaaacagaaagaataggagctctgcagtggatccagaaccacaagtaaaattggaggatgtcctcccactggcctttactcgcctttgtgaacctaaagaagcttcctacagtctcatcaggaaatatgtgtctcagtattatcctaagcttagagtggacatcaggcctcagctgttgaagaacgctctgcagagagcagtagagaggggccagttagaacagataactggcaaaggtgcttcggggacattccagctgaagaaatcaggggagaaacccctgcttggtggaagcctgatggaatatgcaatcttgtctgccattgctgccatgaatgagccgaagacctgctctaccactgctctgaagaagtatgtcctagagaatcacccaggaaccaattctaactatcaaatgcatttgctgaaaaaaaccctgcagaaatgcgaaaagaatgggtggatggaacagatctctgggaaagggttcagtggcaccttccagctctgttttccctattatcccagcccaggagttctgtttccgaagaaagagccagatgattctagagatgaggatgaagatgaagatgagtcatcagaagaagactctgaggatgaagagccgccacctaagagaaggttgcagaagaaaaccccagccaagtccccagggaaggccgcatctgtgaagcagagagggtccaaacctgcacctaaagtctcagctgcccagcgggggaaagctaggcccttgcctaagaaagcacctcctaaggccaaaacgcctgccaagaagaccagaccctcatccacagtcatcaagaaacctagtggtggctcctcaaagaagcctgcaaccagtgcaagaaaggaagtaaaattgccgggcaagggcaaatccaccatgaagaagtctttcagagtgaaaaagtaaattttataggaaaaaagggtatcatgatgaaattcaaaatcttattttctaagcacttttgatatcaagcaagtggcttcctttttgagatattaaaaaaaaaaagaaaaggaaaaaagtaaatgaagcccaactacctaaccctttcttatttgtatttgttttagtattgtgaagttgtgttaaatagtactagctagaaatacaaatttctggttatcatttctcttccctgtggcacttgacattttaattgtcttaaagtttttgaagtacatcttctggccccttgagtactgccagaggcaaaagatgtttgtttcttattcattccacttttgtctcctgggatcccttctgtagcctaaagtatggctgggaaatggacttgagaagattggcttgaattagatcataatcatgtgtgatcccatcatgaattcattggaatttgtgttgcatgtaaggcaatctttcctgttgtaaatcttccttttttaatgtacatatattttgaaaaatatgaataaacatgaaattttaaaagctaaaaaaaaatagcttatatttaaagg

SEQ ID NO: 439445 - DNA, 1059 bp, Homo sapiens
ggaaaagccttcagtgtgtccacatccttaaaaaaacatatgagaatgcacaatcgatagaaactctataaatgtgagaaataggagaaagttttcaattctaacagatgctttcaaagttgtgaaaattcccactgaagagagaaatcctgtcaatgtaagtaatatagaaagcgagatacaagatgattcatgtatagtcaggtaccacataatcatgtttcagtcagcaatggaccatataggttggtagccccataagattatttaagtgtttacctcagcctcccaaaatcctggggttacagatgtgagctaccactcacggcccaaatcttcttgatcatatgtttaaatatattttttaatatttggagcatgagttgtcacttcttgtttgccttttttataaggaaatgttggagagttacatcattgctaatgtagaaatgttaagtggaaaaatatacagtttggtaaaataaactagattctacatttatttgtgggtttttttcccctcctttctttccacagcacttttgatatcaagcaagtggcttcctttttgagatattaaaaaaaaaaagaaaaggaaaaaagtaaatgaagcccaactacctaaccctttcttatttgtatttgttttagtattgtgaagttgtgttaaatagtactagctagaaatacaaatttctggttatcatttctcttccctgtggcacttgacattttaattgtcttaaagtttttgaagtacatcttctggccccttgagtactgccagaggcaaaagatgtttgtttcttattcattccacttttgtctcctgggatcccttctgtagcctaaagtatggctgggaaatggacttgagaagattggcttgaattagatcataatcatgtgtgatcccatcatgaattcattggaatttgtgttgcatgtaaggcaatctttcctgttgtaaatcttccttttttaatgtacatatattttgaaaaatatgaataaacatgaaattttaaaagctaaaaaaaaatagcttatatttaaagg

SEQ ID NO: 439446 - DNA, 868 bp, Homo sapiens
tgcaatccagcctgggcaacagagcgagactctgtctcaaaaaaaaaaaaaaaaaaagaggggctgggcatggtggctcatgcttgtcctcagcctcccaaaatcctggggttacagatgtgagctaccactcacggcccaaatcttcttgatcatatgtttaaatatattttttaatatttggagcatgagttgtcacttcttgtttgccttttttataaggaaatgttggagagttacatcattgctaatgtagaaatgttaagtggaaaaatatacagtttggtaaaataaactagattctacatttatttgtgggtttttttcccctcctttctttccacagcacttttgatatcaagcaagtggcttcctttttgagatattaaaaaaaaaaagaaaaggaaaaaagtaaatgaagcccaactacctaaccctttcttatttgtatttgttttagtattgtgaagttgtgttaaatagtactagctagaaatacaaatttctggttatcatttctcttccctgtggcacttgacattttaattgtcttaaagtttttgaagtacatcttctggccccttgagtactgccagaggcaaaagatgtttgtttcttattcattccacttttgtctcctgggatcccttctgtagcctaaagtatggctgggaaatggacttgagaagattggcttgaattagatcataatcatgtgtgatcccatcatgaattcattggaatttgtgttgcatgtaaggcaatctttcctgttgtaaatcttccttttttaatgtacatatattttgaaaaatatgaataaacatgaaattttaaaagctaaaaaaaaatagcttatatttaaagg

SEQ ID NO: 439447 - DNA, 3048 bp, Homo sapiens
gagtgtgggagcgccgaggctcgcgttccgccgctgcttccgtcgccggggcgggcgccgcggtgtccctgccgagcgtgagccccgaactgtcaccgcgccgagccccagcctcatccgtcggtgtccgcggtccgagctttccccgcctcgctggcggcccgcgctctcccccgccgtgcgcgttcgccgctgtggcctgtagctacctcgcctcgctgctttgtctccgctgctcttgccgtccttcccgcggccttctgcgggcggggctgtcggctgtcgctttgctgctccgcgacggcggccttgagtctcgctcccccggtgggaaacgtagaactggttactcgccaccttaggcggtggggtttgaatgagagcggtgcctcggtaggtcgtcagaaagttacagtcgcccatctgagcgtttgtaagagatggaggcaggagtggtgaggttgattcttcaccacactgaaaccattaggaaaaatccttgtggttaacagcagaggcttcagagtgtaacctgtactcgggcctagaaattatttaaaatggcgactgatacgtctcaaggtgaactcgtccatcctaaggcactcccacttatagtaggagctcagctgatccacgcggacaagttaggtgagaaggtagaagatagcaccatgccgattcgtcgaactgtgaattctacccgggaaactcctcccaaaagcaagcttgctgaaggggaggaagaaaagccagaaccagacataagttcagaggaatctgtctccactgtagaagaacaagagaatgaaactccacctgctacttcgagtgaggcagagcagccaaagggggaacctgagaatgaagagaaggaagaaaataagtcttctgaggaaaccaaaaaggatgagaaagatcagtctaaagaaaaggagaagaaagtgaaaaaaacaattccttcctgggctaccctttctgccagccagctagccagggcccagaaacaaacaccgatggcttcttccccacgtcccaagatggatgcaatcttaactgaggccattaaggcatgcttccagaagagtggtgcatcagtggttgctattcgaaaatacatcatccataagtatccttctctggagctggagagaaggggttatctccttaaacaagcactgaaaagagaattaaatagaggagtcatcaaacaggttaaaggaaaaggtgcttctggaagttttgttgtggttcagaaatcaagaaaaacacctcagaaatccagaaacagaaagaataggagctctgcagtggatccagaaccacaagtaaaattggaggatgtcctcccactggcctttactcgcctttgtgaacctaaagaagcttcctacagtctcatcaggaaatatgtgtctcagtattatcctaagcttagagtggacatcaggcctcagctgttgaagaacgctctgcagagagcagtagagaggggccagttagaacagataactggcaaaggtgcttcggggacattccagctgaagaaatcaggggagaaacccctgcttggtggaagcctgatggaatatgcaatcttgtctgccattgctgccatgaatgagccgaagacctgctctaccactgctctgaagaagtatgtcctagagaatcacccaggaaccaattctaactatcaaatgcatttgctgaaaaaaaccctgcagaaatgcgaaaagaatgggtggatggaacagatctctgggaaagggttcagtggcaccttccagctctgttttccctattatcccagcccaggagttctgtttccgaagaaagagccagatgattctagagatgaggatgaagatgaagatgagtcatcagaagaagactctgaggatgaagagccgccacctaagagaaggttgcagaagaaaaccccagccaagtccccagggaaggccgcatctgtgaagcagagagggtccaaacctgcacctaaagtctcagctgcccagcgggggaaagctaggcccttgcctaagaaagcacctcctaaggccaaaacgcctgccaagaagaccagaccctcatccacagtcatcaagaaacctagtggtggctcctcaaagaagcctgcaaccagtgcaagaaaggaagtaaaattgccgggcaagggcaaatccaccatgaagaagtctttcagagtgaaaaagtaaattttataggaaaaaagggtatcatgatgaaattcaaaatcttattttctaaggtcagtgtgcatttgtttagttttgatgcttttcaaattacattattttcctcccctatgaacattgtggggagggactctaaataaaccagtttaggcatttgctagctttaggtgcttttattggtgcctgcccttttccttgttcattttaatttctgcaataatcctggactttcctaaactatgtaatgtatacttgtcctttttctctgcctcccccaaccccctgttgtttttatggtcagctttgccttttttttttcttccaattttatctaaacagttgcagagatttttatatttgtagaaagcatcaagaacggtatgccagtcaggtcctggaagtaaaatggaggcacaatatagcactgactgagttgtaaagcctcctgcctggagacttcagttatagctgtaataattaatcttatttataaaagccactccactaaccttttctctccaactgtaaacacagagacagctttgggaataagccaaaaacagggtgatctcattagattttgaagatatatgactcctttgggctacatttcatattgatcaatttctaggtatttttcactggcccaaagtattgcattcccttaacagcaagcacaagttctctatatcacttgttttttgttgttgttgttgttgtcgtcgttgttttgagacggagtcttgctcaggttgcagtgagccgagattgcaccattgcactcctccataggcaccaagagctgaactctgtataaaaaaaaaaa

SEQ ID NO: 439448 - DNA, 2626 bp, Homo sapiens
gagtgtgggagcgccgaggctcgcgttccgccgctgcttccgtcgccggggcgggcgccgcggtgtccctgccgagcgtgagccccgaactgtcaccgcgccgagccccagcctcatccgtcggtgtccgcggtccgagctttccccgcctcgctggcggcccgcgctctcccccgccgtgcgcgttcgccgctgtggcctgtagctacctcgcctcgctgctttgtctccgctgctcttgccgtccttcccgcggccttctgcgggcggggctgtcggctgtcgctttgctgctccgcgacggcggccttgagtctcgctcccccggtgggaaacgtagaactggttactcgccaccttaggcggtggggtttgaatgagagcggtgcctcggtaggtcgtcagaaagttacagtcgcccatctgagcgtttgtaagagatggaggcaggagtggtgaggttgattcttcaccacactgaaaccattaggaaaaatccttgtggttaacagcagaggcttcagagtgtaacctgtactcgggcctagaaattatttaaaatggcgactgatacgtctcaaggtgaactcgtccatcctaaggcactcccacttatagtaggagctcagctgatccacgcggacaagttaggtgagaaggtagaagatagcaccatgccgattcgtcgaactgtgaattctacccgggaaactcctcccaaaagcaagcttgctgaaggggaggaagaaaagccagaaccagacataagttcagaggaatctgtctccactgtagaagaacaagagaatgaaactccacctgctacttcgagtgaggcagagcagccaaagggggaacctgagaatgaagagaaggaagaaaataagtcttctgaggaaaccaaaaaggatgagaaagatcagtctaaagaaaaggagaagaaagtgaaaaaaacaattccttcctgggctaccctttctgccagccagctagccagggcccagaaacaaacaccgatggcttcttccccacgtcccaagatggatgcaatcttaactgaggccattaaggcatgcttccagaagagtggtgcatcagtggttgctattcgaaaatacatcatccataagtatccttctctggagctggagagaaggggttatctccttaaacaagcactgaaaagagaattaaatagaggagtcatcaaacaggttaaaggaaaaggtgcttctggaagttttgttgtggttcagaaatcaagaaaaacacctcagaaatccagaaacagaaagaataggagctctgcagtggatccagaaccacaagtaaaattggaggatgtcctcccactggcctttactcgcctttgtgaacctaaagaagcttcctacagtctcatcaggaaatatgtgtctcagtattatcctaagcttagagtggacatcaggcctcagctgttgaagaacgctctgcagagagcagtagagaggggccagttagaacagataactggcaaaggtgcttcggggacattccagctgaagaaatcaggggagaaacccctgcttggtggaagcctgatggaatatgcaatcttgtctgccattgctgccatgaatgagccgaagacctgctctaccactgctctgaagaagtatgtcctagagaatcacccaggaaccaattctaactatcaaatgcatttgctgaaaaaaaccctgcagaaatgcgaaaagaatgggtggatggaacagatctctgggaaagggttcagtggcaccttccagctctgttttccctattatcccagcccaggagttctgtttccgaagaaagagccagatgattctagagatgaggatgaagatgaagatgagtcatcagaagaagactctgaggatgaagagccgccacctaagagaaggttgcagaagaaaaccccagccaagtccccagggaaggccgcatctgtgaagcagagagggtccaaacctgcacctaaagtctcagctgcccagcgggggaaagctaggcccttgcctaagaaagcacctcctaaggccaaaacgcctgccaagaagaccagaccctcatccacagtcatcaagaaacctagtggtggctcctcaaagaagcctgcaaccagtgcaagaaaggaagtaaaattgccgggcaagggcaaatccaccatgaagaagtctttcagagtgaaaaagtaaattttataggaaaaaagggtatcatgatgaaattcaaaatcttattttctaaggtcagtgtgcatttgtttagttttgatgcttttcaaattacattattttcctcccctatgaacattgtggggagggactctaaataaaccagtttaggcatttgctagctttaggtgcttttattggtgcctgcccttttccttgttcattttaatttctgcaataatcctggactttcctaaactatgtaatgtatacttgtcctttttctctgcctcccccaaccccctgttgtttttatggtcagctttgccttttttttttcttccaattttatctaaacagttgcagtgagccgagattgcaccattgtactccaatccggacaatagttgcgagactatgtatca

SEQ ID NO: 439449 - DNA, 2832 bp, Homo sapiens
gagtgtgggagcgccgaggctcgcgttccgccgctgcttccgtcgccggggcgggcgccgcggtgtccctgccgagcgtgagccccgaactgtcaccgcgccgagccccagcctcatccgtcggtgtccgcggtccgagctttccccgcctcgctggcggcccgcgctctcccccgccgtgcgcgttcgccgctgtggcctgtagctacctcgcctcgctgctttgtctccgctgctcttgccgtccttcccgcggccttctgcgggcggggctgtcggctgtcgctttgctgctccgcgacggcggccttgagtctcgctcccccggtgggaaacgtagaactggttactcgccaccttaggcggtggggtttgaatgagagcggtgcctcggtaggtcgtcagaaagttacagtcgcccatctgagcgtttgtaagagatggaggcaggagtggtgaggttgattcttcaccacactgaaaccattaggaaaaatccttgtggttaacagcagaggcttcagagtgtaacctgtactcgggcctagaaattatttaaaatggcgactgatacgtctcaaggtgaactcgtccatcctaaggcactcccacttatagtaggagctcagctgatccacgcggacaagttaggtgagaaggtagaagatagcaccatgccgattcgtcgaactgtgaattctacccgggaaactcctcccaaaagcaagcttgctgaaggggaggaagaaaagccagaaccagacataagttcagaggaatctgtctccactgtagaagaacaagagaatgaaactccacctgctacttcgagtgaggcagagcagccaaagggggaacctgagaatgaagagaaggaagaaaataagtcttctgaggaaaccaaaaaggatgagaaagatcagtctaaagaaaaggagaagaaagtgaaaaaaacaattccttcctgggctaccctttctgccagccagctagccagggcccagaaacaaacaccgatggcttcttccccacgtcccaagatggatgcaatcttaactgaggccattaaggcatgcttccagaagagtggtgcatcagtggttgctattcgaaaatacatcatccataagtatccttctctggagctggagagaaggggttatctccttaaacaagcactgaaaagagaattaaatagaggagtcatcaaacaggttaaaggaaaaggtgcttctggaagttttgttgtggttcagaaatcaagaaaaacacctcagaaatccagaaacagaaagaataggagctctgcagtggatccagaaccacaaaagcttcctacagtctcatcaggaaatatgtgtctcagtattatcctaagcttagagtggacatcaggcctcagctgttgaagaacgctctgcagagagcagtagagaggggccagttagaacagataactggcaaaggtgcttcggggacattccagaaatggggtttcgccgtgttgcccaggctactcttgaactcctgggttcagtgaagtagtctgcctgcctcagcttcccaaagtgttggaattacaggtgtgatccaccacacctgaccagggctcgagtttctccatatcctcctcaacgtttgttactcttttttattatagccatactagtggatatagggtatctcgttgtagttttgattggcatttccctaataattactgatgttgagcatctcttgtgcttaaggccatttgtttattgtctgtagtgaaatgtttattcaaatcttttgcccatttttaaaagggggttggttattcgttaacaagaattcattactctagacataaagtctcatcagattttttctcctattctgtgactttctcagtagtatcttttgaagcgtttactttttgatgaagtcctatttatcatttttaaaaattgcttttgcagttttatggttatctaagaaacattgcctaattaaaggtaatgaaaatttactcgtacgtttaagagtttataattttggctcctacatttaggtctgtgatctatattgttttgtttatagtgagaggtaagggtataatttatctttttgcatgtgggtgtgtgattattccagcaccttttattgaaaagactgtcccttccctattgaattgccgtagcatcttatgaaaatcaattgaccataaatataagggtttatttccggattctgagttctcttttgttctgtaggtgtatccttcatgctaatactgcactgtcttactgactgtagctttatagtgaattttgaaatttggaattataagccctctaactttttcaggaatgttttgactatgccgggtcctgtacagttccatacaaattgtccatttctgccaaaaaaaaaaaaccaaaaaaacagctggagttttggtaggaattgccttgaacctatagatcaatttggggagactcactgtcaacaacgttgagttttccaatccatgacacagaggtctctttatttaatttctctcagcagtgttttgtagttgttcggtgtacgagtcttgaattttttttgttaaatttattgccaagtattttattctttttccatgctgtcttgaatggtggaagtgttttctaattttcgttttcaggttgttaacgctaacctgtagaaatacaatcgatttgtccattgctcttgtatccttcgcccttgctgaactcaccagttgtagtagtttctttgtgaattccttacagttttctacatacaggatctgttatctgcaaataaagagcattttacttcttt

SEQ ID NO: 439450 - DNA, 1892 bp, Homo sapiens
gagtgtgggagcgccgaggctcgcgttccgccgctgcttccgtcgccggggcgggcgccgcggtgtccctgccgagcgtgagccccgaactgtcaccgcgccgagccccagcctcatccgtcggtgtccgcggtccgagctttccccgcctcgctggcggcccgcgctctcccccgccgtgcgcgttcgccgctgtggcctgtagctacctcgcctcgctgctttgtctccgctgctcttgccgtccttcccgcggccttctgcgggcggggctgtcggctgtcgctttgctgctccgcgacggcggccttgagtctcgctcccccggtgggaaacgtagaactggttactcgccaccttaggcggtggggtttgaatgagagcggtgcctcggtaggtcgtcagaaagttacagtcgcccatctgagcgtttgtaagagatggaggcaggagtggtgaggttgattcttcaccacactgaaaccattaggaaaaatccttgtggttaacagcagaggcttcagagtgtaacctgtactcgggcctagaaattatttaaaatggcgactgatacgtctcaaggtgaactcgtccatcctaaggcactcccacttatagtaggagctcagctgatccacgcggacaagttaggtgagaaggtagaagatagcaccatgccgattcgtcgaactgtgaattctacccgggaaactcctcccaaaagcaagcttgctgaaggggaggaagaaaagccagaaccagacataagttcagaggaatctgtctccactgtagaagaacaagagaatgaaactccacctgctacttcgagtgaggcagagcagccaaagggggaacctgagaatgaagagaaggaagaaaataagtcttctgaggaaaccaaaaaggagagagctgatagtattcattccactcttttcataattggtcagaacagttagaaattgcttttaactatagtcatgcattgcttaacaatgggtatacattctgagagatacatctttaggcgatttcatcatcgtgccaacatcataaagtgtacttacacaaacctacgtggtacagcctactacatacctaggctttatgggatagtctgttgcttctaggctacaaacctgtacagcatgttactgtactaaatactgtaggcagttataacacaacggtaagtatttgtgtatttaaacatagaaaaggtacagtaaaaatataatataaaagataaaaaatggtatacctgtgtaggacacctaccatgaatggaccttaaaggattggaagttgtttgggtgagtgagtgagtggtaagtgaatgcaaaggcctaggactactgtgtgcaacttttaaaactaaaaagtttttatttttagcaacttttaaaactaaaaagtttttatttttaaaaacttttaaaactttaccaaaaacaaagacacaagccggacgcaatggtgcacagctgtagccctagctacttaggaagctgaggtggggggattgcttgagtcctgaaatttgaatctagattgggcaacgttgtgagacctcatatttataaaaaaacaaaactaagacacatacacacaccttaacctaggcctgcacaaggtcagggtcatcaatatcactggtcttccacctccagatcttgtcccactcaaggccttcaggggcagcaacacacatggacctgtcatttcctatgataacagtgctgtcttttggaataccttctgaaggacctgcttgaggctgttttacagttaactttttttttgtaggtagaaaacatatactctaatgataaaaagtatagtatagtaaacacataaactagtagcatagctgtttattatcaggtatt

SEQ ID NO: 439451 - DNA, 1564 bp, Homo sapiens
gagtgtgggagcgccgaggctcgcgttccgccgctgcttccgtcgccggggcgggcgccgcggtgtccctgccgagcgtgagccccgaactgtcaccgcgccgagccccagcctcatccgtcggtgtccgcggttgattcttcaccacactgaaaccattaggaaaaatccttgtggttaacagcagaggcttcagagtgtaacctgtactcgggcctagaaattatttaaaatggcgactgatacgtctcaaggtgaactcgtccatcctaaggcactcccacttatagtaggagctcagctgatccacgcggacaagttaggtgagaaggtagaagatagcaccatgccgattcgtcgaactgtgaattctacccgggaaactcctcccaaaagcaagcttgctgaaggggaggaagaaaagccagaaccagacataagttcagaggaatctgtctccactgtagaagaacaagagaatgaaactccacctgctacttcgagtgaggcagagcagccaaagggggaacctgagaatgaagagaaggaagaaaataagtcttctgaggaaaccaaaaaggagagagctgatagtattcattccactcttttcataattggtcagaacagttagaaattgcttttaactatagtcatgcattgcttaacaatgggtatacattctgagagatacatctttaggcgatttcatcatcgtgccaacatcataaagtgtacttacacaaacctacgtggtacagcctactacatacctaggctttatgggatagtctgttgcttctaggctacaaacctgtacagcatgttactgtactaaatactgtaggcagttataacacaacggtaagtatttgtgtatttaaacatagaaaaggtacagtaaaaatataatataaaagataaaaaatggtatacctgtgtaggacacctaccatgaatggaccttaaaggattggaagttgtttgggtgagtgagtgagtggtaagtgaatgcaaaggcctaggactactgtgtgcaacttttaaaactaaaaagtttttatttttagcaacttttaaaactaaaaagtttttatttttaaaaacttttaaaactttaccaaaaacaaagacacaagccggacgcaatggtgcacagctgtagccctagctacttaggaagctgaggtggggggattgcttgagtcctgaaatttgaatctagattgggcaacgttgtgagacctcatatttataaaaaaacaaaactaagacacatacacacaccttaacctaggcctgcacaaggtcagggtcatcaatatcactggtcttccacctccagatcttgtcccactcaaggccttcaggggcagcaacacacatggacctgtcatttcctatgataacagtgctgtcttttggaataccttctgaaggacctgcttgaggctgttttacagttaactttttttttgtaggtagaaaacatatactctaatgataaaaagtatagtatagtaaacacataaactagtagcatagctgtttattatcaggtatt

SEQ ID NO: 439452 - DNA, 1225 bp, Homo sapiens
ttttctctgcctcccccaaccccctgttgtttttatggtcagctttgcattttttttttcttccaattttatctaaacagttgcagagatttttatatttgtagaaagcatcaagaacggtatgccagtcaggtcctggaagtaaaatggaggcacaatatagcactgactgagttgtaaagcctcctgcctggagacttcagttatagctgtaataaataagttttttttttttttttgcaggagagctgatagtattcattccactcttttcataattggtcagaacagttagaaattgcttttaactatagtcatgcattgcttaacaatgggtatacattctgagagatacatctttaggcgatttcatcatcgtgccaacatcataaagtgtacttacacaaacctacgtggtacagcctactacatacctaggctttatgggatagtctgttgcttctaggctacaaacctgtacagcatgttactgtactaaatactgtaggcagttataacacaacggtaagtatttgtgtatttaaacatagaaaaggtacagtaaaaatataatataaaagataaaaaatggtatacctgtgtaggacacctaccatgaatggaccttaaaggattggaagttgtttgggtgagtgagtgagtggtaagtgaatgcaaaggcctaggactactgtgtgcaacttttaaaactaaaaagtttttatttttagcaacttttaaaactaaaaagtttttatttttaaaaacttttaaaactttaccaaaaacaaagacacaagccggacgcaatggtgcacagctgtagccctagctacttaggaagctgaggtggggggattgcttgagtcctgaaatttgaatctagattgggcaacgttgtgagacctcatatttataaaaaaacaaaactaagacacatacacacaccttaacctaggcctgcacaaggtcagggtcatcaatatcactggtcttccacctccagatcttgtcccactcaaggccttcaggggcagcaacacacatggacctgtcatttcctatgataacagtgctgtcttttggaataccttctgaaggacctgcttgaggctgttttacagttaactttttttttgtaggtagaaaacatatactctaatgataaaaagtatagtatagtaaacacataaactagtagcatagctgtttattatcaggtatt

SEQ ID NO: 439453 - DNA, 1658 bp, Homo sapiens
gagtgtgggagcgccgaggctcgcgttccgccgctgcttccgtcgccggggcgggcgccgcggtgtccctgccgagcgtgagccccgaactgtcaccgcgccgagccccagcctcatccgtcggtgtccgcggtccgagctttccccgcctcgctggcggcccgcgctctcccccgccgtgcgcgttcgccgctgtggcctgtagctacctcgcctcgctgctttgtctccgctgctcttgccgtccttcccgcggccttctgcgggcggggctgtcggctgtcgctttgctgctccgcgacggcggccttgagtctcgctcccccggtgggaaacgtagaactggttactcgccaccttaggcggtggggtttgaatgagagcggtgcctcggtaggtcgtcagaaagttacagtcgcccatctgagcgtttgtaagagatggaggcaggagtggtgaggttgattcttcaccacactgaaaccattaggaaaaatccttgtggttaacagcagaggcttcagagtgtaacctgtactcgggcctagaaattatttaaaatggcgactgatacgtctcaaggtgaactcgtccatcctaaggcactcccacttatagtaggagctcagctgatccacgcggacaagttaggtgagaaggtagaagatagcaccatgccgattcgtcgaactgtgaattctacccgggaaactcctcccaaaagcaagcttgctgaaggggaggaagaaaagccagaaccagacataagttcagaggaatctgtctccactgtagaagaacaagagaatgaaactccacctgctacttcgagtgaggcagagcagccaaagggggaacctgagaatgaagagaaggaagaaaataagtcttctgaggaaaccaaaaaggatgagaaagatcagtctaaagaaaaggagaagaaagtgaaaaaaacaattccttcctgggctaccctttctgccagccagctagccagggcccagaaacaaacaccgatggcttcttccccacgtcccaagatggatgcaatcttaactgaggccattaaggcatgcttccagaagagtggtgcatcagtggttgctattcgaaaatacatcatccataagtatccttctctggagctggagagaaggggttatctccttaaacaagcactgaaaagagaattaaatagaggagtcatcaaacaggtatttagctgactcgccacactccacggaagcatatgaaatgatctgtgcagtgctctgagccctaggattcatctttcttttcaccgtagtggcctgactggcattgtatttaggcaaacttcatccactaagaacatcggaacttacacgaacacgtacctacggtggaagctcaattgcactaaggtcccatcaaaagggaggcggattggcaacaagggagggtcaaaacacgagatttccccaactctcgggaagccaagacacagacagaacagccgccacaacgacaccaacacaacaacgacacacgcacaaacaaaaaaaacagcggggcgcgaacacgggcccacaccaccaccacacacgccacacagcaaaacacacggccacaacacagcacagagcggcgaccccgcgcgccacaccacacaaaaggtg

SEQ ID NO: 439454 - DNA, 1200 bp, Homo sapiens
gagtgtgggagcgccgaggctcgcgttccgccgctgcttccgtcgccggggcgggcgccgcggtgtccctgccgagcgtgagccccgaactgtcaccgcgccgagccccagcctcatccgtcggtgtccgcggtccgagctttccccgcctcgctggcggcccgcgctctcccccgccgtgcgcgttcgccgctgtggcctgtagctacctcgcctcgctgctttgtctccgctgctcttgccgtccttcccgcggccttctgcgggcggggctgtcggctgtcgctttgctgctccgcgacggcggccttgagtctcgctcccccggtgggaaacgtagaactggttactcgccaccttaggcggtggggtttgaatgagagcggtgcctcggtaggtcgtcagaaagttacagtcgcccatctgagcgtttgtaagagatggaggcaggagtggtgaggttgattcttcaccacactgaaaccattaggaaaaatccttgtggttaacagcagaggcttcagagtgtaacctgtactcgggcctagaaattatttaaaatggcgactgatacgtctcaaggtgaactcgtccatcctaaggcactcccacttatagtaggagctcagctgatccacgcggacaagttaggtgagaaggtagaagatagcaccatgccgattcgtcgaactgtgaattctacccgggaaactcctcccaaaagcaagcttgctgaaggggaggaagaaaagccagaaccagacataagttcagaggaatctgtctccactgtagaagaacaagagaatgaaactccacctgctacttcgagtgaggcagagcagccaaagggggaacctgagaatgaagagaaggaagaaaataagtcttctgaggaaaccaaaaaggagagagctgatagtattcattccactcttttcataattggtcagaacagttagaaattgcttttaactatagtcatgcattgcttaacaatgggtatacattctgagagatacatctttaggcgatttcatcatcgtgccaacatcataaagtgtacttacacaaacctacgtggtacagcctactacatacctaggctttatgggatagtctgttgcttctaggctacaaacctgtacagcatgttactgtaccttttctatgtttaaatacacaaatacttaccgttgt

SEQ ID NO: 439455 - DNA, 404 bp, Homo sapiens
tataaaaatctgacctagaagacatttcactattttattcctacttctgtgccaggagtgggttgtttttgtgtgcttatgttagaaggcattgatttgtatcaagccattggtagtgtgacctaaaagtctatatatgtttgatgaaatattcagttgaagaattggctttgagaatctgaaagtaaaatttgctattgatgtgtatctatataaagtgatggcagttactttttaatttttaatttttttttttttttttttgcaggagagctgatagtattcattccactcttttcataattggtcagaacagttagaaattgcttttaactatagtcatgcattgcttaacaatgggtatacattctgagagatacatctttaggcgatttcatcatcgt

SEQ ID NO: 439456 - DNA, 4024 bp, Homo sapiens
agcggagagctcggcggctgggactggaggacagcggtggcggaggcgactagcggcggcgggagcggcgccgagaggccgtgcgggacgcgggcgccaggaccggccgaacgcagaggttgattcttcaccacactgaaaccattaggaaaaatccttgtggttaacagcagaggcttcagagtgtaacctgtactcgggcctagaaattatttaaaatggcgactgatacgtctcaaggtgaactcgtccatcctaaggcactcccacttatagtaggagctcagctgatccacgcggacaagttaggtgagaaggtagaagatagcaccatgccgattcgtcgaactgtgaattctacccgggaaactcctcccaaaagcaagcttgctgaaggggaggaagaaaagccagaaccagacataagttcagaggaatctgtctccactgtagaagaacaagagaatgaaactccacctgctacttcgagtgaggcagagcagccaaagggggaacctgagaatgaagagaaggaagaaaataagtcttctgaggaaaccaaaaaggatgagaaagatcagtctaaagaaaaggagaagaaagtgaaaaaaacaattccttcctgggctaccctttctgccagccagctagccagggcccagaaacaaacaccgatggcttcttccccacgtcccaagatggatgcaatcttaactgaggccattaaggcatgcttccagaagagtggtgcatcagtggttgctattcgaaaatacatcatccataagtatccttctctggagctggagagaaggggttatctccttaaacaagcactgaaaagagaattaaatagaggagtcatcaaacaggttaaaggaaaaggtgcttctggaagttttgttgtggttcagaaatcaagaaaaacacctcagaaatccagaaacagaaagaataggagctctgcagtggatccagaaccacaagtaaaattggaggatgtcctcccactggcctttactcgcctttgtgaacctaaagaagcttcctacagtctcatcaggaaatatgtgtctcagtattatcctaagcttagagtggacatcaggcctcagctgttgaagaacgctctgcagagagcagtagagaggggccagttagaacagataactggcaaaggtgcttcggggacattccagctgaagaaatcaggggagaaacccctgcttggtggaagcctgatggaatatgcaatcttgtctgccattgctgccatgaatgagccgaagacctgctctaccactgctctgaagaagtatgtcctagagaatcacccaggaaccaattctaactatcaaatgcatttgctgaaaaaaaccctgcagaaatgcgaaaagaatgggtggatggaacagatctctgggaaagggttcagtggcaccttccagctctgttttccctattatcccagcccaggagttctgtttccgaagaaagagccagatgattctagagatgaggatgaagatgaagatgagtcatcagaagaagactctgaggatgaagagccgccacctaagagaaggttgcagaagaaaaccccagccaagtccccagggaaggccgcatctgtgaagcagagagggtccaaacctgcacctaaagtctcagctgcccagcgggggaaagctaggcccttgcctaagaaagcacctcctaaggccaaaacgcctgccaagaagaccagaccctcatccacagtcatcaagaaacctagtggtggctcctcaaagaagcctgcaaccagtgcaagaaaggaagtaaaattgccgggcaagggcaaatccaccatgaagaagtctttcagagtgaaaaagtaaattttataggaaaaaagggtatcatgatgaaattcaaaatcttattttctaaggtcagtgtgcatttgtttagttttgatgcttttcaaattacattattttcctcccctatgaacattgtggggagggactctaaataaaccagtttaggcatttgctagctttaggtgcttttattggtgcctgcccttttccttgttcattttaatttctgcaataatcctggactttcctaaactatgtaatgtatacttgtcctttttctctgcctcccccaaccccctgttgtttttatggtcagctttgccttttttttttcttccaattttatctaaacagttgcagagatttttatatttgtagaaagcatcaagaacggtatgccagtcaggtcctggaagtaaaatggaggcacaatatagcactgactgagttgtaaagcctcctgcctggagacttcagttatagctgtaataattaatcttatttataaaagccactccactaaccttttctctccaactgtaaacacagagacagctttgggaataagccaaaaacagggtgatctcattagattttgaagatatatgactcctttgggctacatttcatattgatcaatttctaggtatttttcactggcccaaagtattgcattcccttaacagcaagcacaagttctctatatcacttgttttttgttgttgttgttgttgtcgtcgttgttttgagacggagtcttgctcaggtgccccggagtgcagtggtgcaatctcagctcactgcaacctccacctcctgggttcaagcaattctcctgcttcagcctcccgagtagctgggattacaggtgtgtaccaccacgcctggcaatttttttgtatttttagtagagatggggtttcgccgtgttggtcaggctggtctcgaactcctgacctcaggtgatccgcctgcctcggcctcccaaagtgctgggattacaggagtgagccactgtgcctggcctatcccacttggtttttgactgaaggggaagtgtagaaatatattgatttgtgatttctggtgtcacctgtgttaccaaaaatcaaaacaaatcttttttattttttattattattattatttttgagacagagtctcgctctgtcgcccagtgtggagtgcagtggtgtgatcttggctcactgcaaactccgcctcccaggttcaagcgattctcccacctcagcctcctgagttgggtcctacaggcgcacacgaccacgcccagctaattttttgtatttttagtagagttggggtttcaccatgttagccaggatggtctcgatctcctgacctcgtgatccactcacctcagcctcccaaaatcctggggttacagatgtgagctaccactcacggcccaaatcttcttgatcatatgtttaaatatattttttaatatttggagcatgagttgtcacttcttgtttgccttttttataaggaaatgttggagagttacatcattgctaatgtagaaatgttaagtggaaaaatatacagtttggtaaaataaactagattctacatttatttgtgggtttttttcccctcctttctttccacagcacttttgatatcaagcaagtggcttcctttttgagatattaaaaaaaaaaagaaaaggaaaaaagtaaatgaagcccaactacctaaccctttcttatttgtatttgttttagtattgtgaagttgtgttaaatagtactagctagaaatacaaatttctggttatcatttctcttccctgtggcacttgacattttaattgtcttaaagtttttgaagtacatcttctggccccttgagtactgccagaggcaaaagatgtttgtttcttattcattccacttttgtctcctgggatcccttctgtagcctaaagtatggctgggaaatggacttgagaagattggcttgaattagatcataatcatgtgtgatcccatcatgaattcattggaatttgtgttgcatgtaaggcaatctttcctgttgtaaatcttccttttttaatgtacatatattttgaaaaatatgaataaacatgaaattttaaaagctaaaaaaaaatagcttatatttaaagg

SEQ ID NO: 439457 - DNA, 4685 bp, Homo sapiens
ctaatttttgtattttcaggagagacgggggtttcaccatgttggccaggatggtctcaatcttttgaccttgtgatccgcccaccttggcctcccaaagtgctgggattacaggcatgagtcaccgcgcccagccaatatgctatatttttgtatgactggcagcaccgtaggtttgtttacaccaatgtcaccacaaacaagtgagtaacgtgctgcgctgtgatattaccacagctatcatgttaaccaggtaataggaggttttcagttccattataatcttaagggaccaccattgtatatgtggtctgttgaccaaatattgttacacagcacatgaccataaaagaataacttagtaataactataccttctagctataatcttcagggtattctttatctgagtttcataagtatagctaaggtctgtggaatttatagcaactatcgtgtgtgggtgtgggtgtgtttgtgtgtgtgtgtgtgtgtttaatggagatggcgtctcactatgttggctaggttgggcttgaactcctggcctcaagctgtcctccctcctcagcctcctaaattgctgggattacaggcatgagccactgcacccagcctatcgtctgttgttaaatgttctaatgcacctattaggtgcacagagtactgttatatactcagaataaaatttacataatgctttaaatctcacaaaattgttttgataaacatactcttataattcttgcaacaccttgggaaatagttggttctatattactgttttatagctgaggagaaagactcacatcatttactaagatcatatagctagctagtaaatgtttgagtgaaaatacaaacaaaggttttctgactttaagagcttgagttttttccactataccatattgcatctgttgtaattgttaactaatgtgcattttaaaattctcatttgtcttatgtactgagcccttataccagtgctaatttatgtgactcctttctcctgcagctaagagaaaaatacctttttaattcatttatagtacccagtttttaaagaagatttattttgtaaaattttgcttatggtacatgtcatcttagcctgtaaataaattaaagcattaatttttatccctccctggtcttttcctccttctgactttatacgtctttctagagagcttatcttctataataacaattctttgttttaaagttgagaaagatcagtctaaagaaaaggagaagaaagtgaaaaaaacaattccttcctgggctaccctttctgccagccagctagccagggcccagaaacaaacaccgatggcttcttccccacgtcccaagatggatgcaatcttaactgaggccattaaggcatgcttccagaagagtggtgcatcagtggttgctattcgaaaatacatcatccataagtatccttctctggagctggagagaaggggttatctccttaaacaagcactgaaaagagaattaaatagaggagtcatcaaacaggttaaaggaaaaggtgcttctggaagttttgttgtggttcagaaatcaagaaaaacacctcagaaatccagaaacagaaagaataggagctctgcagtggatccagaaccacaagtaaaattggaggatgtcctcccactggcctttactcgcctttgtgaacctaaagaagcttcctacagtctcatcaggaaatatgtgtctcagtattatcctaagcttagagtggacatcaggcctcagctgttgaagaacgctctgcagagagcagtagagaggggccagttagaacagataactggcaaaggtgcttcggggacattccagctgaagaaatcaggggagaaacccctgcttggtggaagcctgatggaatatgcaatcttgtctgccattgctgccatgaatgagccgaagacctgctctaccactgctctgaagaagtatgtcctagagaatcacccaggaaccaattctaactatcaaatgcatttgctgaaaaaaaccctgcagaaatgcgaaaagaatgggtggatggaacagatctctgggaaagggttcagtggcaccttccagctctgttttccctattatcccagcccaggagttctgtttccgaagaaagagccagatgattctagagatgaggatgaagatgaagatgagtcatcagaagaagactctgaggatgaagagccgccacctaagagaaggttgcagaagaaaaccccagccaagtccccagggaaggccgcatctgtgaagcagagagggtccaaacctgcacctaaagtctcagctgcccagcgggggaaagctaggcccttgcctaagaaagcacctcctaaggccaaaacgcctgccaagaagaccagaccctcatccacagtcatcaagaaacctagtggtggctcctcaaagaagcctgcaaccagtgcaagaaaggaagtaaaattgccgggcaagggcaaatccaccatgaagaagtctttcagagtgaaaaagtaaattttataggaaaaaagggtatcatgatgaaattcaaaatcttattttctaaggtcagtgtgcatttgtttagttttgatgcttttcaaattacattattttcctcccctatgaacattgtggggagggactctaaataaaccagtttaggcatttgctagctttaggtgcttttattggtgcctgcccttttccttgttcattttaatttctgcaataatcctggactttcctaaactatgtaatgtatacttgtcctttttctctgcctcccccaaccccctgttgtttttatggtcagctttgccttttttttttcttccaattttatctaaacagttgcagagatttttatatttgtagaaagcatcaagaacggtatgccagtcaggtcctggaagtaaaatggaggcacaatatagcactgactgagttgtaaagcctcctgcctggagacttcagttatagctgtaataattaatcttatttataaaagccactccactaaccttttctctccaactgtaaacacagagacagctttgggaataagccaaaaacagggtgatctcattagattttgaagatatatgactcctttgggctacatttcatattgatcaatttctaggtatttttcactggcccaaagtattgcattcccttaacagcaagcacaagttctctatatcacttgttttttgttgttgttgttgttgtcgtcgttgttttgagacggagtcttgctcaggtgccccggagtgcagtggtgcaatctcagctcactgcaacctccacctcctgggttcaagcaattctcctgcttcagcctcccgagtagctgggattacaggtgtgtaccaccacgcctggcaatttttttgtatttttagtagagatggggtttcgccgtgttggtcaggctggtctcgaactcctgacctcaggtgatccgcctgcctcggcctcccaaagtgctgggattacaggagtgagccactgtgcctggcctatcccacttggtttttgactgaaggggaagtgtagaaatatattgatttgtgatttctggtgtcacctgtgttaccaaaaatcaaaacaaatcttttttattttttattattattattatttttgagacagagtctcgctctgtcgcccagtgtggagtgcagtggtgtgatcttggctcactgcaaactccgcctcccaggttcaagcgattctcccacctcagcctcctgagttgggtcctacaggcgcacacgaccacgcccagctaattttttgtatttttagtagagttggggtttcaccatgttagccaggatggtctcgatctcctgacctcgtgatccactcacctcagcctcccaaaatcctggggttacagatgtgagctaccactcacggcccaaatcttcttgatcatatgtttaaatatattttttaatatttggagcatgagttgtcacttcttgtttgccttttttataaggaaatgttggagagttacatcattgctaatgtagaaatgttaagtggaaaaatatacagtttggtaaaataaactagattctacatttatttgtgggtttttttcccctcctttctttccacagcacttttgatatcaagcaagtggcttcctttttgagatattaaaaaaaaaaagaaaaggaaaaaagtaaatgaagcccaactacctaaccctttcttatttgtatttgttttagtattgtgaagttgtgttaaatagtactagctagaaatacaaatttctggttatcatttctcttccctgtggcacttgacattttaattgtcttaaagtttttgaagtacatcttctggccccttgagtactgccagaggcaaaagatgtttgtttcttattcattccacttttgtctcctgggatcccttctgtagcctaaagtatggctgggaaatggacttgagaagattggcttgaattagatcataatcatgtgtgatcccatcatgaattcattggaatttgtgttgcatgtaaggcaatctttcctgttgtaaatcttccttttttaatgtacatatattttgaaaaatatgaataaacatgaaattttaaaagctaaaaaaaaatagcttatatttaaagg

SEQ ID NO: 439458 - DNA, 3492 bp, Homo sapiens
tcccattctgtaggttgcctgttcactctgatgatagtttcttatgctgtgcagaagctctttaattagatcccatttgtcaattttggcttttgttgccattgcttttggtgttttagtcatgaagtctttgcccatgccgatggcttcttccccacgtcccaagatggatgcaatcttaactgaggccattaaggcatgcttccagaagagtggtgcatcagtggttgctattcgaaaatacatcatccataagtatccttctctggagctggagagaaggggttatctccttaaacaagcactgaaaagagaattaaatagaggagtcatcaaacaggttaaaggaaaaggtgcttctggaagttttgttgtggttcagaaatcaagaaaaacacctcagaaatccagaaacagaaagaataggagctctgcagtggatccagaaccacaagtaaaattggaggatgtcctcccactggcctttactcgcctttgtgaacctaaagaagcttcctacagtctcatcaggaaatatgtgtctcagtattatcctaagcttagagtggacatcaggcctcagctgttgaagaacgctctgcagagagcagtagagaggggccagttagaacagataactggcaaaggtgcttcggggacattccagctgaagaaatcaggggagaaacccctgcttggtggaagcctgatggaatatgcaatcttgtctgccattgctgccatgaatgagccgaagacctgctctaccactgctctgaagaagtatgtcctagagaatcacccaggaaccaattctaactatcaaatgcatttgctgaaaaaaaccctgcagaaatgcgaaaagaatgggtggatggaacagatctctgggaaagggttcagtggcaccttccagctctgttttccctattatcccagcccaggagttctgtttccgaagaaagagccagatgattctagagatgaggatgaagatgaagatgagtcatcagaagaagactctgaggatgaagagccgccacctaagagaaggttgcagaagaaaaccccagccaagtccccagggaaggccgcatctgtgaagcagagagggtccaaacctgcacctaaagtctcagctgcccagcgggggaaagctaggcccttgcctaagaaagcacctcctaaggccaaaacgcctgccaagaagaccagaccctcatccacagtcatcaagaaacctagtggtggctcctcaaagaagcctgcaaccagtgcaagaaaggaagtaaaattgccgggcaagggcaaatccaccatgaagaagtctttcagagtgaaaaagtaaattttataggaaaaaagggtatcatgatgaaattcaaaatcttattttctaaggtcagtgtgcatttgtttagttttgatgcttttcaaattacattattttcctcccctatgaacattgtggggagggactctaaataaaccagtttaggcatttgctagctttaggtgcttttattggtgcctgcccttttccttgttcattttaatttctgcaataatcctggactttcctaaactatgtaatgtatacttgtcctttttctctgcctcccccaaccccctgttgtttttatggtcagctttgccttttttttttcttccaattttatctaaacagttgcagagatttttatatttgtagaaagcatcaagaacggtatgccagtcaggtcctggaagtaaaatggaggcacaatatagcactgactgagttgtaaagcctcctgcctggagacttcagttatagctgtaataattaatcttatttataaaagccactccactaaccttttctctccaactgtaaacacagagacagctttgggaataagccaaaaacagggtgatctcattagattttgaagatatatgactcctttgggctacatttcatattgatcaatttctaggtatttttcactggcccaaagtattgcattcccttaacagcaagcacaagttctctatatcacttgttttttgttgttgttgttgttgtcgtcgttgttttgagacggagtcttgctcaggtgccccggagtgcagtggtgcaatctcagctcactgcaacctccacctcctgggttcaagcaattctcctgcttcagcctcccgagtagctgggattacaggtgtgtaccaccacgcctggcaatttttttgtatttttagtagagatggggtttcgccgtgttggtcaggctggtctcgaactcctgacctcaggtgatccgcctgcctcggcctcccaaagtgctgggattacaggagtgagccactgtgcctggcctatcccacttggtttttgactgaaggggaagtgtagaaatatattgatttgtgatttctggtgtcacctgtgttaccaaaaatcaaaacaaatcttttttattttttattattattattatttttgagacagagtctcgctctgtcgcccagtgtggagtgcagtggtgtgatcttggctcactgcaaactccgcctcccaggttcaagcgattctcccacctcagcctcctgagttgggtcctacaggcgcacacgaccacgcccagctaattttttgtatttttagtagagttggggtttcaccatgttagccaggatggtctcgatctcctgacctcgtgatccactcacctcagcctcccaaaatcctggggttacagatgtgagctaccactcacggcccaaatcttcttgatcatatgtttaaatatattttttaatatttggagcatgagttgtcacttcttgtttgccttttttataaggaaatgttggagagttacatcattgctaatgtagaaatgttaagtggaaaaatatacagtttggtaaaataaactagattctacatttatttgtgggtttttttcccctcctttctttccacagcacttttgatatcaagcaagtggcttcctttttgagatattaaaaaaaaaaagaaaaggaaaaaagtaaatgaagcccaactacctaaccctttcttatttgtatttgttttagtattgtgaagttgtgttaaatagtactagctagaaatacaaatttctggttatcatttctcttccctgtggcacttgacattttaattgtcttaaagtttttgaagtacatcttctggccccttgagtactgccagaggcaaaagatgtttgtttcttattcattccacttttgtctcctgggatcccttctgtagcctaaagtatggctgggaaatggacttgagaagattggcttgaattagatcataatcatgtgtgatcccatcatgaattcattggaatttgtgttgcatgtaaggcaatctttcctgttgtaaatcttccttttttaatgtacatatattttgaaaaatatgaataaacatgaaattttaaaagctaaaaaaaaatagcttatatttaaagg

SEQ ID NO: 439459 - DNA, 4459 bp, Homo sapiens
gagtgtgggagcgccgaggctcgcgttccgccgctgcttccgtcgccggggcgggcgccgcggtgtccctgccgagcgtgagccccgaactgtcaccgcgccgagccccagcctcatccgtcggtgtccgcggtccgagctttccccgcctcgctggcggcccgcgctctcccccgccgtgcgcgttcgccgctgtggcctgtagctacctcgcctcgctgctttgtctccgctgctcttgccgtccttcccgcggccttctgcgggcggggctgtcggctgtcgctttgctgctccgcgacggcggccttgagtctcgctcccccggtgggaaacgtagaactggttactcgccaccttaggcggtggggtttgaatgagagcggtgcctcggtaggtcgtcagaaagttacagtcgcccatctgagcgtttgtaagagatggaggcaggagtggtgaggttgattcttcaccacactgaaaccattaggaaaaatccttgtggttaacagcagaggcttcagagtgtaacctgtactcgggcctagaaattatttaaaatggcgactgatacgtctcaaggtgaactcgtccatcctaaggcactcccacttatagtaggagctcagctgatccacgcggacaagttaggtgagaaggtagaagatagcaccatgccgattcgtcgaactgtgaattctacccgggaaactcctcccaaaagcaagcttgctgaaggggaggaagaaaagccagaaccagacataagttcagaggaatctgtctccactgtagaagaacaagagaatgaaactccacctgctacttcgagtgaggcagagcagccaaagggggaacctgagaatgaagagaaggaagaaaataagtcttctgaggaaaccaaaaaggatgagaaagatcagtctaaagaaaaggagaagaaagtgaaaaaaacaattccttcctgggctaccctttctgccagccagctagccagggcccagaaacaaacaccgatggcttcttccccacgtcccaagatggatgcaatcttaactgaggccattaaggcatgcttccagaagagtggtgcatcagtggttgctattcgaaaatacatcatccataagtatccttctctggagctggagagaaggggttatctccttaaacaagcactgaaaagagaattaaatagaggagtcatcaaacaggttaaaggaaaaggtgcttctggaagttttgttgtggttcagaaatcaagaaaaacacctcagaaatccagaaacagaaagaataggagctctgcagtggatccagaaccacaagtaaaattggaggatgtcctcccactggcctttactcgcctttgtgaacctaaagaagcttcctacagtctcatcaggaaatatgtgtctcagtattatcctaagcttagagtggacatcaggcctcagctgttgaagaacgctctgcagagagcagtagagaggggccagttagaacagataactggcaaaggtgcttcggggacattccaggaactccgacccacctggtgcagaggagtcttgtcttgacctgctttgggagagtgttgtcttgatgcttttctcttcctccttggaaaacagctgaagaaatcaggggagaaacccctgcttggtggaagcctgatggaatatgcaatcttgtctgccattgctgccatgaatgagccgaagacctgctctaccactgctctgaagaagtatgtcctagagaatcacccaggaaccaattctaactatcaaatgcatttgctgaaaaaaaccctgcagaaatgcgaaaagaatgggtggatggaacagatctctgggaaagggttcagtggcaccttccagctctgttttccctattatcccagcccaggagttctgtttccgaagaaagagccagatgattctagagatgaggatgaagatgaagatgagtcatcagaagaagactctgaggatgaagagccgccacctaagagaaggttgcagaagaaaaccccagccaagtccccagggaaggccgcatctgtgaagcagagagggtccaaacctgcacctaaagtctcagctgcccagcgggggaaagctaggcccttgcctaagaaagcacctcctaaggccaaaacgcctgccaagaagaccagaccctcatccacagtcatcaagaaacctagtggtggctcctcaaagaagcctgcaaccagtgcaagaaaggaagtaaaattgccgggcaagggcaaatccaccatgaagaagtctttcagagtgaaaaagtaaattttataggaaaaaagggtatcatgatgaaattcaaaatcttattttctaaggtcagtgtgcatttgtttagttttgatgcttttcaaattacattattttcctcccctatgaacattgtggggagggactctaaataaaccagtttaggcatttgctagctttaggtgcttttattggtgcctgcccttttccttgttcattttaatttctgcaataatcctggactttcctaaactatgtaatgtatacttgtcctttttctctgcctcccccaaccccctgttgtttttatggtcagctttgccttttttttttcttccaattttatctaaacagttgcagagatttttatatttgtagaaagcatcaagaacggtatgccagtcaggtcctggaagtaaaatggaggcacaatatagcactgactgagttgtaaagcctcctgcctggagacttcagttatagctgtaataattaatcttatttataaaagccactccactaaccttttctctccaactgtaaacacagagacagctttgggaataagccaaaaacagggtgatctcattagattttgaagatatatgactcctttgggctacatttcatattgatcaatttctaggtatttttcactggcccaaagtattgcattcccttaacagcaagcacaagttctctatatcacttgttttttgttgttgttgttgttgtcgtcgttgttttgagacggagtcttgctcaggtgccccggagtgcagtggtgcaatctcagctcactgcaacctccacctcctgggttcaagcaattctcctgcttcagcctcccgagtagctgggattacaggtgtgtaccaccacgcctggcaatttttttgtatttttagtagagatggggtttcgccgtgttggtcaggctggtctcgaactcctgacctcaggtgatccgcctgcctcggcctcccaaagtgctgggattacaggagtgagccactgtgcctggcctatcccacttggtttttgactgaaggggaagtgtagaaatatattgatttgtgatttctggtgtcacctgtgttaccaaaaatcaaaacaaatcttttttattttttattattattattatttttgagacagagtctcgctctgtcgcccagtgtggagtgcagtggtgtgatcttggctcactgcaaactccgcctcccaggttcaagcgattctcccacctcagcctcctgagttgggtcctacaggcgcacacgaccacgcccagctaattttttgtatttttagtagagttggggtttcaccatgttagccaggatggtctcgatctcctgacctcgtgatccactcacctcagcctcccaaaatcctggggttacagatgtgagctaccactcacggcccaaatcttcttgatcatatgtttaaatatattttttaatatttggagcatgagttgtcacttcttgtttgccttttttataaggaaatgttggagagttacatcattgctaatgtagaaatgttaagtggaaaaatatacagtttggtaaaataaactagattctacatttatttgtgggtttttttcccctcctttctttccacagcacttttgatatcaagcaagtggcttcctttttgagatattaaaaaaaaaaagaaaaggaaaaaagtaaatgaagcccaactacctaaccctttcttatttgtatttgttttagtattgtgaagttgtgttaaatagtactagctagaaatacaaatttctggttatcatttctcttccctgtggcacttgacattttaattgtcttaaagtttttgaagtacatcttctggccccttgagtactgccagaggcaaaagatgtttgtttcttattcattccacttttgtctcctgggatcccttctgtagcctaaagtatggctgggaaatggacttgagaagattggcttgaattagatcataatcatgtgtgatcccatcatgaattcattggaatttgtgttgcatgtaaggcaatctttcctgttgtaaatcttccttttttaatgtacatatattttgaaaaatatgaataaacatgaaattttaaaagctaaaaaaaaatagcttatatttaaagg

SEQ ID NO: 439460 - DNA, 2528 bp, Homo sapiens
  misc_feature (22)..(23): n is a, c, g, or t
  misc_feature (27)..(27): n is a, c, g, or t
gcaggctggtaccgaccgcggnngtanggatatcgtcgaccacggcgctcgagtaagactctgaggatgaagagccgtcacctaagagagttgcagaagaaaaccccagccaagtccccagggaaggccgcatctgtgaagcagagagggtccaaacctgcacctaaagtctcagctgcccagcgggggaaagctaggcccttgcctaagaaagcacctcctaaggccaaaacgcctgccaagaagaccagaccctcatccacagtcatcaagaaacctagtggtggctcctcaaagaagcctgcaaccagtgcaagaaaggaagtaaaattgccgggcaagggcaaatccaccatgaagaagtctttcagagtgaaaaagtaaattttataggaaaaaagggtatcatgatgaaattcaaaatcttattttctaaggtcagtgtgcatttgtttagttttgatgcttttcaaattacattattttcctcccctatgaacattgtggggagggactctaaataaaccagtttaggcatttgctagctttaggtgcttttattggtgcctgcccttttccttgttcattttaatttctgcaataatcctggactttcctaaactatgtaatgtatacttgtcctttttctctgcctcccccaaccccctgttgtttttatggtcagctttgccttttttttttcttccaattttatctaaacagttgcagagatttttatatttgtagaaagcatcaagaacggtatgccagtcaggtcctggaagtaaaatggaggcacaatatagcactgactgagttgtaaagcctcctgcctggagacttcagttatagctgtaataattaatcttatttataaaagccactccactaaccttttctctccaactgtaaacacagagacagctttgggaataagccaaaaacagggtgatctcattagattttgaagatatatgactcctttgggctacatttcatattgatcaatttctaggtatttttcactggcccaaagtattgcattcccttaacagcaagcacaagttctctatatcacttgttttttgttgttgttgttgttgtcgtcgttgttttgagacggagtcttgctcaggtgccccggagtgcagtggtgcaatctcagctcactgcaacctccacctcctgggttcaagcaattctcctgcttcagcctcccgagtagctgggattacaggtgtgtaccaccacgcctggcaatttttttgtatttttagtagagatggggtttcgccgtgttggtcaggctggtctcgaactcctgacctcaggtgatccgcctgcctcggcctcccaaagtgctgggattacaggagtgagccactgtgcctggcctatcccacttggtttttgactgaaggggaagtgtagaaatatattgatttgtgatttctggtgtcacctgtgttaccaaaaatcaaaacaaatcttttttattttttattattattattatttttgagacagagtctcgctctgtcgcccagtgtggagtgcagtggtgtgatcttggctcactgcaaactccgcctcccaggttcaagcgattctcccacctcagcctcctgagttgggtcctacaggcgcacacgaccacgcccagctaattttttgtatttttagtagagttggggtttcaccatgttagccaggatggtctcgatctcctgacctcgtgatccactcacctcagcctcccaaaatcctggggttacagatgtgagctaccactcacggcccaaatcttcttgatcatatgtttaaatatattttttaatatttggagcatgagttgtcacttcttgtttgccttttttataaggaaatgttggagagttacatcattgctaatgtagaaatgttaagtggaaaaatatacagtttggtaaaataaactagattctacatttatttgtgggtttttttcccctcctttctttccacagcacttttgatatcaagcaagtggcttcctttttgagatattaaaaaaaaaaagaaaaggaaaaaagtaaatgaagcccaactacctaaccctttcttatttgtatttgttttagtattgtgaagttgtgttaaatagtactagctagaaatacaaatttctggttatcatttctcttccctgtggcacttgacattttaattgtcttaaagtttttgaagtacatcttctggccccttgagtactgccagaggcaaaagatgtttgtttcttattcattccacttttgtctcctgggatcccttctgtagcctaaagtatggctgggaaatggacttgagaagattggcttgaattagatcataatcatgtgtgatcccatcatgaattcattggaatttgtgttgcatgtaaggcaatctttcctgttgtaaatcttccttttttaatgtacatatattttgaaaaatatgaataaacatgaaattttaaaagctaaaaaaaaatagcttatatttaaagg

SEQ ID NO: 439461 - DNA, 3999 bp, Homo sapiens
gagtgtgggagcgccgaggctcgcgttccgccgctgcttccgtcgccggggcgggcgccgcggtgtccctgccgagcgtgagccccgaactgtcaccgcgccgagccccagcctcatccgtcggtgtccgcggtccgagctttccccgcctcgctggcggcccgcgctctcccccgccgtgcgcgttcgccgctgtggcctgtagctacctcgcctcgctgctttgtctccgctgctcttgccgtccttcccgcggccttctgcgggcggggctgtcggctgtcgctttgctgctccgcgacggcggccttgagtctcgctcccccggtgggaaacgtagaactggttactcgccaccttaggcggtggggtttgaatgagagcggtgcctcggtaggtcgtcagaaagttacagtcgcccatctgagcgtttgtaagagatggaggcaggagtggtgaggttgattcttcaccacactgaaaccattaggaaaaatccttgtggttaacagcagaggcttcagagtgtaacctgtactcgggcctagaaattatttaaaatggcgactgatacgtctcaaggtgaactcgtccatcctaaggcactcccacttatagtaggagctcagctgatccacgcggacaagttaggtgagaaggtagaagatagcaccatgccgattcgtcgaactgtgaattctacccgggaaactcctcccaaaagcaagcttgctgaaggggaggaagaaaagccagaaccagacataagttcagaggaatctgtctccactgtagaagaacaagagaatgaaactccacctgctacttcgagtgaggcagagcagccaaagggggaacctgagaatgaagagaaggaagaaaataagtcttctgaggaaaccaaaaaggatgagaaagatcagtctaaagaaaaggagaagaaagtgaaaaaaacaattccttcctgggctaccctttctgccagccagctagccagggcccagaaacaaacaccgatggcttcttccccacgtcccaagatggatgcaatcttaactgaggccattaaggcatgcttccagaagagtggtgcatcagtggttgctattcgaaaatacatcatccataagtatccttctctggagctggagagaaggggttatctccttaaacaagcactgaaaagagaattaaatagaggagtcatcaaacaggttaaaggaaaaggtgcttctggaagttttgttgtggttcagaaatcaagaaaaacacctcagaaatccagaaacagaaagaataggagctctgcagtggatccagaaccacaagtaaaattggaggatgtcctcccactggcctttactcgcctttgtgaacctaaagaagcttcctacagtctcatcaggaaatatgtgtctcagtattatcctaagcttagagtggacatcaggcctcagctgttgaagaacgctctgcagagagcagtagagaggggccagttagaacagataactggcaaaggtgcttcggggacattccagctgaagaaatcaggggagaaacccctgcttggtggaagcctgatggaatatgcaatcttgtctgccattgctgccatgaatgagccgaagacctgctctaccactgctctgaagaagtatgtcctagagaatcacccaggaaccaattctaactatcaaatgcatttgctgaaaaaaaccctgcagaaatgcgaaaagaatgggtggatggaacagatctctgggaaagggttcagtggcaccttccagctctgttttccctattatcccagcccaggagttctgtttccgaagaaagagccagatgattctagagatgaggatgaagatgaagatgagtcatcagaagaagactctgaggatgaagagccgccacctaagagaaggttgcagaagaaaaccccagccaagtccccagggaaggccgcatctgtgaagcagagagggtccaaacctgcacctaaagtctcagctgcccagcgggggaaagctaggcccttgcctaagaaagcacctcctaaggccaaaacgcctgccaagaagaccagaccctcatccacagtcatcaagaaacctagtggtggctcctcaaagaagcctgcaaccagtgcaagaaaggaagtaaaattgccgggcaagggcaaatccaccatgaagaagtctttcagagtgaaaaagtaaattttataggaaaaaagggtatcatgatgaaattcaaaatcttattttctaaggtcagtgtgcatttgtttagttttgatgcttttcaaattacattattttcctcccctatgaacattgtggggagggactctaaataaaccagtttaggcatttgctagctttaggtgcttttattggtgcctgcccttttccttgttcattttaatttctgcaataatcctggactttcctaaactatgtaatgtatacttgtcctttttctctgcctcccccaaccccctgttgtttttatggtcagctttgccttttttttttcttccaattttatctaaacagttgcagagatttttatatttgtagaaagcatcaagaacggtatgccagtcaggtcctggaagtaaaatggaggcacaatatagcactgactgagttgtaaagcctcctgcctggagacttcagttataggagtagctgggattacaggtgtgtaccaccacgcctggcaatttttttgtatttttagtagagatggggtttcgccgtgttggtcaggctggtctcgaactcctgacctcaggtgatccgcctgcctcggcctcccaaagtgctgggattacaggagtgagccactgtgcctggcctatcccacttggtttttgactgaaggggaagtgtagaaatatattgatttgtgatttctggtgtcacctgtgttaccaaaaatcaaaacaaatcttttttattttttattattattattatttttgagacagagtctcgctctgtcgcccagtgtggagtgcagtggtgtgatcttggctcactgcaaactccgcctcccaggttcaagcgattctcccacctcagcctcctgagttgggtcctacaggcgcacacgaccacgcccagctaattttttgtatttttagtagagttggggtttcaccatgttagccaggatggtctcgatctcctgacctcgtgatccactcacctcagcctcccaaaatcctggggttacagatgtgagctaccactcacggcccaaatcttcttgatcatatgtttaaatatattttttaatatttggagcatgagttgtcacttcttgtttgccttttttataaggaaatgttggagagttacatcattgctaatgtagaaatgttaagtggaaaaatatacagtttggtaaaataaactagattctacatttatttgtgggtttttttcccctcctttctttccacagcacttttgatatcaagcaagtggcttcctttttgagatattaaaaaaaaaaagaaaaggaaaaaagtaaatgaagcccaactacctaaccctttcttatttgtatttgttttagtattgtgaagttgtgttaaatagtactagctagaaatacaaatttctggttatcatttctcttccctgtggcacttgacattttaattgtcttaaagtttttgaagtacatcttctggccccttgagtactgccagaggcaaaagatgtttgtttcttattcattccacttttgtctcctgggatcccttctgtagcctaaagtatggctgggaaatggacttgagaagattggcttgaattagatcataatcatgtgtgatcccatcatgaattcattggaatttgtgttgcatgtaaggcaatctttcctgttgtaaatcttccttttttaatgtacatatattttgaaaaatatgaataaacatgaaattttaaaagctaaaaaaaaatagcttatatttaaagg

SEQ ID NO: 439462 - DNA, 2887 bp, Homo sapiens
gagtgtgggagcgccgaggctcgcgttccgccgctgcttccgtcgccggggcgggcgccgcggtgtccctgccgagcgtgagccccgaactgtcaccgcgccgagccccagcctcatccgtcggtgtccgcggtccgagctttccccgcctcgctggcggcccgcgctctcccccgccgtgcgcgttcgccgctgtggcctgtagctacctcgcctcgctgctttgtctccgctgctcttgccgtccttcccgcggccttctgcgggcggggctgtcggctgtcgctttgctgctccgcgacggcggccttgagtctcgctcccccggtgggaaacgtagaactggttactcgccaccttaggcggtggggtttgaatgagagcggtgcctcggtaggtcgtcagaaagttacagtcgcccatctgagcgtttgtaagagatggaggcaggagtggtgaggttgattcttcaccacactgaaaccattaggaaaaatccttgtggttaacagcagaggcttcagagtgtaacctgtactcgggcctagaaattatttaaaatggcgactgatacgtctcaaggtgaactcgtccatcctaaggcactcccacttatagtaggagctcagctgatccacgcggacaagttaggtgagaaggtagaagatagcaccatgccgattcgtcgaactgtgaattctacccgggaaactcctcccaaaagcaagcttgctgaaggggaggaagaaaagccagaaccagacataagttcagaggaatctgtctccactgtagaagaacaagagaatgaaactccacctgctacttcgagtgaggcagagcagccaaagggggaacctgagaatgaagagaaggaagaaaataagtcttctgaggaaaccaaaaaggatgagaaagatcagtctaaagaaaaggagaagaaagtgaaaaaaacaattccttcctgggctaccctttctgccagccagctagccagggcccagaaacaaacaccgatggcttcttccccacgtcccaagatggatgcaatcttaactgaggccattaaggcatgcttccagaagagtggtgcatcagtggttgctattcgaaaatacatcatccataagtatccttctctggagctggagagaaggggttatctccttaaacaagcactgaaaagagaattaaatagaggagtcatcaaacaggttaaaggaaaaggtgcttctggaagttttgttgtggttcagaaatcaagaaaaacacctcagaaatccagaaacagaaagaataggagctctgcagtggatccagaaccacaagtaaaattggaggatgtcctcccactggcctttactcgcctttgtgaacctaaagaagcttcctacagtctcatcaggaaatatgtgtctcagtattatcctaagcttagagtggacatcaggcctcagctgttgaagaacgctctgcagagagcagtagagaggggccagttagaacagataactggcaaaggtgcttcggggacattccagaaatggggtttcgccgtgttgcccaggctactcttgaactcctgggttcagtgaagtagtctgcctgcctcagcttcccaaagtgttggaattacaggtgtgatccaccacacctgaccagggctcgagtttctccatatcctcctcaacgtttgttactcttttttattatagccatactagtggatatagggtatctcgttgtagttttgattggcatttccctaataattactgatgttgagcatctcttgtgcttaaggccatttgtttattgtctgtagtgaaatgtttattcaaatcttttgcccatttttaaaagggggttggttattcgttaacaagaattcattactctagacataaagtctcatcagattttttctcctattctgtgactttctcagtagtatcttttgaagcgtttactttttgatgaagtcctatttatcatttttaaaaattgcttttgcagttttatggttatctaagaaacattgcctaattaaaggtaatgaaaatttactcgtacgtttaagagtttataattttggctcctacatttaggtctgtgatctatattgttttgtttatagtgagaggtaagggtataatttatctttttgcatgtgggtgtgtgattattccagcaccttttattgaaaagactgtcccttccctattgaattgccgtagcatcttatgaaaatcaattgaccataaatataagggtttatttccggattctgagttctcttttgttctgtaggtgtatccttcatgctaatactgcactgtcttactgactgtagctttatagtgaattttgaaatttggaattataagccctctaactttttcaggaatgttttgactatgccgggtcctgtacagttccatacaaattgtccatttctgccaaaaaaaaaaaaccaaaaaaacagctggagttttggtaggaattgccttgaacctatagatcaatttggggagactcactgtcaacaacgttgagttttccaatccatgacacagaggtctctttatttaatttctctcagcagtgttttgtagttgttcggtgtacgagtcttgaattttttttgttaaatttattgccaagtattttattctttttccatgctgtcttgaatggtggaagtgttttctaattttcgttttcaggttgttaacgctaacctgtagaaatacaatcgatttgtccattgctcttgtatccttcgcccttgctgaactcaccagttgtagtagtttctttgtgaattccttacagttttctacatacaggatctgttatctgcaaataaagagcattttacttcttt

SEQ ID NO: 439463 - DNA, 2037 bp, Homo sapiens
  misc_feature (1809)..(1809): n is a, c, g, or t
  misc_feature (1818)..(1819): n is a, c, g, or t
  misc_feature (1825)..(1827): n is a, c, g, or t
  misc_feature (1835)..(1835): n is a, c, g, or t
  misc_feature (1840)..(1840): n is a, c, g, or t
  misc_feature (1851)..(1851): n is a, c, g, or t
gagtgtgggagcgccgaggctcgcgttccgccgctgcttccgtcgccggggcgggcgccgcggtgtccctgccgagcgtgagccccgaactgtcaccgcgccgagccccagcctcatccgtcggtgtccgcggtccgagctttccccgcctcgctggcggcccgcgctctcccccgccgtgcgcgttcgccgctgtggcctgtagctacctcgcctcgctgctttgtctccgctgctcttgccgtccttcccgcggccttctgcgggcggggctgtcggctgtcgctttgctgctccgcgacggcggccttgagtctcgctcccccggtgggaaacgtagaactggttactcgccaccttaggcggtggggtttgaatgagagcggtgcctcggtaggtcgtcagaaagttacagtcgcccatctgagcgtttgtaagagatggaggcaggagtggtgaggttgattcttcaccacactgaaaccattaggaaaaatccttgtggttaacagcagaggcttcagagtgtaacctgtactcgggcctagaaattatttaaaatggcgactgatacgtctcaaggtgaactcgtccatcctaaggcactcccacttatagtaggagctcagctgatccacgcggacaagttaggtgagaaggtagaagatagcaccatgccgattcgtcgaactgtgaattctacccgggaaactcctcccaaaagcaagcttgctgaaggggaggaagaaaagccagaaccagacataagttcagaggaatctgtctccactgtagaagaacaagagaatgaaactccacctgctacttcgagtgaggcagagcagccaaagggggaacctgagaatgaagagaaggaagaaaataagtcttctgaggaaaccaaaaaggatgagaaagatcagtctaaagaaaaggagaagaaagtgaaaaaaacaattccttcctgggctaccctttctgccagccagctagccagggcccagaaacaaacaccgatggcttcttccccacgtcccaagatggatgcaatcttaactgaggccattaaggcatgcttccagaagagtggtgcatcagtggttgctattcgaaaatacatcatccataagtatccttctctggagctggagagaaggggttatctccttaaacaagcactgaaaagagaattaaatagaggagtcatcaaacaggttaaaggaaaaggtgcttctggaagttttgttgtggttcagaaatcaagaaaaacacctcagaaatccagaaacagaaagaataggagctctgcagtggatccagaaccacaagtaaaattggaggatgtcctcccactggcctttactcgcctttgtgaacctaaagaagcttcctacagtctcatcaggaaatatgtgtctcagtattatcctaagcttagagtggacatcaggcctcagctgttgaagaacgctctgcagagagcagtagagaggggccagttagaacagataactggcaaaggtgcttcggggacattccagaaatggggtttcgccgtgttgcccaggctactcttgaactcctgggttcagtgaagtagtctgcctgcctcagcttcccaaagtgttggaattacaggtgtgatccaccacacctgaccagggctcgagtttctccatatcctcctcaacgtttgttactcttttttattatagccatactagtggatatagggtatctcgttgtagttttgattggcatttccctaataattactgatgttgagcaaaaaaaaaaaaaaaaaaaaanttggggggnngggccnnnaaaagttntaaancatggtggggngcggggcccataggcaaggtgcaaacggggcacaagcgtgttcccggagaaaaccccgcgcaagaaaacaggtgcgttggagtctcccaagtaaaaacgcccgggggaacagcaggtttcgtaacaatccgaagggaattaggggacaataggggcaatcaacagggaccagggaccgataaaatc

SEQ ID NO: 439464 - DNA, 1722 bp, Homo sapiens
gagtgtgggagcgccgaggctcgcgttccgccgctgcttccgtcgccggggcgggcgccgcggtgtccctgccgagcgtgagccccgaactgtcaccgcgccgagccccagcctcatccgtcggtgtccgcggtccgagctttccccgcctcgctggcggcccgcgctctcccccgccgtgcgcgttcgccgctgtggcctgtagctacctcgcctcgctgctttgtctccgctgctcttgccgtccttcccgcggccttctgcgggcggggctgtcggctgtcgctttgctgctccgcgacggcggccttgagtctcgctcccccggtgggaaacgtagaactggttactcgccaccttaggcggtggggtttgaatgagagcggtgcctcggtaggtcgtcagaaagttacagtcgcccatctgagcgtttgtaagagatggaggcaggagtggtgaggttgattcttcaccacactgaaaccattaggaaaaatccttgtggttaacagcagaggcttcagagtgtaacctgtactcgggcctagaaattatttaaaatggcgactgatacgtctcaaggtgaactcgtccatcctaaggcactcccacttatagtaggagctcagctgatccacgcggacaagttaggtgagaaggtagaagatagcaccatgccgattcgtcgaactgtgaattctacccgggaaactcctcccaaaagcaagcttgctgaaggggaggaagaaaagccagaaccagacataagttcagaggaatctgtctccactgtagaagaacaagagaatgaaactccacctgctacttcgagtgaggcagagcagccaaagggggaacctgagaatgaagagaaggaagaaaataagtcttctgaggaaaccaaaaaggatgagaaagatcagtctaaagaaaaggagaagaaagtgaaaaaaacaattccttcctgggctaccctttctgccagccagctagccagggcccagaaacaaacaccgatggcttcttccccacgtcccaagatggatgcaatcttaactgaggccattaaggcatgcttccagaagagtggtgcatcagtggttgctattcgaaaatacatcatccataagtatccttctctggagctggagagaaggggttatctccttaaacaagcactgaaaagagaattaaatagaggagtcatcaaacaggttaaaggaaaaggtgcttctggaagttttgttgtggttcagaaatcaagaaaaacacctcagaaatccagaaacagaaagaataggagctctgcagtggatccagaaccacaagtaaaattggaggatgtcctcccactggcctttactcgcctttgtgaacctaaagaagcttcctacagtctcatcaggaaatatgtgtctcagtattatcctaagcttagagtggacatcaggcctcagctgttgaagaacgctctgcagagagcagtagagaggggccagttagaacagataactggcaaaggtgcttcggggacattccagaaatggggtttcgccgtgttgcccaggctactcttgaactcctgggttcagtgaagtagtctgcctgcctcagcttcccaaagtgttggaattacaggtgtgatccaccacacctgaccagggctcgagtttctccatatcaggatctgttatctgcaaataaagagcattttacttcttt

SEQ ID NO: 439465 - DNA, 1100 bp, Homo sapiens
gagtgtgggagcgccgaggctcgcgttccgccgctgcttccgtcgccggggcgggcgccgcggtgtccctgccgagcgtgagccccgaactgtcaccgcgccgagccccagcctcatccgtcggtgtccgcggtccgagctttccccgcctcgctggcggcccgcgctctcccccgccgtgcgcgttcgccgctgtggcctgtagctacctcgcctcgctgctttgtctccgctgctcttgccgtccttcccgcggccttctgcgggcggggctgtcggctgtcgctttgctgctccgcgacggcggccttgagtctcgctcccccggtgggaaacgtagaactggttactcgccaccttaggcggtggggtttgaatgagagcggtgcctcggtaggtcgtcagaaagttacagtcgcccatctgagcgtttgtaagagatggaggcaggagtggtgaggttgattcttcaccacactgaaaccattaggaaaaatccttgtggttaacagcagaggcttcagagtgtaacctgtactcgggcctagaaattatttaaaatggcgactgatacgtctcaaggtgaactcgtccatcctaaggcactcccacttatagtaggagctcagctgatccacgcggacaagttaggtgagaaggtagaagatagcaccatgccgattcgtcgaactgtgaattctacccgggaaactcctcccaaaagcaagcttgctgaaggggaggaagaaaagccagaaccagacataagttcagaggaatctgtctccactgtagaagaacaagagaatgaaactccacctgctacttcgagtgaggcagagcagccaaagggggaacctgagaatgaagagaaggaagaaaataagtcttctgaggaaaccaaaaaggatgagaaagatcagtctaaagaaaaggagaagaaagtgaaaaaaacaattccttcctgggctaccctttctgccattcttttttttgtttggagacagagttttgctcttgttgcccaggctggagtgcaatggcacgatcttggctcaccgcaacctccgtctcctgggttcaagcaattcttctgcctc

SEQ ID NO: 439466 - DNA, 1158 bp, Homo sapiens
atttcttccttccttcattcagttggtcactcagtgaactatcatgaattgagcaccgcctctgtttcttatcaacaaaggagactgcggaaaagaagagtgactaagatctctgaagaagggaaaagctagatgactgggccacaagaggaaaaaaagcagcaagacagttacaattgtttctggtcccacttttataaacacacacacacacacacacacacacacacacacacacacacaatcatttaatcatttttaagtatttaatcattttttaaaaatctgtgatgctttacctgggcatgtctaggcaggtcctcctttgctaggacgtgcccttttctgtcccggaatactctaaacttggcattttggcagcgtgaagttttcccgttgtgactttctccttgttcccttttctcctccttctttgcagacaatgagtagccactgctgtttgccctggcccatcaatgagaagatctgctcttagagccctgctttcctgctgaaggccctgaaatcacctgtgttccaggccacctgctaacaataaataatgctgccctgatgtggggaattagctcaagtggtagagcgcttgcttagcacgcaagaggtagtgggatcgatgcccacattctccaagctttattatttagacatcgtgtctccaaacactcaggtctccaaacccaagttagtgtctgagaacaggatgctgctttggttcaagacgtaggagcagcaataatagagggctggtgatggctccctcttggcattcagtatagtgtagatctaccatgtaattaattctctgtttctttgaggagctgtgaaaccaagggacatatacaactgctcttttctccctgtttctacctgcagctttgtcctaaatgtgagacaattatgaaaagtgcagcgcagagccacttgggtaaatacagccccggctttctgctcaggggacagagtttgaggcactgcagaggaaccggccaaagtatgagacccatatattgagagtaacagagtgtaaagttcaaaaaaaatcaaaatatttaaagatttatcatgggtcttgatgacatgatggaatctctctactctctggacttattatgtgtggtaataaatttactttttaaa

SEQ ID NO: 439467 - DNA, 1297 bp, Homo sapiens
atttcttccttccttcattcagttggtcactcagtgaactatcatgaattgagcaccgcctctgtttcttatcaacaaaggagactgcggaaaagaagagtgactaagatctctgaagaagggaaaagctagatgactgggccacaagaggaaaaaaagcagcaagacagttacaattgtttctggtcccacttttataaacacacacacacacacacacacacacacacacacacacacacaatcatttaatcatttttaagtatttaatcattttttaaaaatctgtgatgctttacctgggcatgtctaggcaggtcctcctttgctaggacgtgcccttttctgtcccggaatactctaaacttggcattttggcagcgtgaagttttcccgttgtgactttctccttgttcccttttctcctccttctttgcagacaatgagtagccactgctgtttgccctggcccatcaatgagaagatctgctcttagagccctgctttcctgctgaaggccctgaaatcacctgtgttccaggccacctgctaacaataaataatgctgccctgatgtggggaattagctcaagtggtagagcgcttgcttagcacgcaagaggtagtgggatcgatgcccacattctccaagctttattatttagacatcgtgtctccaaacactcaggtctccaaacccaagttagtgtctgagaacaggatgctgctttggttcaagacgtaggagcagcaataatagagggctggtgatggctccctcttggcattcagtatagtgtagatctaccatgtaattaattctctgtttctttgaggagctgtgaaaccaagggacatatacaactgctcttttctccctgtttctacctgcagctttgtcctaaatgtgagacaattatgaaaagtgcagcgcagagccacttgggtaaatacagccccggctttctgctcaggggacagagtttgaggcactgcagaggaaccggccaaagtatgagacccatatattgagagtaacagagtgtaaagttcaaaaaaaatcaaaatatttaaagatttatcatgggtcttgatgacatgatggaatctctctactctctggacttattatgtgtggtaataaatttactttttaaagcccaaaaaaaaaaaaaatggccctggttggcccaaccggtggaatctctgcgacccgttcccttttaggagggattattagatggtccctcggtacaatagcttaactggactccaagatatagacttcacccaaaaa

SEQ ID NO: 439468 - DNA, 2648 bp, Homo sapiens
acctgccgagctgtggggaaacctttatccagaattcacaactcactgcacatcagaagacacacacaaagaagaggaatgctgagaagtaagatgagttgggaaatactcttgactgaatttaatccttcaaaacaatcagataattcacacaagaggtacaccttatgaatcgcatcaatagagggaaattttcagctacaatctttgctctctctgtgtatcagcaaatacatagagagattctgtacatttatttgggagaaaattttatcatattttaggcttttctaaatattagataatatagatggcagaagtcatgcaaattgtaaaacaggaaggaaacctttcagaagtcatacttttgttttgcaacatagaagtcacacaggagaaaaatcctgtaagtaaaacgaatgtcaagacattttctgtcagggcagccagctgtagacatccaaaagctcacaaatgagaagctccttgagtatctagaaatctctttacacaattggagctcatgtactagagaattcaaagggataactgcaaagacactggtagatatagaagcctttattaagaattgatgtttcattcaatttcagatcactggtacttggatagatattttaaatatttggaaggtgttcaataaaaattcaaataatttgtactgagggaaacagttatactacaaatcatgttgcagatctgatgccgagattgctctattttaaaaggaaacctgcaaatgtctacatatatgaagcttttaaaaagcacaagttatcaggcaacatcattaaacatacattaaatgtctgttagcatataggattttgtgcgtatgtgagtgtgctataacatgtaacttgcggatgttcagcgtgcatgtggaatccatccataatggtacatagcgaaataatataatcttagttcagtaactattatgtgtatgaagatgttgcacattaagtctcagtagtgactctggttgttaatatttgtattgtaagtgtaatattccttttaaattataaggcatctttttatccttttttgtgtttgtaaatggatatagacagtggtaataactaatccttcaaaaataagttaaaatgtttttgtaaaattttcaaatgtcagtcaagttttgcattagggacacatttatatatagcaaaagcctgagctgtttttaaacagctaaaaacagtagtatttattacaatctccacaatgaaaacaaatagtgcaatgtaagaaatattatgtatcttactgttgatgtgtgatcagggagcagagctatctgcatttgtatttagtgtgagagtcctaaatgttcttcaccaactttttcttcctcatagaagcaacatggcatagttaagggtgtggactctgggctcctgctgcctgggccccgattccagcatggggcatgctacttaatatctctgtgcctcagttcccatcccataaaagagtagtgatagtgacaacatcttaggattgctttgaggtctaaatgagttaacattttcaaagcacttagaatagtgtctgagacacaagagctatatgttagaggttatcatcattatttgtattttgtgaattacgctgcaaaaaaaaaaaaaatgttggctacccaacattcattccccaccttcttgctgccagtgccttgatttggttgtttgttgtttgtttgttttcctacaagtgatttaggggcagatcctgactacactaagtcagggtttgacaaatgacagtccatcagacagatctggcccactacccatttttgtatcctgcaagctaagaatggttttatatttctaaatggttgaaagaatcaaagaatattgtgacacatgaaaattatatgatattcaaatttcagtgtccataaataaagttttgaaaacatgaatacaaacaaaaaacacctatttatgtttgacctgtggctgtctttgcactaccccagcagagttgagtagttgtagcagacaccacatgcccttgagcctaagatctagcactttacaaagtaagtttttctgttacttagagctgaaaataaaagcaatgtagagttacgcttttataagtatttcatgtttcagaaatgatgcatacagcaatttgtaggtgggtggttttttgcagtatatttattttgtgcattatatttatatgttaagagcctgagcttagaagtatttttttcaaagaaatgtgttttttacttgctaaattgtcataacatcaaaacaagaaatttcttgatggaatgtagcagtaaacatatgaaataaacattgtctaaattaagtcgaattgttcattgatactgccccacagtattcctttgttttctcccaaatcaatggccagttttccctgtatcattttataattttctttctatcccataagataccattggtaagtcatacttagctaacgtaacccaataacaaaaaacttacaatacccaattccatcagctacattactagtaatctataaaattattgcctgcacttcatgtaattgtcatatgctgctacaatctaaacctgccagcgtcttacttccccttcctaataaagactttcattgat

SEQ ID NO: 439469 - DNA, 2594 bp, Homo sapiens
acctgccgagctgtggggaaacctttatccagaattcacaactcactgcacatcagaagacacacacaaagaagaggaatgctgagaagtaagatgagttgggaaatactcttgactgaatttaatccttcaaaacaatcagataattcacacaagaggtacaccttatgaatcgcatcaatagagggaaattttcagctacaatctttgctctctctgtgtatcagcaaatacatagagagattctgtacatttatttgggagaaaattttatcatattttaggcttttctaaatattagataatatagatggcagaagtcatgcaaattgtaaaacaggaaggaaacctttcagaagtcatacttttgttttgcaacatagaagtcacacaggagaaaaatcctgtaagtaaaacgaatgtcaagacattttctgtcagggcagccagctgtagacatccaaaagctcacaaatgagaagctccttgagtatctagaaatctctttacacaattggagctcatgtactagagaattcaaagggataactgcaaagacactggtagatatagaagcctttattaagaattgatgtttcattcaatttcagatcactggtacttggatagatattttaaatatttggaaggtgttcaatagatctgatgccgagattgctctattttaaaaggaaacctgcaaatgtctacatatatgaagcttttaaaaagcacaagttatcaggcaacatcattaaacatacattaaatgtctgttagcatataggattttgtgcgtatgtgagtgtgctataacatgtaacttgcggatgttcagcgtgcatgtggaatccatccataatggtacatagcgaaataatataatcttagttcagtaactattatgtgtatgaagatgttgcacattaagtctcagtagtgactctggttgttaatatttgtattgtaagtgtaatattccttttaaattataaggcatctttttatccttttttgtgtttgtaaatggatatagacagtggtaataactaatccttcaaaaataagttaaaatgtttttgtaaaattttcaaatgtcagtcaagttttgcattagggacacatttatatatagcaaaagcctgagctgtttttaaacagctaaaaacagtagtatttattacaatctccacaatgaaaacaaatagtgcaatgtaagaaatattatgtatcttactgttgatgtgtgatcagggagcagagctatctgcatttgtatttagtgtgagagtcctaaatgttcttcaccaactttttcttcctcatagaagcaacatggcatagttaagggtgtggactctgggctcctgctgcctgggccccgattccagcatggggcatgctacttaatatctctgtgcctcagttcccatcccataaaagagtagtgatagtgacaacatcttaggattgctttgaggtctaaatgagttaacattttcaaagcacttagaatagtgtctgagacacaagagctatatgttagaggttatcatcattatttgtattttgtgaattacgctgcaaaaaaaaaaaaaatgttggctacccaacattcattccccaccttcttgctgccagtgccttgatttggttgtttgttgtttgtttgttttcctacaagtgatttaggggcagatcctgactacactaagtcagggtttgacaaatgacagtccatcagacagatctggcccactacccatttttgtatcctgcaagctaagaatggttttatatttctaaatggttgaaagaatcaaagaatattgtgacacatgaaaattatatgatattcaaatttcagtgtccataaataaagttttgaaaacatgaatacaaacaaaaaacacctatttatgtttgacctgtggctgtctttgcactaccccagcagagttgagtagttgtagcagacaccacatgcccttgagcctaagatctagcactttacaaagtaagtttttctgttacttagagctgaaaataaaagcaatgtagagttacgcttttataagtatttcatgtttcagaaatgatgcatacagcaatttgtaggtgggtggttttttgcagtatatttattttgtgcattatatttatatgttaagagcctgagcttagaagtatttttttcaaagaaatgtgttttttacttgctaaattgtcataacatcaaaacaagaaatttcttgatggaatgtagcagtaaacatatgaaataaacattgtctaaattaagtcgaattgttcattgatactgccccacagtattcctttgttttctcccaaatcaatggccagttttccctgtatcattttataattttctttctatcccataagataccattggtaagtcatacttagctaacgtaacccaataacaaaaaacttacaatacccaattccatcagctacattactagtaatctataaaattattgcctgcacttcatgtaattgtcatatgctgctacaatctaaacctgccagcgtcttacttccccttcctaataaagactttcattgat

SEQ ID NO: 439470 - DNA, 235 bp, Homo sapiens
ccattcattcattcattcaacaatattcattcaacaaatgaagcaaaggagcacacagccaagtgatggagcaaaatcacaaattaaaaggtaattcaggccaggtgaggtggctcatgcctgcaatcccaatgcctgtaatcctctggaaggtgggaggatcacttgaggtcaggagttcaagaccagcctggccaacatggcgaaacccccatctctactaaaaatacaaaaa

SEQ ID NO: 439471 - DNA, 350 bp, Homo sapiens
aactgtgcatattcgaggaggcagaggaagaaaggaagaggaaggttttcaaagagaaagcagcagtgaggatgccagagttcatgggtttctagaagacaagttttcaactgcagatacaaacatcaggacgtcaatgtatctgctaggagacacccggacagtgttgagaacacagaacctggaggctaaacccccagctttctatgccagctgagagtctgtgggcacattactcagcgtctctgaacctcatgctcctcccctgtgacatgtagattgctaaacccatctcacagggctatcttctgcatttaaagaataaaataacacatgaggggtcgttggcc

SEQ ID NO: 439472 - DNA, 851 bp, Homo sapiens
ttgatatttatattttgaaatttattatttctatattgttgagttattttagtcatagttataaactgtcagtgggaaaataaatctaagttgctggccattcttagttatagtttctgaggaataaaggtaagttctgagataaagcagtacttgagactataaatacactaacttaataaattggtctttattggttcatatttttgggttatattaattttcaaaacattgaaagtaaatttggtatcttttttcccctctctaggctgaagggtatgtgattggcagctgtattaaacacattccaatcgcaggacgagatataacatattttattcagcaactgctgagagaccgagaagtaggaatccctccagaacaatccttggaaactgctaaggcagtaaaggtaaaaagtgtgataggagtgtaatttagttaaaaattaaaatcacatttataacattaacgtgagaaatttttaatagaagaagagtacttgaaataatcttgttaaccagttataaattattacccttaaatatatttacattttctttgtgtttcttaaaagaaaattattacagcagtttgtcttctgttttcttcatattttatatttgagaggagtaatataagaacattttaccaaatgacattaacataaatttttgtgattattctctttattaaaaataaataattatttcactataaagtccttgcatctcagtttcttcactgaattctttattttaattctaaaagcttttgtcataaaaattattttgatacaattgattcattgtgctatagtatagaagcagtgcttggctcaagtgataggg

SEQ ID NO: 439473 - DNA, 667 bp, Homo sapiens
tcatcagaaggtccttgtttgttctgtttaagtatttaaaaacattaaggtaaaagttaagcttcattgcatagaaagtatgatgttttacactgaataaagggaattattctaagaatcctgtccccaaattaaaatgtctttaaagccccctaaaaaggtgttctagtgttctaataccattaacctaggaagtattggtgctttgttctggtagtgcatgcaatattaaaatgaaggagcttttatctgaattattgaataactgtacaactttggatttaaaaccatttccaacataagaggtgaaagttatttttttcctcaattttagtcttcttcaattgggccatataacctagttgagtttgtgactttgccttgagaaatgaggtaacacagcatggaacagtctatcttttccagaccttgaatgaggaaggcaaatgatctagacatttcttagaactagacgaaaaatagtcatagcatgactaggagtagttttatctgtagttaggcgaatgccaggtatggacatgcattggtcgcatactgtttagaaatcgggacagtcacgaccagatgcactggccgatcagtttgacacttacagctatggccaagcgctgccgtcggtttacaactgacagcatgcatgcctgcc

SEQ ID NO: 439474 - DNA, 799 bp, Homo sapiens
tatgtttttgcttaatcctggaatatgtatatgatagtttcagaattgttaatccacaccactgtgaaaaatagacccaaaactagaattcaatatttgcttatattttatcttcagcctgaaggcttataagattcaaaatactatgctcacaagttgcttgtgttagtccctttcctcaccttagtgtgcttatgtttgaaaaaagtacaattagtttaatttgtttttgttgtactttgttttgccccaacctccccttcttttaaggtgttattttttagtatgtaaaacactaacatttagattcttaaagtcagaactgtataaaacatgtgctcattgttatttcccttccatttattctgctctgttccctccctgtctcttccacagtgttcccaacccctttcctctgagacagccaatctcaattgtttctggtttgtaagataccacctgaatttagtacagatattatttttgtatatgtacatttaaggttaaatgacacagaagttgttatttgaatttactatgaagatgatcatactatgtctttctttagccaaaacctattgatgtacaagtcattacacaccacatgcagcgatatgcagtttggtttggaggatcaatgctggcttccacgcctgagtctaccaagttgcacaccagggtcttgagaattggcctcccttgcgccccatcccggtgcggctgtctcctgctccatctcgcgggcgcggcggggccacctgatacgggcgccgcagcgctcggggcaccgctgactccc

SEQ ID NO: 439475 - DNA, 397 bp, Homo sapiens
tcaatccttgccctgtgggatttgagaaactacaatggccagtgactgccatgtgcttcctgagcctctctgttactgacagtagtcttatttgctgttattgagtgttactccatcattgcacattgagtttatgcatgtgtgtcctttagttgataggccactgagctatgggcagccacatgtgttcctgatggaagggactgagtatctcccagagatcctggacacgaggagacatgctgtgagtggatgtctggaagccagtcctgagagagaagactctaaatccagaatttcttcaggcatttcaaacatttctatgttgtgtgcattatataaacaacacctatataacttgtcttaagaaaataaaagcaacaagattaactgaaaa

SEQ ID NO: 439476 - DNA, 253 bp, Homo sapiens
gttcggtcctcttagacccagacgtgtgcatggtcgtactcttaggtcctgggcgcctgagttttcgccggtcccccaccaaaaaaagggccatccctctccaccccttccccccaaaaggttttctttgcaagtgcttttggaactaagagctagtatcttggattaactgatgcctgctagtgctttctgattactcgcattctgtttcttgctttaaaagaagagtaaagacaagagtgttggaccagta

SEQ ID NO: 439477 - DNA, 3141 bp, Homo sapiens
ggagggatggggggggggtctccccatgttgcccaggctggtctcgaactcctagcctcaagctatcctatcctcccacctcggccttccaaagcattgaaattacaggcatgacccactgcggctcgcctccgtttctaacttaaaaaaattttctttggaggggagccttaatcctttctattatcctgctagtagaatcttactactcctgagggtaatctttgtcataatccaaaagccttgaataaaggcctatttgtatagttatgcagaatatattcctgggaggtttgccttcctaggagcacaggtcggccctgggaggtgggggttggggggcagggctgcattctaaagtcctgtaacaacgcacaagtacaactgaatagaactcggaacaaaggcatcagggccacggtgcaagtctttgttcatccgttccccgactgctcaccctgtctgataccgctcttttccacccagaaaagcagccactcaagttttaagaatggatgtatgccgcggacgttttcgattaggccgttttctctcaggcactggaggatattcgtggctgcaggaggcgcttccaccctttcctcaacctagcaaagaagtaactgaaactaacccaagggttacaaccgaaaagccccttccagcttcagaagcagaactggaagctcggatagacttctccgcctctacactcctggaaaacccgcagtggatttcaccaacttcagggtcggagcccaggcaggcgaacgtaccttattgcgcatgctcgctagcccctcccgctcggagcggaagggggagcgctgggggcctgggcctggcctggccggggcgtcggcaccggcggccatcttggcttcccggggaaaggcggcgtgaggggaagaagttgtagggtgggggcaggagtgaggaggagggaagagagagggggaggaggccgcggcggggcagggcggggactgcctgcctgcctgggttgcggaagtgatagccgccgaccgagcctgctgctttcttgctactgcttcggcttcccggctaccccccggacggtgaaggcggcccagctgtggatggtcagatagcccttgtctcccgccgccaatctctggcccctagcagcacggagcagacggcggcagcagcagcagcaggcgaggaggaagatggcgggacggctgccggcctgtgtggtggactgtggcacggggtatacaaaactaggatatgctggaaatacagaaccacagtttatcatcccttcctgtattgctattaaggagtcagcaaaagtgggtgatcaagctcaaaggagggtgatgaaaggtgttgatgacctagacttcttcattggtgatgaagcaatagaaaaacctacatatgcaacaaagtggccaatccgccatggtatagttgaagattgggacttaatggaaaggtttatggagcaagtgatctttaaatatttaagggcagaacctgaagaccattattttcttttgactgaacctccattgaatactccagaaaacagggaatatactgctgaaataatgtttgagtccttcaatgttccaggcttgtacattgctgtgcaggctgttcttgccttagctgcatcttggacctcaagacaagtaggagaacggacgttgaccggtacggtaatagacagtggagatggtgtcactcatgtcattcctgtggctgaagggtatgtgattggcagctgtattaaacacattccaatcgcaggacgagatataacatattttattcagcaactgctgagagaccgagaagtaggaatccctccagaacaatccttggaaactgctaaggcagtaaaggagcgctatagttatgtctgcccagatttagtaaaagaatttaacaagtatgatacagatgggtcaaaatggattaaacagtatactggaatcaatgctatctcaaagaaagagttttctatcgatgttggttatgagagatttttgggacctgaaatcttttttcatccagagtttgctaatccagactttacacaacctatctcagaagttgtagatgaagtaattcagaattgtcctattgatgtcagacgtcctctctacaagaatattgtcctctctggaggttcaaccatgttcagggactttggacgtcgcttgcaaagagatttgaaaagaactgtagatgcccggctgaaattaagtgaggaattgagtggtggtagattgaagccaaaacctattgatgtacaagtcattacacaccacatgcagcgatatgcagtttggtttggaggatcaatgctggcttccacgcctgagttctaccaagtatgccacaccaaaaaggattatgaagaaattggacctagcatttgtcgtcacaatccagtgtttggagtcatgtcgtaaaattggcttcatagttattggggttagggaggtggggaagagataatctttctgattacctgttttgtctggatggctggttttgaggttttaaacctgacttgaaatagtaacaccaaacatgattatacaggaatattttaataagtgtatcaccatgcagatgtagaagagagcgaaagtgattgtgtttttctttagattgaatatttgaatcttatgtgtaacaaaaagaagtgggttttagttctttctgtgccctgatattttgtatattaatgaattatccaagattcgatgggatttatcagtgtgtagatagctctataatgcttgaattgtacacttctaagtgtgcagtgcaagagcttgtttatatttcatactttttatactttgaggaaaaaaagtcaaagaaaaattgtatttgagggaaaaaaccatgaccaagtaaaggataaattcaaaaaatagcctcatgagacttggcatacacactcgtgggattccagttattatggagtgcttccatccctctccaccccttccccccaaaaggttttctttgcaagtgcttttggaactaagagctagtatcttggattaactgatgcctgctagtgctttctgattactcgcattctgtttcttgctttaaaagaagagtaaagacaagagtgttggaccagta

SEQ ID NO: 439478 - DNA, 3587 bp, Homo sapiens
ggagggatggggggggggtctccccatgttgcccaggctggtctcgaactcctagcctcaagctatcctatcctcccacctcggccttccaaagcattgaaattacaggcatgacccactgcggctcgcctccgtttctaacttaaaaaaattttctttggaggggagccttaatcctttctattatcctgctagtagaatcttactactcctgagggtaatctttgtcataatccaaaagccttgaataaaggcctatttgtatagttatgcagaatatattcctgggaggtttgccttcctaggagcacaggtcggccctgggaggtgggggttggggggcagggctgcattctaaagtcctgtaacaacgcacaagtacaactgaatagaactcggaacaaaggcatcagggccacggtgcaagtctttgttcatccgttccccgactgctcaccctgtctgataccgctcttttccacccagaaaagcagccactcaagttttaagaatggatgtatgccgcggacgttttcgattaggccgttttctctcaggcactggaggatattcgtggctgcaggaggcgcttccaccctttcctcaacctagcaaagaagtaactgaaactaacccaagggttacaaccgaaaagccccttccagcttcagaagcagaactggaagctcggatagacttctccgcctctacactcctggaaaacccgcagtggatttcaccaacttcagggtcggagcccaggcaggcgaacgtaccttattgcgcatgctcgctagcccctcccgctcggagcggaagggggagcgctgggggcctgggcctggcctggccggggcgtcggcaccggcggccatcttggcttcccggggaaaggcggcgtgaggggaagaagttgtagggtgggggcaggagtgaggaggagggaagagagagggggaggaggccgcggcggggcagggcggggactgcctgcctgcctgggttgcggaagtgatagccgccgaccgagcctgctgctttcttgctactgcttcggcttcccggctaccccccggacggtgaaggcggcccagctgtggatggtcagatagcccttgtctcccgccgccaatctctggcccctagcagcacggagcagacggcggcagcagcagcagcaggcgaggaggaagatggcgggacggctgccggcctgtgtggtggactgtggcacggggtatacaaaactaggatatgctggaaatacagaaccacagtttatcatcccttcctgtattgctattaaggagtcagcaaaagtgggtgatcaagctcaaaggagggtgatgaaaggtgttgatgacctagacttcttcattggtgatgaagcaatagaaaaacctacatatgcaacaaagtggccaatccgccatggtatagttgaagattgggacttaatggaaaggtttatggagcaagtgatctttaaatatttaagggcagaacctgaagaccattattttcttttgactgaacctccattgaatactccagaaaacagggaatatactgctgaaataatgtttgagtccttcaatgttccaggcttgtacattgctgtgcaggctgttcttgccttagctgcatcttggacctcaagacaagtaggagaacggacgttgaccggtacggtaatagacagtggagatggtgtcactcatgtcattcctgtggctgaagggtatgtgattggcagctgtattaaacacattccaatcgcaggacgagatataacatattttattcagcaactgctgagagaccgagaagtaggaatccctccagaacaatccttggaaactgctaaggcagtaaaggagcgctatagttatgtctgcccagatttagtaaaagaatttaacaagtatgatacagatgggtcaaaatggattaaacagtatactggaatcaatgctatctcaaagaaagagttttctatcgatgttggttatgagagatttttgggacctgaaatcttttttcatccagagtttgctaatccagactttacacaacctatctcagaagttgtagatgaagtaattcagaattgtcctattgatgtcagacgtcctctctacaagaatattgtcctctctggaggttcaaccatgttcagggactttggacgtcgcttgcaaagagatttgaaaagaactgtagatgcccggctgaaattaagtgaggaattgagtggtggtagattgaagccaaaacctattgatgtacaagtcattacacaccacatgcagcgatatgcagtttggtttggaggatcaatgctggcttccacgcctgagttctaccaagtatgccacaccaaaaaggattatgaagaaattggacctagcatttgtcgtcacaatccagtgtttggagtcatgtcgtaaaattggcttcatagttattggggttagggaggtggggaagagataatctttctgattacctgttttgtctggatggctggttttgaggttttaaacctgacttgaaatagtaacaccaaacatgattatacaggaatattttaataagtgtatcaccatgcagatgtagaagagagcgaaagtgattgtgtttttctttagattgaatatttgaatcttatgtgtaacaaaaagaagtgggttttagttctttctgtgccctgatattttgtatattaatgaattatccaagattcgatgggatttatcagtgtgtagatagctctataatgcttgaattgtacacttctaagtgtgcagtgcaagagcttgtttatatttcatactttttatactttgaggaaaaaaagtcaaagaaaaattgtatttgagggaaaaaaccatgaccaagtaaaggataaattcaaaaaatagcctcatgagacttggcatacacactcgtgggattccagttattatggagtgcttccatccctctccaccccttccccccaaaaggttttctttgcaagtgcttttggaactaagagctagtatcttggattaactgatgcctgctagtgctttctgattactcgcattctgtttcttgctttaaaagaagagtaaagacaagagtgttggaccagtattgcagttctgtagtgtcatttcttataaaaaacaaaacaacaacaataatttatcaaaattggcatatttaaagcctaacattctaataaaggcacaaatttctttttaatacttgtttcagcctctttaatctctttataagttaactaataaatctattttcttcagacttctgcaatagttctttaaaatcacaacagttagcaagctgacttttgtaatgtgctcaatacaaatacttgtgaacttttaatatgttgagtgctttcattttgataactggatctccatttgatattttcatttgtataactcatttgcagtctgaaaattttttttagtgccagtccctgaacatatcattgaaagttaattttctttgcattttaaaatatctggattatgaagaaaaaagtgatgaaaataaattaaaactgaattacc

SEQ ID NO: 439479 - DNA, 3532 bp, Homo sapiens
ggagggatggggggggggtctccccatgttgcccaggctggtctcgaactcctagcctcaagctatcctatcctcccacctcggccttccaaagcattgaaattacaggcatgacccactgcggctcgcctccgtttctaacttaaaaaaattttctttggaggggagccttaatcctttctattatcctgctagtagaatcttactactcctgagggtaatctttgtcataatccaaaagccttgaataaaggcctatttgtatagttatgcagaatatattcctgggaggtttgccttcctaggagcacaggtcggccctgggaggtgggggttggggggcagggctgcattctaaagtcctgtaacaacgcacaagtacaactgaatagaactcggaacaaaggcatcagggccacggtgcaagtctttgttcatccgttccccgactgctcaccctgtctgataccgctcttttccacccagaaaagcagccactcaagttttaagaatggatgtatgccgcggacgttttcgattaggccgttttctctcaggcactggaggatattcgtggctgcaggaggcgcttccaccctttcctcaacctagcaaagaagtaactgaaactaacccaagggttacaaccgaaaagccccttccagcttcagaagcagaactggaagctcggatagacttctccgcctctacactcctggaaaacccgcagtggatttcaccaacttcagggtcggagcccaggcaggcgaacgtaccttattgcgcatgctcgctagcccctcccgctcggagcggaagggggagcgctgggggcctgggcctggcctggccggggcgtcggcaccggcggccatcttggcttcccggggaaaggcggcgtgaggggaagaagttgtagggtgggggcaggagtgaggaggagggaagagagagggggaggaggccgcggcggggcagggcggggactgcctgcctgcctgggttgcggaagtgatagccgccgaccgagcctgctgctttcttgctactgcttcggcttcccggctaccccccggacggtgaaggcggcccagctgtggatggtcagatagcccttgtctcccgccgccaatctctggcccctagcagcacggagcagacggcggcagcagcagcagcaggcgaggaggaagatggcgggacggctgccggcctgtgtggtggactgtggcacggggtatacaaaactaggatatgctggaaatacagaaccacagtttatcatcccttcctgtattgctattaaggagtcagcaaaagtgggtgatcaagctcaaaggagggtgatgaaaggtgttgatgacctagacttcttcattggtgatgaagcaatagaaaaacctacatatgcaacaaagtggccaatccgccatggtatagttgaagattgggacttaatggaaaggtttatggagcaagtgatctttaaatatttaagggcagaacctgaagaccattattttcttttgactgaacctccattgaatactccagaaaacagggaatatactgctgaaataatgtttgagtccttcaatgttccaggcttgtacattgctgtgcaggctgttcttgccttagctgcatcttggacctcaagacaagtaggagaacggacgttgaccggtacggtaatagacagtggagatggtgtcactcatgtcattcctgtggctgaagggtatgtgattggcagctgtattaaacacattccaatcgcaggacgagatataacatattttattcagcaactgctgagagaccgagaagtaggaatccctccagaacaatccttggaaactgctaaggcagtaaaggagcgctatagttatgtctgcccagatttagtaaaagaatttaacaagtatgatacagatgggtcaaaatggattaaacagtatactggaatcaatgctatctcaaagaaagagttttctatcgatgttggttatgagagatttttgggacctgaaatcttttttcatccagagtttgctaatccagactttacacaacctatctcagaagttgtagatgaagtaattcagaattgtcctattgatgtcagacgtcctctctacaagaatattgtcctctctggaggttcaaccatgttcagggactttggacgtcgcttgcaaagagatttgaaaagaactgtagatgcccggctgaaattaagtgaggaattgagtggtggtagattgaagccaaaacctattgatgtacaagtcattacacaccacatgcagcgatatgcagtttggtttggaggatcaatgctggcttccacgcctgagttctaccaagtatgccacaccaaaaaggattatgaagaaattggacctagcatttgtcgtcacaatccagtgtttggagtcatgtcgtaaaattggcttcatagttattggggttagggaggtggggaagagataatctttctgattacctgttttgtctggatggctggttttgaggttttaaacctgacttgaaatagtaacaccaaacatgattatacaggaatattttaataagtgtatcaccatgcagatgtagaagagagcgaaagtgattgtgtttttctttagattgaatatttgaatcttatgtgtaacaaaaagaagtgggttttagttctttctgtgccctgatattttgtatattaatgaattatccaagattcgatgggatttatcagtgtgtagatagctctataatgcttgaattgtacacttctaagtgtgcagtgcaagagcttgtttatatttcatactttttatactttgaggaaaaaaagtcaaagaaaaattgtatttgagggaaaaaaccatgaccaagtaaaggataaattcaaaaaatagcctcatgagacttggcatacacactcgtgggattccagttattatggagtgcttccatccctctccaccccttccccccaaaaggttttctttgcaagtgcttttggaactaagagctagtatcttggattaactgatgcctgctagtgctttctgattactcgcattctgtttcttgctttaaaagaagagtaaagacaagagtgttggaccagtattgcagttctgtagtgtcatttcttataaaaaacaaaacaacaacaataatttatctacttgtttcagcctctttaatctctttataagttaactaataaatctattttcttcagacttctgcaatagttctttaaaatcacaacagttagcaagctgacttttgtaatgtgctcaatacaaatacttgtgaacttttaatatgttgagtgctttcattttgataactggatctccatttgatattttcatttgtataactcatttgcagtctgaaaattttttttagtgccagtccctgaacatatcattgaaagttaattttctttgcattttaaaatatctggattatgaagaaaaaagtgatgaaaataaattaaaactgaattacc

SEQ ID NO: 439480 - DNA, 3522 bp, Homo sapiens
ggagggatggggggggggtctccccatgttgcccaggctggtctcgaactcctagcctcaagctatcctatcctcccacctcggccttccaaagcattgaaattacaggcatgacccactgcggctcgcctccgtttctaacttaaaaaaattttctttggaggggagccttaatcctttctattatcctgctagtagaatcttactactcctgagggtaatctttgtcataatccaaaagccttgaataaaggcctatttgtatagttatgcagaatatattcctgggaggtttgccttcctaggagcacaggtcggccctgggaggtgggggttggggggcagggctgcattctaaagtcctgtaacaacgcacaagtacaactgaatagaactcggaacaaaggcatcagggccacggtgcaagtctttgttcatccgttccccgactgctcaccctgtctgataccgctcttttccacccagaaaagcagccactcaagttttaagaatggatgtatgccgcggacgttttcgattaggccgttttctctcaggcactggaggatattcgtggctgcaggaggcgcttccaccctttcctcaacctagcaaagaagtaactgaaactaacccaagggttacaaccgaaaagccccttccagcttcagaagcagaactggaagctcggatagacttctccgcctctacactcctggaaaacccgcagtggatttcaccaacttcagggtcggagcccaggcaggcgaacgtaccttattgcgcatgctcgctagcccctcccgctcggagcggaagggggagcgctgggggcctgggcctggcctggccggggcgtcggcaccggcggccatcttggcttcccggggaaaggcggcgtgaggggaagaagttgtagggtgggggcaggagtgaggaggagggaagagagagggggaggaggccgcggcggggcagggcggggactgcctgcctgcctgggttgcggaagtgatagccgccgaccgagcctgctgctttcttgctactgcttcggcttcccggctaccccccggacggtgaaggcggcccagctgtggatggtcagatagcccttgtctcccgccgccaatctctggcccctagcagcacggagcagacggcggcagcagcagcagcaggcgaggaggaagatggcgggacggctgccggcctgtgtggtggactgtggcacggggtatacaaaactaggatatgctggaaatacagaaccacagtttatcatcccttcctgtattgctattaaggagtcagcaaaagtgggtgatcaagctcaaaggagggtgatgaaaggtgttgatgacctagacttcttcattggtgatgaagcaatagaaaaacctacatatgcaacaaagtggccaatccgccatggtatagttgaagattgggacttaatggaaaggtttatggagcaagtgatctttaaatatttaagggcagaacctgaagaccattattttcttttgactgaacctccattgaatactccagaaaacagctgttcttgccttagctgcatcttggacctcaagacaagtaggagaacggacgttgaccggtacggtaatagacagtggagatggtgtcactcatgtcattcctgtggctgaagggtatgtgattggcagctgtattaaacacattccaatcgcaggacgagatataacatattttattcagcaactgctgagagaccgagaagtaggaatccctccagaacaatccttggaaactgctaaggcagtaaaggagcgctatagttatgtctgcccagatttagtaaaagaatttaacaagtatgatacagatgggtcaaaatggattaaacagtatactggaatcaatgctatctcaaagaaagagttttctatcgatgttggttatgagagatttttgggacctgaaatcttttttcatccagagtttgctaatccagactttacacaacctatctcagaagttgtagatgaagtaattcagaattgtcctattgatgtcagacgtcctctctacaagaatattgtcctctctggaggttcaaccatgttcagggactttggacgtcgcttgcaaagagatttgaaaagaactgtagatgcccggctgaaattaagtgaggaattgagtggtggtagattgaagccaaaacctattgatgtacaagtcattacacaccacatgcagcgatatgcagtttggtttggaggatcaatgctggcttccacgcctgagttctaccaagtatgccacaccaaaaaggattatgaagaaattggacctagcatttgtcgtcacaatccagtgtttggagtcatgtcgtaaaattggcttcatagttattggggttagggaggtggggaagagataatctttctgattacctgttttgtctggatggctggttttgaggttttaaacctgacttgaaatagtaacaccaaacatgattatacaggaatattttaataagtgtatcaccatgcagatgtagaagagagcgaaagtgattgtgtttttctttagattgaatatttgaatcttatgtgtaacaaaaagaagtgggttttagttctttctgtgccctgatattttgtatattaatgaattatccaagattcgatgggatttatcagtgtgtagatagctctataatgcttgaattgtacacttctaagtgtgcagtgcaagagcttgtttatatttcatactttttatactttgaggaaaaaaagtcaaagaaaaattgtatttgagggaaaaaaccatgaccaagtaaaggataaattcaaaaaatagcctcatgagacttggcatacacactcgtgggattccagttattatggagtgcttccatccctctccaccccttccccccaaaaggttttctttgcaagtgcttttggaactaagagctagtatcttggattaactgatgcctgctagtgctttctgattactcgcattctgtttcttgctttaaaagaagagtaaagacaagagtgttggaccagtattgcagttctgtagtgtcatttcttataaaaaacaaaacaacaacaataatttatcaaaattggcatatttaaagcctaacattctaataaaggcacaaatttctttttaatacttgtttcagcctctttaatctctttataagttaactaataaatctattttcttcagacttctgcaatagttctttaaaatcacaacagttagcaagctgacttttgtaatgtgctcaatacaaatacttgtgaacttttaatatgttgagtgctttcattttgataactggatctccatttgatattttcatttgtataactcatttgcagtctgaaaattttttttagtgccagtccctgaacatatcattgaaagttaattttctttgcattttaaaatatctggattatgaagaaaaaagtgatgaaaataaattaaaactgaattacc

SEQ ID NO: 439481 - DNA, 3462 bp, Homo sapiens
ggagggatggggggggggtctccccatgttgcccaggctggtctcgaactcctagcctcaagctatcctatcctcccacctcggccttccaaagcattgaaattacaggcatgacccactgcggctcgcctccgtttctaacttaaaaaaattttctttggaggggagccttaatcctttctattatcctgctagtagaatcttactactcctgagggtaatctttgtcataatccaaaagccttgaataaaggcctatttgtatagttatgcagaatatattcctgggaggtttgccttcctaggagcacaggtcggccctgggaggtgggggttggggggcagggctgcattctaaagtcctgtaacaacgcacaagtacaactgaatagaactcggaacaaaggcatcagggccacggtgcaagtctttgttcatccgttccccgactgctcaccctgtctgataccgctcttttccacccagaaaagcagccactcaagttttaagaatggatgtatgccgcggacgttttcgattaggccgttttctctcaggcactggaggatattcgtggctgcaggaggcgcttccaccctttcctcaacctagcaaagaagtaactgaaactaacccaagggttacaaccgaaaagccccttccagcttcagaagcagaactggaagctcggatagacttctccgcctctacactcctggaaaacccgcagtggatttcaccaacttcagggtcggagcccaggcaggcgaacgtaccttattgcgcatgctcgctagcccctcccgctcggagcggaagggggagcgctgggggcctgggcctggcctggccggggcgtcggcaccggcggccatcttggcttcccggggaaaggcggcgtgaggggaagaagttgtagggtgggggcaggagtgaggaggagggaagagagagggggaggaggccgcggcggggcagggcggggactgcctgcctgcctgggttgcggaagtgatagccgccgaccgagcctgctgctttcttgctactgcttcggcttcccggctaccccccggacggtgaaggcggcccagctgtggatggtcagatagcccttgtctcccgccgccaatctctggcccctagcagcacggagcagacggcggcagcagcagcagcaggcgaggaggaagatggcgggacggctgccggcctgtgtggtggactgtggcacggggtatacaaaactaggatatgctggaaatacagaaccacagtttatcatcccttccttggccaatccgccatggtatagttgaagattgggacttaatggaaaggtttatggagcaagtgatctttaaatatttaagggcagaacctgaagaccattattttcttttgactgaacctccattgaatactccagaaaacagggaatatactgctgaaataatgtttgagtccttcaatgttccaggcttgtacattgctgtgcaggctgttcttgccttagctgcatcttggacctcaagacaagtaggagaacggacgttgaccggtacggtaatagacagtggagatggtgtcactcatgtcattcctgtggctgaagggtatgtgattggcagctgtattaaacacattccaatcgcaggacgagatataacatattttattcagcaactgctgagagaccgagaagtaggaatccctccagaacaatccttggaaactgctaaggcagtaaaggagcgctatagttatgtctgcccagatttagtaaaagaatttaacaagtatgatacagatgggtcaaaatggattaaacagtatactggaatcaatgctatctcaaagaaagagttttctatcgatgttggttatgagagatttttgggacctgaaatcttttttcatccagagtttgctaatccagactttacacaacctatctcagaagttgtagatgaagtaattcagaattgtcctattgatgtcagacgtcctctctacaagaatattgtcctctctggaggttcaaccatgttcagggactttggacgtcgcttgcaaagagatttgaaaagaactgtagatgcccggctgaaattaagtgaggaattgagtggtggtagattgaagccaaaacctattgatgtacaagtcattacacaccacatgcagcgatatgcagtttggtttggaggatcaatgctggcttccacgcctgagttctaccaagtatgccacaccaaaaaggattatgaagaaattggacctagcatttgtcgtcacaatccagtgtttggagtcatgtcgtaaaattggcttcatagttattggggttagggaggtggggaagagataatctttctgattacctgttttgtctggatggctggttttgaggttttaaacctgacttgaaatagtaacaccaaacatgattatacaggaatattttaataagtgtatcaccatgcagatgtagaagagagcgaaagtgattgtgtttttctttagattgaatatttgaatcttatgtgtaacaaaaagaagtgggttttagttctttctgtgccctgatattttgtatattaatgaattatccaagattcgatgggatttatcagtgtgtagatagctctataatgcttgaattgtacacttctaagtgtgcagtgcaagagcttgtttatatttcatactttttatactttgaggaaaaaaagtcaaagaaaaattgtatttgagggaaaaaaccatgaccaagtaaaggataaattcaaaaaatagcctcatgagacttggcatacacactcgtgggattccagttattatggagtgcttccatccctctccaccccttccccccaaaaggttttctttgcaagtgcttttggaactaagagctagtatcttggattaactgatgcctgctagtgctttctgattactcgcattctgtttcttgctttaaaagaagagtaaagacaagagtgttggaccagtattgcagttctgtagtgtcatttcttataaaaaacaaaacaacaacaataatttatcaaaattggcatatttaaagcctaacattctaataaaggcacaaatttctttttaatacttgtttcagcctctttaatctctttataagttaactaataaatctattttcttcagacttctgcaatagttctttaaaatcacaacagttagcaagctgacttttgtaatgtgctcaatacaaatacttgtgaacttttaatatgttgagtgctttcattttgataactggatctccatttgatattttcatttgtataactcatttgcagtctgaaaattttttttagtgccagtccctgaacatatcattgaaagttaattttctttgcattttaaaatatctggattatgaagaaaaaagtgatgaaaataaattaaaactgaattacc

SEQ ID NO: 439482 - DNA, 2122 bp, Homo sapiens
ggctaggtacgaggctgggtgttgaatcggccgaggcagaactgaagaccattattttcttttgactgaacctccattgaatactccagaaaacagggaatatactgctgaaataatgtttgagtccttcaatgttccaggcttgtacattgctgtgcaggctgttcttgccttagctgcatcttggacctcaagacaagtaggagaacggacgttgaccggtacggtaatagacagtggagatggtgtcactcatgtcattcctgtggctgaagggtatgtgattggcagctgtattaaacacattccaatcgcaggacgagatataacatattttattcagcaactgctgagagaccgagaagtaggaatccctccagaacaatccttggaaactgctaaggcagtaaaggagcgctatagttatgtctgcccagatttagtaaaagaatttaacaagtatgatacagatgggtcaaaatggattaaacagtatactggaatcaatgctatctcaaagaaagagttttctatcgatgttggttatgagagatttttgggacctgaaatcttttttcatccagagtttgctaatccagactttacacaacctatctcagaagttgtagatgaagtaattcagaattgtcctattgatgtcagacgtcctctctacaagaatattgtcctctctggaggttcaaccatgttcagggactttggacgtcgcttgcaaagagatttgaaaagaactgtagatgcccggctgaaattaagtgaggaattgagtggtggtagattgaagccaaaacctattgatgtacaagtcattacacaccacatgcagcgatatgcagtttggtttggaggatcaatgctggcttccacgcctgagttctaccaagtatgccacaccaaaaaggattatgaagaaattggacctagcatttgtcgtcacaatccagtgtttggagtcatgtcgtaaaattggcttcatagttattggggttagggaggtggggaagagataatctttctgattacctgttttgtctggatggctggttttgaggttttaaacctgacttgaaatagtaacaccaaacatgattatacaggaatattttaataagtgtatcaccatgcagatgtagaagagagcgaaagtgattgtgtttttctttagattgaatatttgaatcttatgtgtaacaaaaagaagtgggttttagttctttctgtgccctgatattttgtatattaatgaattatccaagattcgatgggatttatcagtgtgtagatagctctataatgcttgaattgtacacttctaagtgtgcagtgcaagagcttgtttatatttcatactttttatactttgaggaaaaaaagtcaaagaaaaattgtatttgagggaaaaaaccatgaccaagtaaaggataaattcaaaaaatagcctcatgagacttggcatacacactcgtgggattccagttattatggagtgcttccatccctctccaccccttccccccaaaaggttttctttgcaagtgcttttggaactaagagctagtatcttggattaactgatgcctgctagtgctttctgattactcgcattctgtttcttgctttaaaagaagagtaaagacaagagtgttggaccagtattgcagttctgtagtgtcatttcttataaaaaacaaaacaacaacaataatttatcaaaattggcatatttaaagcctaacattctaataaaggcacaaatttctttttaatacttgtttcagcctctttaatctctttataagttaactaataaatctattttcttcagacttctgcaatagttctttaaaatcacaacagttagcaagctgacttttgtaatgtgctcaatacaaatacttgtgaacttttaatatgttgagtgctttcattttgataactggatctccatttgatattttcatttgtataactcatttgcagtctgaaaattttttttagtgccagtccctgaacatatcattgaaagttaattttctttgcattttaaaatatctggattatgaagaaaaaagtgatgaaaataaattaaaactgaattacc

SEQ ID NO: 439483 - DNA, 2737 bp, Homo sapiens
ggagggatggggggggggtctccccatgttgcccaggctggtctcgaactcctagcctcaagctatcctatcctcccacctcggccttccaaagcattgaaattacaggcatgacccactgcggctcgcctccgtttctaacttaaaaaaattttctttggaggggagccttaatcctttctattatcctgctagtagaatcttactactcctgagggtaatctttgtcataatccaaaagccttgaataaaggcctatttgtatagttatgcagaatatattcctgggaggtttgccttcctaggagcacaggtcggccctgggaggtgggggttggggggcagggctgcattctaaagtcctgtaacaacgcacaagtacaactgaatagaactcggaacaaaggcatcagggccacggtgcaagtctttgttcatccgttccccgactgctcaccctgtctgataccgctcttttccacccagaaaagcagccactcaagttttaagaatggatgtatgccgcggacgttttcgattaggccgttttctctcaggcactggaggatattcgtggctgcaggaggcgcttccaccctttcctcaacctagcaaagaagtaactgaaactaacccaagggttacaaccgaaaagccccttccagcttcagaagcagaactggaagctcggatagacttctccgcctctacactcctggaaaacccgcagtggatttcaccaacttcagggtcggagcccaggcaggcgaacgtaccttattgcgcatgctcgctagcccctcccgctcggagcggaagggggagcgctgggggcctgggcctggcctggccggggcgtcggcaccggcggccatcttggcttcccggggaaaggcggcgtgaggggaagaagttgtagggtgggggcaggagtgaggaggagggaagagagagggggaggaggccgcggcggggcagggcggggactgcctgcctgcctgggttgcggaagtgatagccgccgaccgagcctgctgctttcttgctactgcttcggcttcccggctaccccccggacggtgaaggcggcccagctgtggatggtcagatagcccttgtctcccgccgccaatctctggcccctagcagcacggagcagacggcggcagcagcagcagcaggcgaggaggaagatggcgggacggctgccggcctgtgtggtggactgtggcacggggtatacaaaactaggatatgctggaaatacagaaccacagtttatcatcccttcctgtattgctattaaggagtcagcaaaagtgggtgatcaagctcaaaggagggtgatgaaaggtgttgatgacctagacttcttcattggtgatgaagcaatagaaaaacctacatatgcaacaaagtggccaatccgccatggtatagttgaagattgggacttaatggaaaggtttatggagcaagtgatctttaaatatttaagggcagaacctgaagaccattattttcttttgactgaacctccattgaatactccagaaaacagggaatatactgctgaaataatgtttgagtccttcaatgttccaggcttgtacattgctgtgcaggctgttcttgccttagctgcatcttggacctcaagacaagtaggagaacggacgttgaccggtacggtaatagacagtggagatggtgtcactcatgtcattcctgtggctgaagggtatgtgattggcagctgtattaaacacattccaatcgcaggacgagatataacatattttattcagcaactgctgagagaccgagaagtaggaatccctccagaacaatccttggaaactgctaaggcagtaaaggagcgctatagttatgtctgcccagatttagtaaaagaatttaacaagtatgatacagatgggtcaaaatggattaaacagtatactggaatcaatgctatctcaaagaaagagttttctatcgatgttggttatgagagatttttgggacctgaaatcttttttcatccagagtttgctaatccagactttacacaacctatctcagaagttgtagatgaagtaattcagaattgtcctattgatgtcagacgtcctctctacaagaatattgtcctctctggaggttcaaccatgttcagggactttggacgtcgcttgcaaagagatttgaaaagaactgtagatgcccggctgaaattaagtgaggaattgagtggtggtagattgaagccaaaacctattgatgtacaagtcattacacaccacatgcagcgatatgcagtttggtttggaggatcaatgctggcttccacgcctgagttctaccaagtatgccacaccaaaaaggattatgaagaaattggacctagcatttgtcgtcacaatccagtgtttggagtcatgtcgcagcagtgaggatgccagagttcatgggtttctagaagacaagttttcaactgcagatacaaacatcaggacgtcaatgtatctgctaggagacacccggacagtgttgagaacacagaacctggaggctaaacccccagctttctatgccagctgagagtctgtgggcacattactcagcgtctctgaacctcatgctcctcccctgtgacatgtagattgctaaacccatctcacagggctatcttctgcatttaaagaataaaataacacatgaggggtcgttggcc

SEQ ID NO: 439484 - DNA, 2464 bp, Homo sapiens
ggagggatggggggggggtctccccatgttgcccaggctggtctcgaactcctagcctcaagctatcctatcctcccacctcggccttccaaagcattgaaattacaggcatgacccactgcggctcgcctccgtttctaacttaaaaaaattttctttggaggggagccttaatcctttctattatcctgctagtagaatcttactactcctgagggtaatctttgtcataatccaaaagccttgaataaaggcctatttgtatagttatgcagaatatattcctgggaggtttgccttcctaggagcacaggtcggccctgggaggtgggggttggggggcagggctgcattctaaagtcctgtaacaacgcacaagtacaactgaatagaactcggaacaaaggcatcagggccacggtgcaagtctttgttcatccgttccccgactgctcaccctgtctgataccgctcttttccacccagaaaagcagccactcaagttttaagaatggatgtatgccgcggacgttttcgattaggccgttttctctcaggcactggaggatattcgtggctgcaggaggcgcttccaccctttcctcaacctagcaaagaagtaactgaaactaacccaagggttacaaccgaaaagccccttccagcttcagaagcagaactggaagctcggatagacttctccgcctctacactcctggaaaacccgcagtggatttcaccaacttcagggtcggagcccaggcaggcgaacgtaccttattgcgcatgctcgctagcccctcccgctcggagcggaagggggagcgctgggggcctgggcctggcctggccggggcgtcggcaccggcggccatcttggcttcccggggaaaggcggcgtgaggggaagaagttgtagggtgggggcaggagtgaggaggagggaagagagagggggaggaggccgcggcggggcagggcggggactgcctgcctgcctgggttgcggaagtgatagccgccgaccgagcctgctgctttcttgctactgcttcggcttcccggctaccccccggacggtgaaggcggcccagctgtggatggtcagatagcccttgtctcccgccgccaatctctggcccctagcagcacggagcagacggcggcagcagcagcagcaggcgaggaggaagatggcgggacggctgccggcctgtgtggtggactgtggcacggggtatacaaaactaggatatgctggaaatacagaaccacagtttatcatcccttcctgtattgctattaaggagtcagcaaaagtgggtgatcaagctcaaaggagggtgatgaaaggtgttgatgacctagacttcttcattggtgatgaagcaatagaaaaacctacatatgcaacaaagtggccaatccgccatggtatagttgaagattgggacttaatggaaaggtttatggagcaagtgatctttaaatatttaagggcagaacctgaagaccattattttcttttgactgaacctccattgaatactccagaaaacagggaatatactgctgaaataatgtttgagtccttcaatgttccaggcttgtacattgctgtgcaggctgttcttgccttagctgcatcttggacctcaagacaagtaggagaacggacgttgaccggtacggtaatagacagtggagatggtgtcactcatgtcattcctgtggctgaagggtatgtgattggcagctgtattaaacacattccaatcgcaggacgagatataacatattttattcagcaactgctgagagaccgagaagtaggaatccctccagaacaatccttggaaactgctaaggcagtaaaggagcgctatagttatgtctgcccagatttagtaaaagaatttaacaagtatgatacagatgggtcaaaatggattaaacagtatactggaatcaatgctatctcaaagaaagagttttctatcgatgttggttatgagagatttttgggacctgaaatcttttttcatccagagtttgctaatccagactttacacaacctatctcagaagttgtagatgaagtaattcagaattgtcctattgatgtcagacgtcctctctacaagaatattgtcctctctggaggttcaaccatgttcagggactttggacgtcgcttgcaaagagatttgaaaagaactgtagatgcccggctgaaattaagtgaggaattgagtggtggtagattgaagccaaaacctattgatgtacaagtcattacacaccacatgcagcgatatgcagtttggtttggaggatcaatgctggcttccacgcttgaagtttccaaagttgccacccaaaaaggattatgaagcttataggtatggggtaagggagtgtgaagagatacccttcggtacccgctaggttgatgctggtttat

SEQ ID NO: 439485 - DNA, 2295 bp, Homo sapiens
ggagggatggggggggggtctccccatgttgcccaggctggtctcgaactcctagcctcaagctatcctatcctcccacctcggccttccaaagcattgaaattacaggcatgacccactgcggctcgcctccgtttctaacttaaaaaaattttctttggaggggagccttaatcctttctattatcctgctagtagaatcttactactcctgagggtaatctttgtcataatccaaaagccttgaataaaggcctatttgtatagttatgcagaatatattcctgggaggtttgccttcctaggagcacaggtcggccctgggaggtgggggttggggggcagggctgcattctaaagtcctgtaacaacgcacaagtacaactgaatagaactcggaacaaaggcatcagggccacggtgcaagtctttgttcatccgttccccgactgctcaccctgtctgataccgctcttttccacccagaaaagcagccactcaagttttaagaatggatgtatgccgcggacgttttcgattaggccgttttctctcaggcactggaggatattcgtggctgcaggaggcgcttccaccctttcctcaacctagcaaagaagtaactgaaactaacccaagggttacaaccgaaaagccccttccagcttcagaagcagaactggaagctcggatagacttctccgcctctacactcctggaaaacccgcagtggatttcaccaacttcagggtcggagcccaggcaggcgaacgtaccttattgcgcatgctcgctagcccctcccgctcggagcggaagggggagcgctgggggcctgggcctggcctggccggggcgtcggcaccggcggccatcttggcttcccggggaaaggcggcgtgaggggaagaagttgtagggtgggggcaggagtgaggaggagggaagagagagggggaggaggccgcggcggggcagggcggggactgcctgcctgcctgggttgcggaagtgatagccgccgaccgagcctgctgctttcttgctactgcttcggcttcccggctaccccccggacggtgaaggcggcccagctgtggatggtcagatagcccttgtctcccgccgccaatctctggcccctagcagcacggagcagacggcggcagcagcagcagcaggcgaggaggaagatggcgggacggctgccggcctgtgtggtggactgtggcacggggtatacaaaactaggatatgctggaaatacagaaccacagtttatcatcccttcctgtattgctattaaggagtcagcaaaagtgggtgatcaagctcaaaggagggtgatgaaaggtgttgatgacctagacttcttcattggtgatgaagcaatagaaaaacctacatatgcaacaaagtggccaatccgccatggtatagttgaagattgggacttaatggaaaggtttatggagcaagtgatctttaaatatttaagggcagaacctgaagaccattattttcttttgactgaacctccattgaatactccagaaaacagggaatatactgctgaaataatgtttgagtccttcaatgttccaggcttgtacattgctgtgcaggctgttcttgccttagctgcatcttggacctcaagacaagtaggagaacggacgttgaccggtacggtaatagacagtggagatggtgtcactcatgtcattcctgtggctgaagggtatgtgattggcagctgtattaaacacattccaatcgcaggacgagatataacatattttattcagcaactgctgagagaccgagaagtaggaatccctccagaacaatccttggaaactgctaaggcagtaaaggagcgctatagttatgtctgcccagatttagtaaaagaatttaacaagtatgatacagatgggtcaaaatggattaaacagtatactggaatcaatgctatctcaaagaaagagttttctatcgatgttggttatgagagatttttgggacctgaaatcttttttcatccagagtttgctaatccagactttacacaacctatctcagaagttgtagatgaagtaattcagaattgtcctattgatgtcagacgtcctctctacaagaatattgtcctctctggaggttcaaccatgttcagggactttggacgtcgcttgcaaagagatttgaaaagaactgtagatgcccggctgaaattaagtgaggaattgagtggtggtagattgaaggttggttttcccaattattggtgag

SEQ ID NO: 439486 - DNA, 1885 bp, Homo sapiens
tatgtttttgcttaatcctggaatatgtatatgatagtttcagaattgttaatccacaccactgtgaaaaatagacccaaaactagaattcaatatttgcttatattttatcttcagcctgaaggcttataagattcaaaatactatgctcacaagttgcttgtgttagtccctttcctcaccttagtgtgcttatgtttgaaaaaagtacaattagtttaatttgtttttgttgtactttgttttgccccaacctccccttcttttaaggtgttattttttagtatgtaaaacactaacatttagattcttaaagtcagaactgtataaaacatgtgctcattgttatttcccttccatttattctgctctgttccctccctgtctcttccacagtgttcccaacccctttcctctgagacagccaatctcaattgtttctggtttgtaagataccacctgaatttagtacagatattatttttgtatatgtacatttaaggttaaatgacacagaagttgttatttgaatttactatgaagatgatcatactatgtctttctttagccaaaacctattgatgtacaagtcattacacaccacatgcagcgatatgcagtttggtttggaggatcaatgctggcttccacgcctgagttctaccaagtatgccacaccaaaaaggattatgaagaaattggacctagcatttgtcgtcacaatccagtgtttggagtcatgtcgtaaaattggcttcatagttattggggttagggaggtggggaagagataatctttctgattacctgttttgtctggatggctggttttgaggttttaaacctgacttgaaatagtaacaccaaacatgattatacaggaatattttaataagtgtatcaccatgcagatgtagaagagagcgaaagtgattgtgtttttctttagattgaatatttgaatcttatgtgtaacaaaaagaagtgggttttagttctttctgtgccctgatattttgtatattaatgaattatccaagattcgatgggatttatcagtgtgtagatagctctataatgcttgaattgtacacttctaagtgtgcagtgcaagagcttgtttatatttcatactttttatactttgaggaaaaaaagtcaaagaaaaattgtatttgagggaaaaaaccatgaccaagtaaaggataaattcaaaaaatagcctcatgagacttggcatacacactcgtgggattccagttattatggagtgcttccatccctctccaccccttccccccaaaaggttttctttgcaagtgcttttggaactaagagctagtatcttggattaactgatgcctgctagtgctttctgattactcgcattctgtttcttgctttaaaagaagagtaaagacaagagtgttggaccagtattgcagttctgtagtgtcatttcttataaaaaacaaaacaacaacaataatttatcaaaattggcatatttaaagcctaacattctaataaaggcacaaatttctttttaatacttgtttcagcctctttaatctctttataagttaactaataaatctattttcttcagacttctgcaatagttctttaaaatcacaacagttagcaagctgacttttgtaatgtgctcaatacaaatacttgtgaacttttaatatgttgagtgctttcattttgataactggatctccatttgatattttcatttgtataactcatttgcagtctgaaaattttttttagtgccagtccctgaacatatcattgaaagttaattttctttgcattttaaaatatctggattatgaagaaaaaagtgatgaaaataaattaaaactgaattacc

SEQ ID NO: 439487 - DNA, 2489 bp, Homo sapiens
ggagggatggggggggggtctccccatgttgcccaggctggtctcgaactcctagcctcaagctatcctatcctcccacctcggccttccaaagcattgaaattacaggcatgacccactgcggctcgcctccgtttctaacttaaaaaaattttctttggaggggagccttaatcctttctattatcctgctagtagaatcttactactcctgagggtaatctttgtcataatccaaaagccttgaataaaggcctatttgtatagttatgcagaatatattcctgggaggtttgccttcctaggagcacaggtcggccctgggaggtgggggttggggggcagggctgcattctaaagtcctgtaacaacgcacaagtacaactgaatagaactcggaacaaaggcatcagggccacggtgcaagtctttgttcatccgttccccgactgctcaccctgtctgataccgctcttttccacccagaaaagcagccactcaagttttaagaatggatgtatgccgcggacgttttcgattaggccgttttctctcaggcactggaggatattcgtggctgcaggaggcgcttccaccctttcctcaacctagcaaagaagtaactgaaactaacccaagggttacaaccgaaaagccccttccagcttcagaagcagaactggaagctcggatagacttctccgcctctacactcctggaaaacccgcagtggatttcaccaacttcagggtcggagcccaggcaggcgaacgtaccttattgcgcatgctcgctagcccctcccgctcggagcggaagggggagcgctgggggcctgggcctggcctggccggggcgtcggcaccggcggccatcttggcttcccggggaaaggcggcgtgaggggaagaagttgtagggtgggggcaggagtgaggaggagggaagagagagggggaggaggccgcggcggggcagggcggggactgcctgcctgcctgggttgcggaagtgatagccgccgaccgagcctgctgctttcttgctactgcttcggcttcccggctaccccccggacggtgaaggcggcccagctgtggatggtcagatagcccttgtctcccgccgccaatctctggcccctagcagcacggagcagacggcggcagcagcagcagcaggcgaggaggaagatggcgggacggctgccggcctgtgtggtggactgtggcacggggtatacaaaactaggatatgctggaaatacagaaccacagtttatcatcccttcctgtattgctattaaggagtcagcaaaagtgggtgatcaagctcaaaggagggtgatgaaaggtgttgatgacctagacttcttcattggtgatgaagcaatagaaaaacctacatatgcaacaaagtggccaatccgccatggtatagttgaagattgggacttaatggaaaggtttatggagcaagtgatctttaaatatttaagggcagaacctgaagaccattattttcttttgactgaacctccattgaatactccagaaaacagggaatatactgctgaaataatgtttgagtccttcaatgttccaggcttgtacattgctgtgcaggctgttcttgccttagctgcatcttggacctcaagacaagtaggagaacggacgttgaccggtacggtaatagacagtggagatggtgtcactcatgtcattcctgtggctgaagggtatgtgattggcagctgtattaaacacattccaatcgcaggacgagatataacatattttattcagcaactgctgagagaccgagaagtaggaatccctccagaacaatccttggaaactgctaaggcagtaaaggagcgctatagttatgtctgcccagatttagtaaaagaatttaacaatgcttttggaactaagagctagtatcttggattaactgatgcctgctagtgctttctgattactcgcattctgtttcttgctttaaaagaagagtaaagacaagagtgttggaccagtattgcagttctgtagtgtcatttcttataaaaaacaaaacaacaacaataatttatcaaaattggcatatttaaagcctaacattctaataaaggcacaaatttctttttaatacttgtttcagcctctttaatctctttataagttaactaataaatctattttcttcagacttctgcaatagttctttaaaatcacaacagttagcaagctgacttttgtaatgtgctcaatacaaatacttgtgaacttttaatatgttgagtgctttcattttgataactggatctccatttgatattttcatttgtataactcatttgcagtctgaaaattttttttagtgccagtccctgaacatatcattgaaagttaattttctttgcattttaaaatatctggattatgaagaaaaaagtgatgaaaataaattaaaactgaattacc

SEQ ID NO: 439488 - DNA, 2109 bp, Homo sapiens
tcatcagaaggtccttgtttgttctgtttaagtatttaaaaacattaaggtaaaagttaagcttcattgcatagaaagtatgatgttttacactgaataaagggaattattctaagaatcctgtccccaaattaaaatgtctttaaagccccctaaaaaggtgttctagtgttctaataccattaacctaggaagtattggtgctttgttctggtagtgcatgcaatattaaaatgaaggagcttttatctgaattattgaataactgtacaactttggatttaaaaccatttccaacataagaggtgaaagttatttttttcctcaattttagtcttcttcaattgggccatataacctagttgagtttgtgactttgccttgagaaatgaggtaacacagcatggaacagtctatcttttccagaccttgaatgaggaaggcaaatgatctagacatttcttagaactagacgaaaaatagtcatagcatgactaggagtagttttatctgtagttaggcgaatgccgcttctttacattattggtgcaatgaaagtatgggaaagtctcaacagaacagactggacatttgagaaccttccatttttcaaaatttcagaatcctcgcagcaggtgtgtgagacaaggattggggacaggagttaattgctcttttggagttccgataaagatttatagctgattttaagtcatggctgctagaatttctaagctttcatgccatgaatggactaataataaacattttagacttaacatctattttaaagcatcactcttaaagtttatttcaatataccttcaagatggtagatttttgacccttataaaaatacatattttttgttttcagcctgagttctaccaagtatgccacaccaaaaaggattatgaagaaattggacctagcatttgtcgtcacaatccagtgtttggagtcatgtcgtaaaattggcttcatagttattggggttagggaggtggggaagagataatctttctgattacctgttttgtctggatggctggttttgaggttttaaacctgacttgaaatagtaacaccaaacatgattatacaggaatattttaataagtgtatcaccatgcagatgtagaagagagcgaaagtgattgtgtttttctttagattgaatatttgaatcttatgtgtaacaaaaagaagtgggttttagttctttctgtgccctgatattttgtatattaatgaattatccaagattcgatgggatttatcagtgtgtagatagctctataatgcttgaattgtacacttctaagtgtgcagtgcaagagcttgtttatatttcatactttttatactttgaggaaaaaaagtcaaagaaaaattgtatttgagggaaaaaaccatgaccaagtaaaggataaattcaaaaaatagcctcatgagacttggcatacacactcgtgggattccagttattatggagtgcttccatccctctccaccccttccccccaaaaggttttctttgcaagtgcttttggaactaagagctagtatcttggattaactgatgcctgctagtgctttctgattactcgcattctgtttcttgctttaaaagaagagtaaagacaagagtgttggaccagtattgcagttctgtagtgtcatttcttataaaaaacaaaacaacaacaataatttatcaaaattggcatatttaaagcctaacattctaataaaggcacaaatttctttttaatacttgtttcagcctctttaatctctttataagttaactaataaatctattttcttcagacttctgcaatagttctttaaaatcacaacagttagcaagctgacttttgtaatgtgctcaatacaaatacttgtgaacttttaatatgttgagtgctttcattttgataactggatctccatttgatattttcatttgtataactcatttgcagtctgaaaattttttttagtgccagtccctgaacatatcattgaaagttaattttctttgcattttaaaatatctggattatgaagaaaaaagtgatgaaaataaattaaaactgaattacc

SEQ ID NO: 439489 - DNA, 1796 bp, Homo sapiens
taggtctccctgcttccttttgccagaaaaggtaaagttctggagaaagaggttttttcttggcttttgagttcaggccttacagaggtaaaaccgagtagatgtgggagaacatgtggtaaacagatacaactttcccgggatggggagagaaaaatagtgaaactccatctccactaaaaatacaaatactagcccggccgtggtggcacgcgcctgtaatcccaactacttgggaggctgcggcaggtgaatcacttgaagccgggaggtgaaggccgcagtaacgctgttccctgcattggatgaagtgctccccaccaaactctctcaccggagagggtgggatctgcgggctccctgggtggcttgatttcgacaccctgtgggctgccttccactctggtactttcctctgcctgctgatgcttgaaattccttgaaccggccacacacacctgctttctggaatcagaacactggaaaggcttcctgggacgggagaagagtgatttacattcctgccgaggtgtaaagctgcggatggcaggttctctcctgagaaccggcttcaactaggaggaggaggttggaagcaggaccccgagctgacctgttgaccaggagaggagtaagcagaagggaggcaggagcgggcggaggagagaaggccggggagccgggatgggggtcaccgcccccggggagccgggatgggggtcaccgcccccggggagccgggatgggggtcaccgcccccgcccccgtgatgccgagctgaaaaagacagtctccaggtaggataatccgtcacactagatgcatatagcttcatgcaagaagagcgactgttgcgctgtcttctaccccctttggccgcgatcccgtgacaatgccggcatccgggcaccaactggcttttgcgaaccgctctccgctccccgcccggattccgaagcccggagccgtttacagtttgaggcgccgtgtgccgccccctggtggccggaggccgttactgtcgcggctgagggggcgtcccggtgtatccgcagcgcgccctggccgccctctggtggccggaggccgttactgtcgcggctgagggggcgtcccggtgtatccgcagcgcgccctggccgccccctggtggccggaggccgttactgtcgcggctgagggggcgtcccggtgtatccgcagcgcgccctggccgacccctggtggccggaggccgttactgtcgcggctgaaggggcgtgtcccggtgtatccgcagcgcgccctggctgccccctggtggccggaggccgttactgtcgcggctgagggggcgtcccggtgtatccgcagcgcgccctgtcccgccatatacattccgtgcttttcaaacacccgccgtgggctaagcatgggacccacgtggggcggggacacacggcgataaagagccaggccctcgctgccaaggagctttcccgtaacaccgatgcatcaaacaaaaggcagcagtgaggatgccagagttcatgggtttctagaagacaagttttcaactgcagatacaaacatcaggacgtcaatgtatctgctaggagacacccggacagtgttgagaacacagaacctggaggctaaacccccagctttctatgccagctgagagtctgtgggcacattactcagcgtctctgaacctcatgctcctcccctgtgacatgtagattgctaaacccatctcacagggctatcttctgcatttaaagaataaaataacacatgaggggtcgttggcc

SEQ ID NO: 439490 - DNA, 1767 bp, Homo sapiens
taggtctccctgcttccttttgccagaaaaggtaaagttctggagaaagaggttttttcttggcttttgagttcaggccttacagaggtaaaaccgagtagatgtgggagaacatgtggtaaacagatacaactttcccgggatggggagagaaaaatagtgaaactccatctccactaaaaatacaaatactagcccggccgtggtggcacgcgcctgtaatcccaactacttgggaggctgcggcaggtgaatcacttgaagccgggaggtgaaggccgcagtaacgctgttccctgcattggatgaagtgctccccaccaaactctctcaccggagagggtgggatctgcgggctccctgggtggcttgatttcgacaccctgtgggctgccttccactctggtactttcctctgcctgctgatgcttgaaattccttgaaccggccacacacacctgctttctggaatcagaacactggaaaggcttcctgggacgggagaagagtgatttacattcctgccgaggtgtaaagctgcggatggcaggttctctcctgagaaccggcttcaactaggaggaggaggttggaagcaggaccccgagctgacctgttgaccaggagaggagtaagcagaagggaggcaggagcgggcggaggagagaaggccggggagccgggatgggggtcaccgcccccggggagccgggatgggggtcaccgcccccgcccccgtgatgccgagctgaaaaagacagtctccaggtaggataatccgtcacactagatgcatatagcttcatgcaagaagagcgactgttgcgctgtcttctaccccctttggccgcgatcccgtgacaatgccggcatccgggcaccaactggcttttgcgaaccgctctccgctccccgcccggattccgaagcccggagccgtttacagtttgaggcgccgtgtgccgccccctggtggccggaggccgttactgtcgcggctgagggggcgtcccggtgtatccgcagcgcgccctggccgccctctggtggccggaggccgttactgtcgcggctgagggggcgtcccggtgtatccgcagcgcgccctggccgccccctggtggccggaggccgttactgtcgcggctgagggggcgtcccggtgtatccgcagcgcgccctggccgacccctggtggccggaggccgttactgtcgcggctgaaggggcgtgtcccggtgtatccgcagcgcgccctggctgccccctggtggccggaggccgttactgtcgcggctgagggggcgtcccggtgtatccgcagcgcgccctgtcccgccatatacattccgtgcttttcaaacacccgccgtgggctaagcatgggacccacgtggggcggggacacacggcgataaagagccaggccctcgctgccaaggagctttcccgtaacaccgatgcatcaaacaaaaggcagcagtgaggatgccagagttcatgggtttctagaagacaagttttcaactgcagatacaaacatcaggacgtcaatgtatctgctaggagacacccggacagtgttgagaacacagaacctggaggctaaacccccagctttctatgccagctgagagtctgtgggcacattactcagcgtctctgaacctcatgctcctcccctgtgacatgtagattgctaaacccatctcacagggctatcttctgcatttaaagaataaaataacacatgaggggtcgttggcc

SEQ ID NO: 439491 - DNA, 1775 bp, Homo sapiens
ggagggatggggggggggtctccccatgttgcccaggctggtctcgaactcctagcctcaagctatcctatcctcccacctcggccttccaaagcattgaaattacaggcatgacccactgcggctcgcctccgtttctaacttaaaaaaattttctttggaggggagccttaatcctttctattatcctgctagtagaatcttactactcctgagggtaatctttgtcataatccaaaagccttgaataaaggcctatttgtatagttatgcagaatatattcctgggaggtttgccttcctaggagcacaggtcggccctgggaggtgggggttggggggcagggctgcattctaaagtcctgtaacaacgcacaagtacaactgaatagaactcggaacaaaggcatcagggccacggtgcaagtctttgttcatccgttccccgactgctcaccctgtctgataccgctcttttccacccagaaaagcagccactcaagttttaagaatggatgtatgccgcggacgttttcgattaggccgttttctctcaggcactggaggatattcgtggctgcaggaggcgcttccaccctttcctcaacctagcaaagaagtaactgaaactaacccaagggttacaaccgaaaagccccttccagcttcagaagcagaactggaagctcggatagacttctccgcctctacactcctggaaaacccgcagtggatttcaccaacttcagggtcggagcccaggcaggcgaacgtaccttattgcgcatgctcgctagcccctcccgctcggagcggaagggggagcgctgggggcctgggcctggcctggccggggcgtcggcaccggcggccatcttggcttcccggggaaaggcggcgtgaggggaagaagttgtagggtgggggcaggagtgaggaggagggaagagagagggggaggaggccgcggcggggcagggcggggactgcctgcctgcctgggttgcggaagtgatagccgccgaccgagcctgctgctttcttgctactgcttcggcttcccggctaccccccggacggtgaaggcggcccagctgtggatggtcagatagcccttgtctcccgccgccaatctctggcccctagcagcacggagcagacggcggcagcagcagcagcaggcgaggaggaagatggcgggacggctgccggcctgtgtggtggactgtggcacggggtatacaaaactaggatatgctggaaatacagaaccacagtttatcatcccttcctgtattgctattaaggagtcagcaaaagtgggtgatcaagctcaaaggagggtgatgaaaggtgttgatgacctagacttcttcattggtgatgaagcaatagaaaaacctacatatgcaacaaagtggccaatccgccatggtatagttgaagattgggacttaatggaaaggtttatggagcaagtgatctttaaatatttaagggcagaacctgaagaccattattttcttttgattgtgaagctcatctcatttgaaaatttttggttaacctagaaaagtatagtaaagaatagaatcatcacttgtaatcatacttctcagagactctctgtttacattttgaaatacttcaaatgtaatgtaaggaaatactttccttctgtctcttctccccctgtatttatcacagagacctgatttttttggttagttttttaaaactaaaaaccatactcttgtagcctccttgatcgccca

SEQ ID NO: 439492 - DNA, 1498 bp, Homo sapiens
taggtctccctgcttccttttgccagaaaaggtaaagttctggagaaagaggttttttcttggcttttgagttcaggccttacagaggtaaaaccgagtagatgtgggagaacatgtggtaaacagatacaactttcccgggatggggagagaaaaatagtgaaactccatctccactaaaaatacaaatactagcccggccgtggtggcacgcgcctgtaatcccaactacttgggaggctgcggcaggtgaatcacttgaagccgggaggtgaaggccgcagtaacgctgttccctgcattggatgaagtgctccccaccaaactctctcaccggagagggtgggatctgcgggctccctgggtggcttgatttcgacaccctgtgggctgccttccactctggtactttcctctgcctgctgatgcttgaaattccttgaaccggccacacacacctgctttctggaatcagaacactggaaaggcttcctgggacgggagaagagtgatttacattcctgccgaggtgtaaagctgcggatggcaggttctctcctgagaaccggcttcaactaggaggaggaggttggaagcaggaccccgagctgacctgttgaccaggagaggagtaagcagaagggaggcaggagcgggcggaggagagaaggccggggagccgggatgggggtcaccgcccccggggagccgggatgggggtcaccgcccccggggagccgggatgggggtcaccgcccccgcccccgtgatgccgagctgaaaaagacagtctccaggtaggataatccgtcacactagatgcatatagcttcatgcaagaagagcgactgttgcgctgtcttctaccccctttggccgcgatcccgtgacaatgccggcatccgggcaccaactggcttttgcgaaccgctctccgctccccgcccggattccgaagcccggagccgtttacagtttgaggcgccgtgtgccgccccctggtggccggaggccgttactgtcgcggctgagggggcgtcccggtgtatccgcagcgcgccctgtcccgccatatacattccgtgcttttcaaacacccgccgtgggctaagcatgggacccacgtggggcggggacacacggcgataaagagccaggccctcgctgccaaggagctttcccgtaacaccgatgcatcaaacaaaaggcagcagtgaggatgccagagttcatgggtttctagaagacaagttttcaactgcagatacaaacatcaggacgtcaatgtatctgctaggagacacccggacagtgttgagaacacagaacctggaggctaaacccccagctttctatgccagctgagagtctgtgggcacattactcagcgtctctgaacctcatgctcctcccctgtgacatgtagattgctaaacccatctcacagggctatcttctgcatttaaagaataaaataacacatgaggggtcgttggcc

SEQ ID NO: 439493 - DNA, 1441 bp, Homo sapiens
ggagggatggggggggggtctccccatgttgcccaggctggtctcgaactcctagcctcaagctatcctatcctcccacctcggccttccaaagcattgaaattacaggcatgacccactgcggctcgcctccgtttctaacttaaaaaaattttctttggaggggagccttaatcctttctattatcctgctagtagaatcttactactcctgagggtaatctttgtcataatccaaaagccttgaataaaggcctatttgtatagttatgcagaatatattcctgggaggtttgccttcctaggagcacaggtcggccctgggaggtgggggttggggggcagggctgcattctaaagtcctgtaacaacgcacaagtacaactgaatagaactcggaacaaaggcatcagggccacggtgcaagtctttgttcatccgttccccgactgctcaccctgtctgataccgctcttttccacccagaaaagcagccactcaagttttaagaatggatgtatgccgcggacgttttcgattaggccgttttctctcaggcactggaggatattcgtggctgcaggaggcgcttccaccctttcctcaacctagcaaagaagtaactgaaactaacccaagggttacaaccgaaaagccccttccagcttcagaagcagaactggaagctcggatagacttctccgcctctacactcctggaaaacccgcagtggatttcaccaacttcagggtcggagcccaggcaggcgaacgtaccttattgcgcatgctcgctagcccctcccgctcggagcggaagggggagcgctgggggcctgggcctggcctggccggggcgtcggcaccggcggccatcttggcttcccggggaaaggcggcgtgaggggaagaagttgtagggtgggggcaggagtgaggaggagggaagagagagggggaggaggccgcggcggggcagggcggggactgcctgcctgcctgggttgcggaagtgatagccgccgaccgagcctgctgctttcttgctactgcttcggcttcccggctaccccccggacggtgaaggcggcccagctgtggatggtcagatagcccttgtctcccgccgccaatctctggcccctagcagcacggagcagacggcggcagcagcagcagcaggcgaggaggaagatggcgggacggctgccggcctgtgtggtggactgtggcacggggtatacaaaactaggatatgctggaaatacagaaccacagtttatcatcccttcctgtattgctattaaggagtcagcaaaagtgggtgatcaagctcaaaggagggtgatgaaaggtgttgatgacctagacttcttcattggtgatgaagcaatagaaaaacctacatatgcaacaaaggcaccaccatacagacgcaccac

SEQ ID NO: 439494 - DNA, 1298 bp, Homo sapiens
tcatcagaaggtccttgtttgttctgtttaagtatttaaaaacattaaggtaaaagttaagcttcattgcatagaaagtatgatgttttacactgaataaagggaattattctaagaatcctgtccccaaattaaaatgtctttaaagccccctaaaaaggtgttctagtgttctaataccattaacctaggaagtattggtgctttgttctggtagtgcatgcaatattaaaatgaaggagcttttatctgaattattgaataactgtacaactttggatttaaaaccatttccaacataagaggtgaaagttatttttttcctcaattttagtcttcttcaattgggccatataacctagttgagtttgtgactttgccttgagaaatgaggtaacacagcatggaacagtctatcttttccagaccttgaatgaggaaggcaaatgatctagacatttcttagaactagacgaaaaatagtcatagcatgactaggagtagttttatctgtagttaggcgaatgccgcttctttacattattggtgcaatgaaagtatgggaaagtctcaacagaacagactggacatttgagaaccttccatttttcaaaatttcagaatcctcgcagcaggtgtgtgagacaaggattggggacaggagttaattgctcttttggagttccgataaagatttatagctgattttaagtcatggctgctagaatttctaagctttcatgccatgaatggactaataataaacattttagacttaacatctattttaaagcatcactcttaaagtttatttcaatataccttcaagatggtagatttttgacccttataaaaatacatattttttgttttcagcctgagttctaccaagtatgccacaccaaaaaggattatgaagaaattggacctagcatttgtcgtcacaatccagtgtttggagtcatgtcgtaaaattggcttcatagttattggggttagggaggtgggcagcagtgaggatgccagagttcatgggtttctagaagacaagttttcaactgcagatacaaacatcaggacgtcaatgtatctgctaggagacacccggacagtgttgagaacacagaacctggaggctaaacccccagctttctatgccagctgagagtctgtgggcacattactcagcgtctctgaacctcatgctcctcccctgtgacatgtagattgctaaacccatctcacagggctatcttctgcatttaaagaataaaataacacatgaggggtcgttggcc

SEQ ID NO: 439495 - DNA, 714 bp, Homo sapiens
gcgcagttctggtaacagctatatcacgtgttaggatatatcgagacacaagtagtctcttgacattggtgcttacacacctctgtgagatagttttctccgaaaccatccctctccaccccttccccccaaaaggttttctttgcaagtgcttttggaactaagagctagtatcttggattaactgatgcctgctagtgctttctgattactcgcattctgtttcttgctttaaaagaagagtaaagacaagagtgttggaccagtattgcagttctgtagtgtcatttcttataaaaaacaaaacaacaacaataatttatcaaaattggcatatttaaagcctaacattctaataaaggcacaaatttctttttaatacttgtttcagcctctttaatctctttataagttaactaataaatctattttcttcagacttctgcaatagttctttaaaatcacaacagttagcaagctgacttttgtaatgtgctcaatacaaatacttgtgaacttttaatatgttgagtgctttcattttgataactggatctccatttgatattttcatttgtataactcatttgcagtctgaaaattttttttagtgccagtccctgaacatatcattgaaagttaattttctttgcattttaaaatatctggattatgaagaaaaaagtgatgaaaataaattaaaactgaattacc

SEQ ID NO: 439496 - DNA, 426 bp, Homo sapiens
ttgttgacagatggtggttgctatttcaggcccagacataatcaaatccatgtgaagaaaagagatttcttcctgcgtggccctttgtaagagaaagaaaatgttcctacaagtcttccagaggagttcttaatggcagcagtgaggatgccagagttcatgggtttctagaagacaagttttcaactgcagatacaaacatcaggacgtcaatgtatctgctaggagacacccggacagtgttgagaacacagaacctggaggctaaacccccagctttctatgccagctgagagtctgtgggcacattactcagcgtctctgaacctcatgctcctcccctgtgacatgtagattgctaaacccatctcacagggctatcttctgcatttaaagaataaaataacacatgaggggtcgttggcc

SEQ ID NO: 439497 - DNA, 497 bp, Homo sapiens
ggattatagtttactgaaaacatgccattcttctttactgttcctataataagcaaaaaaagttacttttgtttctttgtttttcaggagcgctatagttatgtctgcccagatttagtaaaagaatttaacaagtatgatacagatgggtcaaaatggattaaacagtatactggaatcaatgctatctcaaagaaagagttttctatcgatgttggttatgagagatttttgggacctgaaatcttttttcatccagaggtaattttttttaacggaattgtttaaaagtattcagcagcaaatatgaattaatagatattcagagagaattaatctcagaaacttttattagtacactaaaagtttgagtttttatgaaaagtttataaaacattttatgaactttttaaagaaaaaatttgcttttgttaaaataagcaaaattgttgctattttttgcagatttagaaaaaactttttaaaaaatatgtgtg

SEQ ID NO: 439498 - DNA, 370 bp, Homo sapiens
caaatgtaaacctctaagtttgtcttaataaaatgtagggagtgagctattttattgcataatacaaaattaattttatgtattttctttccacagatactacatttaaaattgaataaagtactccagggaactagttttttttttttcgattaactctttgtttttttgttttttttttttgtttttttgcctttcttctttctttgtgctcagctgttcttgccttagctgcatcttggacctcaagacaagtaggagaacggacgttgaccggtacggtaatagacagtggagatggtgtcactcatgtcattcctgtggtaaggctattttacagttactgaacagaacatgaaataacacatct

SEQ ID NO: 439499 - DNA, 3128 bp, Homo sapiens
ttttttttttgttaagacaggaaacacatttattgagagcacagtggggtgcgccaaccctgtgctttggaaccgcatcacagcgcccctcacaacagccctgtgaggtaggtgaaggagcccacttcccacatgcagacactgaaggctcaacagctcccctaggcctcagggttctcacattgccataccctcctcatggcccccttcactcataacagtacctgcctagacctcgaagcactagtttccaaccctgcttgagttaactacttccatgacaactgtgcaaggccagagtgtgggcagctaccttgagggccaccggcatgggctgcattctaaagtcctgtaacaacgcacaagtacaactgaatagaactcggaacaaaggcatcagggccacggtgcaagtctttgttcatccgttccccgactgctcaccctgtctgataccgctcttttccacccagaaaagcagccactcaagttttaagaatggatgtatgccgcggacgttttcgattaggccgttttctctcaggcactggaggatattcgtggctgcaggaggcgcttccaccctttcctcaacctagcaaagaagtaactgaaactaacccaagggttacaaccgaaaagccccttccagcttcagaagcagaactggaagctcggatagacttctccgcctctacactcctggaaaacccgcagtggatttcaccaacttcagggtcggagcccaggcaggcgaacgtaccttattgcgcatgctcgctagcccctcccgctcggagcggaagggggagcgctgggggcctgggcctggcctggccggggcgtcggcaccggcggccatcttggcttcccggggaaaggcggcgtgaggggaagaagttgtagggtgggggcaggagtgaggaggagggaagagagagggggaggaggccgcggcggggcagggcggggactgcctgcctgcctgggttgcggaagtgatagccgccgaccgagcctgctgctttcttgctactgcttcggcttcccggctaccccccggacggtgaaggcggcccagctgtggatggtcagatagcccttgtctcccgccgccaatctctggcccctagcagcacggagcagacggcggcagcagcagcagcaggcgaggaggaagatggcgggacggctgccggcctgtgtggtggactgtggcacggggtatacaaaactaggatatgctggaaatacagaaccacagtttatcatcccttcctgtattgctattaaggagtcagcaaaagtgggtgatcaagctcaaaggagggtgatgaaaggtgttgatgacctagacttcttcattggtgatgaagcaatagaaaaacctacatatgcaacaaagtggccaatccgccatggtatagttgaagattgggacttaatggaaaggtttatggagcaagtgatctttaaatatttaagggcagaacctgaagaccattattttcttttgactgaacctccattgaatactccagaaaacagggaatatactgctgaaataatgtttgagtccttcaatgttccaggcttgtacattgctgtgcaggctgttcttgccttagctgcatcttggacctcaagacaagtaggagaacggacgttgaccggtacggtaatagacagtggagatggtgtcactcatgtcattcctgtggctgaagggtatgtgattggcagctgtattaaacacattccaatcgcaggacgagatataacatattttattcagcaactgctgagagaccgagaagtaggaatccctccagaacaatccttggaaactgctaaggcagtaaaggagcgctatagttatgtctgcccagatttagtaaaagaatttaacaagtatgatacagatgggtcaaaatggattaaacagtatactggaatcaatgctatctcaaagaaagagttttctatcgatgttggttatgagagatttttgggacctgaaatcttttttcatccagagtttgctaatccagactttacacaacctatctcagaagttgtagatgaagtaattcagaattgtcctattgatgtcagacgtcctctctacaagaatattgtcctctctggaggttcaaccatgttcagggactttggacgtcgcttgcaaagagatttgaaaagaactgtagatgcccggctgaaattaagtgaggaattgagtggtggtagattgaagccaaaacctattgatgtacaagtcattacacaccacatgcagcgatatgcagtttggtttggaggatcaatgctggcttccacgcctgagttctaccaagtatgccacaccaaaaaggattatgaagaaattggacctagcatttgtcgtcacaatccagtgtttggagtcatgtcgtaaaattggcttcatagttattggggttagggaggtggggaagagataatctttctgattacctgttttgtctggatggctggttttgaggttttaaacctgacttgaaatagtaacaccaaacatgattatacaggaatattttaataagtgtatcaccatgcagatgtagaagagagcgaaagtgattgtgtttttctttagattgaatatttgaatcttatgtgtaacaaaaagaagtgggttttagttctttctgtgccctgatattttgtatattaatgaattatccaagattcgatgggatttatcagtgtgtagatagctctataatgcttgaattgtacacttctaagtgtgcagtgcaagagcttgtttatatttcatactttttatactttgaggaaaaaaagtcaaagaaaaattgtatttgagggaaaaaaccatgaccaagtaaaggataaattcaaaaaatagcctcatgagacttggcatacacactcgtgggattccagttattatggagtgcttccatccctctccaccccttccccccaaaaggttttctttgcaagtgcttttggaactaagagctagtatcttggattaactgatgcctgctagtgctttctgattactcgcattctgtttcttgctttaaaagaagagtaaagacaagagtgttggaccagta

SEQ ID NO: 439500 - DNA, 3252 bp, Homo sapiens
ggagggatggggggggggtctccccatgttgcccaggctggtctcgaactcctagcctcaagctatcctatcctcccacctcggccttccaaagcattgaaattacaggcatgacccactgcggctcgcctccgtttctaacttaaaaaaattttctttggaggggagccttaatcctttctattatcctgctagtagaatcttactactcctgagggtaatctttgtcataatccaaaagccttgaataaaggcctatttgtatagttatgcagaatatattcctgggaggtttgccttcctaggagcacaggtcggccctgggaggtgggggttggggggcagggctgcattctaaagtcctgtaacaacgcacaagtacaactgaatagaactcggaacaaaggcatcagggccacggtgcaagtctttgttcatccgttccccgactgctcaccctgtctgataccgctcttttccacccagaaaagcagccactcaagttttaagaatggatgtatgccgcggacgttttcgattaggccgttttctctcaggcactggaggatattcgtggctgcaggaggcgcttccaccctttcctcaacctagcaaagaagtaactgaaactaacccaagggttacaaccgaaaagccccttccagcttcagaagcagaactggaagctcggatagacttctccgcctctacactcctggaaaacccgcagtggatttcaccaacttcagggtcggagcccaggcaggcgaacgtaccttattgcgcatgctcgctagcccctcccgctcggagcggaagggggagcgctgggggcctgggcctggcctggccggggcgtcggcaccggcggccatcttggcttcccggggaaaggcggcgtgaggggaagaagttgtagggtgggggcaggagtgaggaggagggaagagagagggggaggaggccgcggcggggcagggcggggactgcctgcctgcctgggttgcggaagtgatagccgccgaccgagcctgctgctttcttgctactgcttcggcttcccggctaccccccggacggtgaaggcggcccagctgtggatggtcagatagcccttgtctcccgccgccaatctctggcccctagcagcacggagcagacggcggcagcagcagcagcaggcgaggaggaagatggcgggacggctgccggcctgtgtggtggactgtggcacggggtatacaaaactaggatatgctggaaatacagaaccacagtttatcatcccttcctgtattgctattaaggagtcagcaaaagtgggtgatcaagctcaaaggagggtgatgaaaggtgttgatgacctagacttcttcattggtgatgaagcaatagaaaaacctacatatgcaacaaagtggccaatccgccatggtatagttgaagattgggacttaatggaaaggtttatggagcaagtgatctttaaatatttaagggcagaacctgaagaccattattttcttttgactgaacctccattgaatactccagaaaacagggaatatactgctgaaataatgtttgagtccttcaatgttccaggcttgtacattgctgtgcaggctgttcttgccttagctgcatcttggacctcaagacaagtaggagaacggacgttgaccggtacggtaatagacagtggagatggtgtcactcatgtcattcctgtggctgaagggtatgtgattggcagctgtattaaacacattccaatcgcaggacgagatataacatattttattcagcaactgctgagagaccgagaagtaggaatccctccagaacaatccttggaaactgctaaggcagtaaaggagcgctatagttatgtctgcccagatttagtaaaagaatttaacaagtatgatacagatgggtcaaaatggattaaacagtatactggaatcaatgctatctcaaagaaagagttttctatcgatgttggttatgagagatttttgggacctgaaatcttttttcatccagagtttgctaatccagactttacacaacctatctcagaagttgtagatgaagtaattcagaattgtcctattgatgtcagacgtcctctctacaagaatattgtcctctctggaggttcaaccatgttcagggactttggacgtcgcttgcaaagagatttgaaaagaactgtagatgcccggctgaaattaagtgaggaattgagtggtggtagattgaagccaaaacctattgatgtacaagtcattacacaccacatgcagcgatatgcagtttggtttggaggatcaatgctggcttccacgcctgagttctaccaagtatgccacaccaaaaaggattatgaagaaattggacctagcatttgtcgtcacaatccagtgtttggagtcatgtcgtaaaattggcttcatagttattggggttagggaggtggggaagagataatctttctgattacctgttttgtctggatggctggttttgaggttttaaacctgacttgaaatagtaacaccaaacatgattatacaggaatattttaataagtgtatcaccatgcagatgtagaagagagcgaaagtgattgtgtttttctttagattgaatatttgaatcttatgtgtaacaaaaagaagtgggttttagttctttctgtgccctgatattttgtatattaatgaattatccaagattcgatgggatttatcagtgtgtagatagctctataatgcttgaattgtacacttctaagtgtgcagtgcaagagcttgtttatatttcatactttttatactttgaggaaaaaaagtcaaagaaaaattgtatttgagggaaaaaaccatgaccaagtaaaggataaattcaaaaaatagcctcatgagacttggcatacacactcgtgggattccagttattatggagtgcttccatccctctccaccccttccccccaaaaggttttctttgcaagtgcttttggaactaagagctagtatcttggattaactgatgcctgctagtgctttctgattactcgcattctgtttcttgctttaaaagaagagtaaagacaagagtgttggaccagtattgcagttctgtagtgtcatttcttataaaaaacaaaacaacaacaataatttatcaaaattggcatatttaaagcctaacattctaataaaggcacaaatttctttttaa

SEQ ID NO: 439501 - DNA, 3423 bp, Homo sapiens
ggagggatggggggggggtctccccatgttgcccaggctggtctcgaactcctagcctcaagctatcctatcctcccacctcggccttccaaagcattgaaattacaggcatgacccactgcggctcgcctccgtttctaacttaaaaaaattttctttggaggggagccttaatcctttctattatcctgctagtagaatcttactactcctgagggtaatctttgtcataatccaaaagccttgaataaaggcctatttgtatagttatgcagaatatattcctgggaggtttgccttcctaggagcacaggtcggccctgggaggtgggggttggggggcagggctgcattctaaagtcctgtaacaacgcacaagtacaactgaatagaactcggaacaaaggcatcagggccacggtgcaagtctttgttcatccgttccccgactgctcaccctgtctgataccgctcttttccacccagaaaagcagccactcaagttttaagaatggatgtatgccgcggacgttttcgattaggccgttttctctcaggcactggaggatattcgtggctgcaggaggcgcttccaccctttcctcaacctagcaaagaagtaactgaaactaacccaagggttacaaccgaaaagccccttccagcttcagaagcagaactggaagctcggatagacttctccgcctctacactcctggaaaacccgcagtggatttcaccaacttcagggtcggagcccaggcaggcgaacgtaccttattgcgcatgctcgctagcccctcccgctcggagcggaagggggagcgctgggggcctgggcctggcctggccggggcgtcggcaccggcggccatcttggcttcccggggaaaggcggcgtgaggggaagaagttgtagggtgggggcaggagtgaggaggagggaagagagagggggaggaggccgcggcggggcagggcggggactgcctgcctgcctgggttgcggaagtgatagccgccgaccgagcctgctgctttcttgctactgcttcggcttcccggctaccccccggacggtgaaggcggcccagctgtggatggtcagatagcccttgtctcccgccgccaatctctggcccctagcagcacggagcagacggcggcagcagcagcagcaggcgaggaggaagatggcgggacggctgccggcctgtgtggtggactgtggcacggggtatacaaaactaggatatgctggaaatacagaaccacagtttatcatcccttcctgtattgctattaaggagtcagcaaaagtgggtgatcaagctcaaaggagggtgatgaaaggtgttgatgacctagacttcttcattggtgatgaagcaatagaaaaacctacatatgcaacaaagtggccaatccgccatggtatagttgaagattgggacttaatggaaaggtttatggagcaagtgatctttaaatatttaagggcagaacctgaagaccattattttcttttgactgaacctccattgaatactccagaaaacagggaatatactgctgaaataatgtttgagtccttcaatgttccaggcttgtacattgctgtgcaggctgttcttgccttagctgcatcttggacctcaagacaagtaggagaacggacgttgaccggtacggtaatagacagtggagatggtgtcactcatgtcattcctgtggctgaagggtatgtgattggcagctgtattaaacacattccaatcgcaggacgagatataacatattttattcagcaactgctgagagaccgagaagtaggaatccctccagaacaatccttggaaactgctaaggcagtaaaggagcgctatagttatgtctgcccagatttagtaaaagaatttaacaagtatgatacagatgggtcaaaatggattaaacagtatactggaatcaatgctatctcaaagaaagagttttctatcgatgttggttatgagagatttttgggacctgaaatcttttttcatccagagtttgctaatccagactttacacaacctatctcagaagttgtagatgaagtaattcagaattgtcctattgatgtcagacgtcctctctacaagaatattgtcctctctggaggttcaaccatgttcagggactttggacgtcgcttgcaaagagatttgaaaagaactgtagatgcccggctgaaattaagtgaggaattgagtggtggtagattgaagccaaaacctattgatgtacaagtcattacacaccacatgcagcgatatgcagtttggtttggaggatcaatgctggcttccacgcctgagttctaccaagtatgccacaccaaaaaggattatgaagaaattggacctagcatttgtcgtcacaatccagtgtttggagtcatgtcgtaaaattggcttcatagttattggggttagggaggtggggaagagataatctttctgattacctgttttgtctggatggctggttttgaggttttaaacctgacttgaaatagtaacaccaaacatgattatacaggaatattttaataagtgtatcaccatgcagatgtagaagagagcgaaagtgattgtgtttttctttagattgaatatttgaatcttatgtgtaacaaaaagaagtgggttttagttctttctgtgccctgatattttgtatattaatgaattatccaagattcgatgggatttatcagtgtgtagatagctctataatgcttgaattgtacacttctaagtgtgcagtgcaagagcttgtttatatttcatactttttatactttgaggaaaaaaagtcaaagaaaaattgtatttgagggaaaaaaccatgaccaagtaaaggataaattcaaaaaatagcctcatgagacttggcatacacactcgtgggattccagttattatggagtgcttccatccctctccaccccttccccccaaaaggttttctttgcaagtgcttttggaactaagagctagtatcttggattaactgatgcctgctagtgctttctgattactcgcattctgtttcttgctttaaaagaagagtaaagacaagagtgttggaccagtaaaaaaaaaaaaaaaaaaaaaacaaaaaaaaaaaaaaaaaaacaaaaaaaaaaagggggggcgccgcccaagaaaattaccccccgaaggggggccacacgattagacagctacacccacgatatttgctggtaaccaagggggccccacaatagggggggagctattagaaagcagacgacacacgggcgacgggcgttaaaaaaacatcaaggagagagaaaaaagtgtgagaggggagaacacttggggaaaaaggaaaccagaatcagcgcgaggcaaa

SEQ ID NO: 439502 - DNA, 3117 bp, Homo sapiens
ggagggatggggggggggtctccccatgttgcccaggctggtctcgaactcctagcctcaagctatcctatcctcccacctcggccttccaaagcattgaaattacaggcatgacccactgcggctcgcctccgtttctaacttaaaaaaattttctttggaggggagccttaatcctttctattatcctgctagtagaatcttactactcctgagggtaatctttgtcataatccaaaagccttgaataaaggcctatttgtatagttatgcagaatatattcctgggaggtttgccttcctaggagcacaggtcggccctgggaggtgggggttggggggcagggctgcattctaaagtcctgtaacaacgcacaagtacaactgaatagaactcggaacaaaggcatcagggccacggtgcaagtctttgttcatccgttccccgactgctcaccctgtctgataccgctcttttccacccagaaaagcagccactcaagttttaagaatggatgtatgccgcggacgttttcgattaggccgttttctctcaggcactggaggatattcgtggctgcaggaggcgcttccaccctttcctcaacctagcaaagaagtaactgaaactaacccaagggttacaaccgaaaagccccttccagcttcagaagcagaactggaagctcggatagacttctccgcctctacactcctggaaaacccgcagtggatttcaccaacttcagggtcggagcccaggcaggcgaacgtaccttattgcgcatgctcgctagcccctcccgctcggagcggaagggggagcgctgggggcctgggcctggcctggccggggcgtcggcaccggcggccatcttggcttcccggggaaaggcggcgtgaggggaagaagttgtagggtgggggcaggagtgaggaggagggaagagagagggggaggaggccgcggcggggcagggcggggactgcctgcctgcctgggttgcggaagtgatagccgccgaccgagcctgctgctttcttgctactgcttcggcttcccggctaccccccggacggtgaaggcggcccagctgtggatggtcagatagcccttgtctcccgccgccaatctctggcccctagcagcacggagcagacggcggcagcagcagcagcaggcgaggaggaagatggcgggacggctgccggcctgtgtggtggactgtggcacggggtatacaaaactaggatatgctggaaatacagaaccacagtttatcatcccttcctgtattgctattaaggagtcagcaaaagtgggtgatcaagctcaaaggagggtgatgaaaggtgttgatgacctagacttcttcattggtgatgaagcaatagaaaaacctacatatgcaacaaagtggccaatccgccatggtatagttgaagattgggacttaatggaaaggtttatggagcaagtgatctttaaatatttaagggcagaacctgaagaccattattttcttttgactgaacctccattgaatactccagaaaacagggaatatactgctgaaataatgtttgagtccttcaatgttccaggcttgtacattgctgtgcaggctgttcttgccttagctgcatcttggacctcaagacaagtaggagaacggacgttgaccggtacggtaatagacagtggagatggtgtcactcatgtcattcctgtggctgaagggtatgtgattggcagctgtattaaacacattccaatcgcaggacgagatataacatattttattcagcaactgctgagagaccgagaagtaggaatccctccagaacaatccttggaaactgctaaggcagtaaaggagcgctatagttatgtctgcccagatttagtaaaagaatttaacaagtatgatacagatgggtcaaaatggattaaacagtatactggaatcaatgctatctcaaagaaagagttttctatcgatgttggttatgagagatttttgggacctgaaatcttttttcatccagagtttgctaatccagactttacacaacctatctcagaagttgtagatgaagtaattcagaattgtcctattgatgtcagacgtcctctctacaagaatattgtcctctctggaggttcaaccatgttcagggactttggacgtcgcttgcaaagagatttgaaaagaactgtagatgcccggctgaaattaagtgaggaattgagtggtggtagattgaagccaaaacctattgatgtacaagtcattacacaccacatgcagcgatatgcagtttggtttggaggatcaatgctggcttccacgcctgagttctaccaagtatgccacaccaaaaaggattatgaagaaattggacctagcatttgtcgtcacaatccagtgtttggagtcatgtcgtaaaattggcttcatagttattggggttagggaggtggagagagcgaaagtgattgtgtttttctttagattgaatatttgaatcttatgtgtaacaaaaagaagtgggttttagttctttctgtgccctgatattttgtatattaatgaattatccaagattcgatgggatttatcagtgtgtagatagctctataatgcttgaattgtacacttctaagtgtgcagtgcaagagcttgtttatatttcatactttttatactttgaggaaaaaaagtcaaagaaaaattgtatttgagggaaaaaaccatgaccaagtaaaggataaattcaaaaaatagcctcatgagacttggcatacacactcgtgggattccagttattatggagtgcttccatccctctccaccccttccccccaaaaggttttctttgcaagtgcttttggaactaagagctagtatcttggattaactgatgcctgctagtgctttctgattactcgcattctgtttcttgctttaaaagaagagtaaagacaagagtgttggaccagtattgcagttctgtagtgtcatttcttataaaaaacaaaacaacaacaataatttatcaaaattggcatatttaaagcctaacattctaataaaggcacaaatttctttttaa

SEQ ID NO: 439503 - DNA, 2776 bp, Homo sapiens
ggagggatggggggggggtctccccatgttgcccaggctggtctcgaactcctagcctcaagctatcctatcctcccacctcggccttccaaagcattgaaattacaggcatgacccactgcggctcgcctccgtttctaacttaaaaaaattttctttggaggggagccttaatcctttctattatcctgctagtagaatcttactactcctgagggtaatctttgtcataatccaaaagccttgaataaaggcctatttgtatagttatgcagaatatattcctgggaggtttgccttcctaggagcacaggtcggccctgggaggtgggggttggggggcagggctgcattctaaagtcctgtaacaacgcacaagtacaactgaatagaactcggaacaaaggcatcagggccacggtgcaagtctttgttcatccgttccccgactgctcaccctgtctgataccgctcttttccacccagaaaagcagccactcaagttttaagaatggatgtatgccgcggacgttttcgattaggccgttttctctcaggcactggaggatattcgtggctgcaggaggcgcttccaccctttcctcaacctagcaaagaagtaactgaaactaacccaagggttacaaccgaaaagccccttccagcttcagaagcagaactggaagctcggatagacttctccgcctctacactcctggaaaacccgcagtggatttcaccaacttcagggtcggagcccaggcaggcgaacgtaccttattgcgcatgctcgctagcccctcccgctcggagcggaagggggagcgctgggggcctgggcctggcctggccggggcgtcggcaccggcggccatcttggcttcccggggaaaggcggcgtgaggggaagaagttgtagggtgggggcaggagtgaggaggagggaagagagagggggaggaggccgcggcggggcagggcggggactgcctgcctgcctgggttgcggaagtgatagccgccgaccgagcctgctgctttcttgctactgcttcggcttcccggctaccccccggacggtgaaggcggcccagctgtggatggtcagatagcccttgtctcccgccgccaatctctggcccctagcagcacggagcagacggcggcagcagcagcagcaggcgaggaggaagatggcgggacggctgccggcctgtgtggtggactgtggcacggggtatacaaaactaggatatgctggaaatacagaaccacagtttatcatcccttcctgtattgctattaaggagtcagcaaaagtgggtgatcaagctcaaaggagggtgatgaaaggtgttgatgacctagacttcttcattggtgatgaagcaatagaaaaacctacatatgcaacaaagtggccaatccgccatggtatagttgaagattgggacttaatggaaaggtttatggagcaagtgatctttaaatatttaagggcagaacctgaagaccattattttcttttgactgaacctccattgaatactccagaaaacagggaatatactgctgaaataatgtttgagtccttcaatgttccaggcttgtacattgctgtgcaggctgttcttgccttagctgcatcttggacctcaagacaagtaggagaacggacgttgaccggtacggtaatagacagtggagatggtgtcactcatgtcattcctgtggctgaagggtatgtgattggcagctgtattaaacacattccaatcgcaggacgagatataacatattttattcagcaactgctgagagaccgagaagtaggaatccctccagaacaatccttggaaactgctaaggcagtaaaggagcgctatagttatgtctgcccagatttagtaaaagaatttaacaagtatgatacagatgggtcaaaatggattaaacagtatactggaatcaatgctatctcaaagaaagagttttctatcgatgttggttatgagagatttttgggacctgaaatcttttttcatccagagtttgctaatccagactttacacaacctatctcagaagttgtagatgaagtaattcagaattgtcctattgatgtcagacgtcctctctacaagaatattgtcctctctggaggttcaaccatgttcagggactttggacgtcgcttgcaaagagatttgaaaagaactgtagatgcccggctgaaattaagtgaggaattgagtggtggtagattgaagccaaaacctattgatgtacaagtcattacacaccacatgcagcgatatgcagtttggtttggaggatcaatgctggcttccacgcctgagttctaccaagtatgccacaccaaaaaggattatgaagaaattggacctagcatttgtcgtcacaatccagtgtttggagtcatgtcgtaaaattggcttcatagttattggggttagggaggtgggcagcagtgaggatgccagagttcatgggtttctagaagacaagttttcaactgcagatacaaacatcaggacgtcaatgtatctgctaggagacacccggacagtgttgagaacacagaacctggaggctaaacccccagctttctatgccagctgagagtctgtgggcacattactcagcgtctctgaacctcatgctcctcccctgtgacatgtagattgctaaacccatctcacagggctatcttctgcatttaaagaataaaataacacatgaggggtcgttggcc

SEQ ID NO: 439504 - DNA, 2579 bp, Homo sapiens
ggagggatggggggggggtctccccatgttgcccaggctggtctcgaactcctagcctcaagctatcctatcctcccacctcggccttccaaagcattgaaattacaggcatgacccactgcggctcgcctccgtttctaacttaaaaaaattttctttggaggggagccttaatcctttctattatcctgctagtagaatcttactactcctgagggtaatctttgtcataatccaaaagccttgaataaaggcctatttgtatagttatgcagaatatattcctgggaggtttgccttcctaggagcacaggtcggccctgggaggtgggggttggggggcagggctgcattctaaagtcctgtaacaacgcacaagtacaactgaatagaactcggaacaaaggcatcagggccacggtgcaagtctttgttcatccgttccccgactgctcaccctgtctgataccgctcttttccacccagaaaagcagccactcaagttttaagaatggatgtatgccgcggacgttttcgattaggccgttttctctcaggcactggaggatattcgtggctgcaggaggcgcttccaccctttcctcaacctagcaaagaagtaactgaaactaacccaagggttacaaccgaaaagccccttccagcttcagaagcagaactggaagctcggatagacttctccgcctctacactcctggaaaacccgcagtggatttcaccaacttcagggtcggagcccaggcaggcgaacgtaccttattgcgcatgctcgctagcccctcccgctcggagcggaagggggagcgctgggggcctgggcctggcctggccggggcgtcggcaccggcggccatcttggcttcccggggaaaggcggcgtgaggggaagaagttgtagggtgggggcaggagtgaggaggagggaagagagagggggaggaggccgcggcggggcagggcggggactgcctgcctgcctgggttgcggaagtgatagccgccgaccgagcctgctgctttcttgctactgcttcggcttcccggctaccccccggacggtgaaggcggcccagctgtggatggtcagatagcccttgtctcccgccgccaatctctggcccctagcagcacggagcagacggcggcagcagcagcagcaggcgaggaggaagatggcgggacggctgccggcctgtgtggtggactgtggcacggggtatacaaaactaggatatgctggaaatacagaaccacagtttatcatcccttcctgtattgctattaaggagtcagcaaaagtgggtgatcaagctcaaaggagggtgatgaaaggtgttgatgacctagacttcttcattggtgatgaagcaatagaaaaacctacatatgcaacaaagtggccaatccgccatggtatagttgaagattgggacttaatggaaaggtttatggagcaagtgatctttaaatatttaagggcagaacctgaagaccattattttcttttgactgaacctccattgaatactccagaaaacagggaatatactgctgaaataatgtttgagtccttcaatgttccaggcttgtacattgctgtgcaggctgttcttgccttagctgcatcttggacctcaagacaagtaggagaacggacgttgaccggtacggtaatagacagtggagatggtgtcactcatgtcattcctgtggctgaagggtatgtgattggcagctgtattaaacacattccaatcgcaggacgagatataacatattttattcagcaactgctgagagaccgagaagtaggaatccctccagaacaatccttggaaactgctaaggcagtaaaggagcgctatagttatgtctgcccagatttagtaaaagaatttaacaagtatgatacagatgggtcaaaatggattaaacagtatactggaatcaatgctatctcaaagaaagagttttctatcgatgttggttatgagagatttttgggacctgaaatcttttttcatccagagtttgctaatccagactttacacaacctatctcagaagttgtagatgaagtaattcagaattgtcctattgatgtcagacgtcctctctacaagaatattgtcctctctggaggttcaaccatgttcagggactttggacgtcgcttgcaaagagatttgaaaagaactgtagatgcccggctgaaattaagtgaggaattgagtggtggtagattgaagccaaaacctattgatgtacaagtcattacacaccacatgcagcgatatgcagtttggtttggaggatcaatgctggcttccacgcctgagttctaccaagtatgccacaccaaaaaggattatgaagaaattggacctagcatttgtcgtcacaatccagtgtttggagtcatgtcgtaaaattggcttcatagttattggggttagggaggtggaattaaaataaaagaccctttgtaaatgcagacttagaagaaatactgaatttgtgtcagaagttctccagtgtttgtgttaatcgtctagaca

SEQ ID NO: 439505 - DNA, 1393 bp, Homo sapiens
gtagatgtacaagtcattacacaccacatgcagcgatatgcagttggtttggaggatcaatgctggtagattgaagccaaaacctattgatgtacaagtcattacacaccacatgcagcgatatgcagtttggtttggaggatcaatgctggcttccacgcctgagttctaccaagtatgccacaccaaaaaggattatgaagaaattggacctagcatttgtcgtcacaatccagtgtttggagtcatgtcgtaaaattggcttcatagttattggggttagggaggtggggaagagataatctttctgattacctgttttgtctggatggctggttttgaggttttaaacctgacttgaaatagtaacaccaaacatgattatacaggaatattttaataagtgtatcaccatgcagatgtagaagagagcgaaagtgattgtgtttttctttagattgaatatttgaatcttatgtgtaacaaaaagaagtgggttttagttctttctgtgccctgatattttgtatattaatgaattatccaagattcgatgggatttatcagtgtgtagatagctctataatgcttgaattgtacacttctaagtgtgcagtgcaagagcttgtttatatttcatactttttatactttgaggaaaaaaagtcaaagaaaaattgtatttgagggaaaaaaccatgaccaagtaaaggataaattcaaaaaatagcctcatgagacttggcatacacactcgtgggattccagttattatggagtgcttccatccctctccaccccttccccccaaaaggttttctttgcaagtgcttttggaactaagagctagtatcttggattaactgatgcctgctagtgctttctgattactcgcattctgtttcttgctttaaaagaagagtaaagacaagagtgttggaccagtattgcagttctgtagtgtcatttcttataaaaaacaaaacaacaacaataatttatcaaaattggcatatttaaagcctaacattctaataaaggcacaaatttctttttaatacttgtttcagcctctttaatctctttataagttaactaataaatctattttcttcagacttctgcaatagttctttaaaatcacaacagttagcaagctgacttttgtaatgtgctcaatacaaatacttgtgaacttttaatatgttgagtgctttcattttgataactggatctccatttgatattttcatttgtataactcatttgcagtctgaaaattttttttagtgccagtccctgaacatatcattgaaagttaattttctttgcattttaaaatatctggattatgaagaaaaaagtgatgaaaataaattaaaactgaattacc

SEQ ID NO: 439506 - DNA, 2316 bp, Homo sapiens
ggagggatggggggggggtctccccatgttgcccaggctggtctcgaactcctagcctcaagctatcctatcctcccacctcggccttccaaagcattgaaattacaggcatgacccactgcggctcgcctccgtttctaacttaaaaaaattttctttggaggggagccttaatcctttctattatcctgctagtagaatcttactactcctgagggtaatctttgtcataatccaaaagccttgaataaaggcctatttgtatagttatgcagaatatattcctgggaggtttgccttcctaggagcacaggtcggccctgggaggtgggggttggggggcagggctgcattctaaagtcctgtaacaacgcacaagtacaactgaatagaactcggaacaaaggcatcagggccacggtgcaagtctttgttcatccgttccccgactgctcaccctgtctgataccgctcttttccacccagaaaagcagccactcaagttttaagaatggatgtatgccgcggacgttttcgattaggccgttttctctcaggcactggaggatattcgtggctgcaggaggcgcttccaccctttcctcaacctagcaaagaagtaactgaaactaacccaagggttacaaccgaaaagccccttccagcttcagaagcagaactggaagctcggatagacttctccgcctctacactcctggaaaacccgcagtggatttcaccaacttcagggtcggagcccaggcaggcgaacgtaccttattgcgcatgctcgctagcccctcccgctcggagcggaagggggagcgctgggggcctgggcctggcctggccggggcgtcggcaccggcggccatcttggcttcccggggaaaggcggcgtgaggggaagaagttgtagggtgggggcaggagtgaggaggagggaagagagagggggaggaggccgcggcggggcagggcggggactgcctgcctgcctgggttgcggaagtgatagccgccgaccgagcctgctgctttcttgctactgcttcggcttcccggctaccccccggacggtgaaggcggcccagctgtggatggtcagatagcccttgtctcccgccgccaatctctggcccctagcagcacggagcagacggcggcagcagcagcagcaggcgaggaggaagatggcgggacggctgccggcctgtgtggtggactgtggcacggggtatacaaaactaggatatgctggaaatacagaaccacagtttatcatcccttcctgtattgctattaaggagtcagcaaaagtgggtgatcaagctcaaaggagggtgatgaaaggtgttgatgacctagacttcttcattggtgatgaagcaatagaaaaacctacatatgcaacaaagtggccaatccgccatggtatagttgaagattgggacttaatggaaaggtttatggagcaagtgatctttaaatatttaagggcagaacctgaagaccattattttcttttgactgaacctccattgaatactccagaaaacagggaatatactgctgaaataatgtttgagtccttcaatgttccaggcttgtacattgctgtgcaggctgttcttgccttagctgcatcttggacctcaagacaagtaggagaacggacgttgaccggtacggtaatagacagtggagatggtgtcactcatgtcattcctgtggctgaagggtatgtgattggcagctgtattaaacacattccaatcgcaggacgagatataacatattttattcagcaactgctgagagaccgagaagtaggaatccctccagaacaatccttggaaactgctaaggcagtaaaggtaaaaagtgtgataggagtgtaatttagttaaaaattaaaatcacatttataacattaacgtgagaaatttttaatagaagaagagtacttgaaataatcttgttaaccagttataaattattacccttaaatatatttacattttctttgtgtttcttaaaagaaaattattacagcagtttgtcttctgttttcttcatattttatatttgagaggagtaatataagaacattttaccaaatgacattaacataaatttttgtgattattctctttattaaaaataaataattatttcactataaagtccttgcatctcagtttcttcactgaattctttattttaattctaaaagcttttgtcataaaaattattttgatacaattgattcattgtgctatagtatagaagcagtgcttggctcaagtgataggg

SEQ ID NO: 439507 - DNA, 1786 bp, Homo sapiens
tgtgcgtgagatattggttatacgggcagtcaacaagggagtatacagagtataagatggtgggcaagaccagtggtgggaacaagataccacgtattccgcgggaattggggcaagaaaaatagagtagtgaaaagttccatgcctgtcccttatatattgcgataacttaggcccccgccgtgggttgccaacggccgcccaagtaagtcggccacgtacttgggaggctgcggcaggtgaatcacttgaagccgggaggtgaaggccgcagtaacgctgttccctgcattggatgaagtgctccccaccaaactctctcaccggagagggtgggatctgcgggctccctgggtggcttgatttcgacaccctgtgggctgccttccactctggtactttcctctgcctgctgatgcttgaaattccttgaaccggccacacacacctgctttctggaatcagaacactggaaaggcttcctgggacgggagaagagtgatttacattcctgccgaggtgtaaagctgcggatggcaggttctctcctgagaaccggcttcaactaggaggaggaggttggaagcaggaccccgagctgacctgttgaccaggagaggagtaagcagaagggaggcaggagcgggcggaggagagaaggccggggagccgggatgggggtcaccgcccccggggagccgggatgggggtcaccgcccccggggagccgggatgggggtcaccgcccccgcccccgtgatgccgagctgaaaaagacagtctccaggtaggataatccgtcacactagatgcatatagcttcatgcaagaagagcgactgttgcgctgtcttctaccccctttggccgcgatcccgtgacaatgccggcatccgggcaccaactggcttttgcgaaccgctctccgctccccgcccggattccgaagcccggagccgtttacagtttgaggcgccgtgtgccgccccctggtggccggaggccgttactgtcgcggctgagggggcgtcccggtgtatccgcagcgcgccctggccgccctctggtggccggaggccgttactgtcgcggctgagggggcgtcccggtgtatccgcagcgcgccctggccgccccctggtggccggaggccgttactgtcgcggctgagggggcgtcccggtgtatccgcagcgcgccctggccgacccctggtggccggaggccgttactgtcgcggctgaaggggcgtgtcccggtgtatccgcagcgcgccctggctgccccctggtggccggaggccgttactgtcgcggctgagggggcgtcccggtgtatccgcagcgcgccctgtcccgccatatacattccgtgcttttcaaacacccgccgtgggctaagcatgggacccacgtggggcggggacacacggcgataaagagccaggccctcgctgccaaggagctttcccgtaacaccgatgcatcaaacaaaaggcagcagtgaggatgccagagttcatgggtttctagaagacaagttttcaactgcagatacaaacatcaggacgtcaatgtatctgctaggagacacccggacagtgttgagaacacagaacctggaggctaaacccccagctttctatgccagctgagagtctgtgggcacattactcagcgtctctgaacctcatgctcctcccctgtgacatgtagattgctaaacccatctcacagggctatcttctgcatttaaagaataaaataacacatgaggggtcgttggcc

SEQ ID NO: 439508 - DNA, 1570 bp, Homo sapiens
ggagggatggggggggggtctccccatgttgcccaggctggtctcgaactcctagcctcaagctatcctatcctcccacctcggccttccaaagcattgaaattacaggcatgacccactgcggctcgcctccgtttctaacttaaaaaaattttctttggaggggagccttaatcctttctattatcctgctagtagaatcttactactcctgagggtaatctttgtcataatccaaaagccttgaataaaggcctatttgtatagttatgcagaatatattcctgggaggtttgccttcctaggagcacaggtcggccctgggaggtgggggttggggggcagggctgcattctaaagtcctgtaacaacgcacaagtacaactgaatagaactcggaacaaaggcatcagggccacggtgcaagtctttgttcatccgttccccgactgctcaccctgtctgataccgctcttttccacccagaaaagcagccactcaagttttaagaatggatgtatgccgcggacgttttcgattaggccgttttctctcaggcactggaggatattcgtggctgcaggaggcgcttccaccctttcctcaacctagcaaagaagtaactgaaactaacccaagggttacaaccgaaaagccccttccagcttcagaagcagaactggaagctcggatagacttctccgcctctacactcctggaaaacccgcagtggatttcaccaacttcagggtcggagcccaggcaggcgaacgtaccttattgcgcatgctcgctagcccctcccgctcggagcggaagggggagcgctgggggcctgggcctggcctggccggggcgtcggcaccggcggccatcttggcttcccggggaaaggcggcgtgaggggaagaagttgtagggtgggggcaggagtgaggaggagggaagagagagggggaggaggccgcggcggggcagggcggggactgcctgcctgcctgggttgcggaagtgatagccgccgaccgagcctgctgctttcttgctactgcttcggcttcccggctaccccccggacggtgaaggcggcccagctgtggatggtcagatagcccttgtctcccgccgccaatctctggcccctagcagcacggagcagacggcggcagcagcagcagcaggcgaggaggaagatggcgggacggctgccggcctgtgtggtggactgtggcacggggtatacaaaactaggatatgctggaaatacagaaccacagtttatcatcccttcctgtattgctattaaggagtcagcaaaagtgggtgatcaagctcaaaggagggtgatgaaaggtgttgatgacctagacttcttcattggtgatgaagcaatagaaaaacctacatatgcaacaaagtggccaatccgccatggtatagttgaagattgggacttaatggaaaggtttatggagcaagtgatctttaaatatttaagggcagaacctgaagaccattattttcttttgactgaacctccttggtcctctggcctccttggtgcctctgg

SEQ ID NO: 439509 - DNA, 1750 bp, Homo sapiens
taggtctccctgcttccttttgccagaaaaggtaaagttctggagaaagaggttttttcttggcttttgagttcaggccttacagaggtaaaaccgagtagatgtgggagaacatgtggtaaacagatacaactttcccgggatggggagagaaaaatagtgaaactccatctccactaaaaatacaaatactagcccggccgtggtggcacgcgcctgtaatcccaactacttgggaggctgcggcaggtgaatcacttgaagccgggaggtgaaggccgcagtaacgctgttccctgcattggatgaagtgctccccaccaaactctctcaccggagagggtgggatctgcgggctccctgggtggcttgatttcgacaccctgtgggctgccttccactctggtactttcctctgcctgctgatgcttgaaattccttgaaccggccacacacacctgctttctggaatcagaacactggaaaggcttcctgggacgggagaagagtgatttacattcctgccgaggtgtaaagctgcggatggcaggttctctcctgagaaccggcttcaactaggaggaggaggttggaagcaggaccccgagctgacctgttgaccaggagaggagtaagcagaagggaggcaggagcgggcggaggagagaaggccggggagccgggatgggggtcaccgcccccggggagccgggatgggggtcaccgcccccggggagccgggatgggggtcaccgcccccgcccccgtgatgccgagctgaaaaagacagtctccaggtaggataatccgtcacactagatgcatatagcttcatgcaagaagagcgactgttgcgctgtcttctaccccctttggccgcgatcccgtgacaatgccggcatccgggcaccaactggcttttgcgaaccgctctccgctccccgcccggattccgaagcccggagccgtttacagtttgaggcgccgtgtgccgccccctggtggccggaggccgttactgtcgcggctgagggggcgtcccggtgtatccgcagcgcgccctggccgccctctggtggccggaggccgttactgtcgcggctgagggggcgtcccggtgtatccgcagcgcgccctggccgccccctggtggccggaggccgttactgtcgcggctgagggggcgtcccggtgtatccgcagcgcgccctggccgacccctggtggccggaggccgttactgtcgcggctgaaggggcgtgtcccggtgtatccgcagcgcgccctggctgccccctggtggccggaggccgttactgtcgcggctgagggggcgtcccggtgtatccgcagcgcgccctgtcccgccatatacattccgtgcttttcaaacacccgccgtgggctaagcatgggacccacgtggggcggggacacacggcgataaagagccaggccctcgctgccaaggagctttcccgtaacaccgatgcatcaaacaaaagttgataggccactgagctatgggcagccacatgtgttcctgatggaagggactgagtatctcccagagatcctggacacgaggagacatgctgtgagtggatgtctggaagccagtcctgagagagaagactctaaatccagaatttcttcaggcatttcaaacatttctatgttgtgtgcattatataaacaacacctatataacttgtcttaagaaaataaaagcaacaagattaactgaaaa

SEQ ID NO: 439510 - DNA, 4165 bp, Homo sapiens
gctgacctgaggagtcgcggctgcgagcaggttagagttacttgttattggtaaatagccactatggaggctaaggaccagaagaaacacagaaagaaaaacagtggacccaaagctgcaaagaaaaagaagcggcttctgcaggatctccagctaggagacgaagaagatgcccggaagagaaatcccaaagcttttgcagttcagtctgctgtgcggatggctcgatcctttcacaggactcaggatttgaagacaaaaaagcatcatattccagtggttgatcgaactccactagagcccccaccaatagtggtagtggtgatgggacctccaaaagttggaaagagcactttgatacaatgcctcattcggaactttacccggcagaagttgactgagatcagaggccctgtgacgattgtgtcaggtaaaaagcgcagactcaccattattgaatgtgggtgtgacattaacatgatgattgatctggctaaagtagcagatctggtactgatgcttatagatgccagctttgggtttgaaatggaaacgtttgagtttctaaacatctgtcaagtacatggctttcctaaaattatgggagttctcacccacctcgactccttcaagcataataagcaactgaagaagacaaagaagcgattaaaacacaggttctggacggaagtttacccgggtgccaagctgttctacctttctggaatggtgcatggagaatatcaaaaccaagaaatccacaatctgggccgttttattacagttatgaagtttaggcctctcacatggcaaacttctcacccttatatcctggcagacaggatggaagatttgacaaacccagaggatatccgaacaaacatcaaatgtgaccggaaggtgtcactttatggttatttaagaggagcacacttgaaaaataaaagccaaattcacatgccaggggtaggagattttgccgtgagtgacatcagtttcctcccagacccttgcgctcttcctgaacaacaaaagaagcgctgtttaaatgagaaggagaagctggtttatgcgcctctttctggagttgggggtgtgctgtatgacaaagacgctgtctatgttgaccttggtggcagccacgtttttcaggatgaagtggggcccacccatgagctggtccagagtctcatctctacccactccaccattgatgccaagatggcttcaagtcgagtgacgctgttttctgattccaagccacttgggtcagaggatatagataatcaagggctaatgatgccaaaggaggaaaaacaaatggacttgaacactggtcgaatgcgtcggaaagccattttcggagatgaagatgaatctggagatagtgatgatgaagaagatgatgaaatgtctgaagatgacgggttggaaaacggctctagtgatgaggaagcagaagaggaggaaaatgctgagatgactgatcagtatatggctgttaagggcatcaaacgacggaaacttgagttggaagaagacagtgaaatggatttgccagcatttgctgacagtgacgatgaccttgagaggagctcagcggaagaaggggaagcggaggaagctgatgaaagcagtgaagaagaggactgcactgcaggagagaagggcatttcaggatcaaaggctgctggagaaggtagtaaagcagggctgtcaccagctaattgccagagtgaccgtgtgaatctggagaagtctttgctgatgaagaaagcagctctccccactttcgattctgggcattgcacagctgaagaggtgtttgcatctgaagatgaatctgaagaaagctcctcactcagtgcagaggaagaagactcagaaaatgaagaggctattagaaaaaagctttcaaagccttctcaagtgagcagtggtcagaaactggggccacagaacttcattgatgagaccagtgatatagaaaatttactcaaagaggaagaagattacaaggaagaaaataatgattccaaagaaacgtcaggtgccctcaagtggaaggaagacctttccagaaaggcagctgaggcctttctgaggcagcagcaagcagctccaaacctccgaaagcttatttatgggacagtgacagaagataatgaagaagaagatgatgatactctagaagagcttggagggttgtttcgtgtcaaccagcctgacagagagtgtaagcacaaggctgactctttggactgctccagatttcttgtggaggccccccatgactgggatttagaggaggttatgaacagtatcagagattgcttcgtgactggaaagtgggaagatgataaagatgcagccaaggtcttagcagaagatgaggagctctacggtgactttgaagacttggaaacaggggacgtgcacaagggaaaatcaggccccaatactcagaatgaagatatagagaaagaagttaaggaagaaattgaccccgacgaagaagaaagtgccaagaaaaagcatttggataagaagagaaaattgaaggagatgtttgatgcagaatatgatgaaggagaaagcacatattttgatgatcttaaaggagaaatgcagaaacaagcacagctgaatcgcgcagaatttgaagatcaagatgatgaagccagagttcagtatgagggttttcgacctgggatgtacgtccgcattgagattgaaaatgttccctgtgaatttgtgcagaactttgacccccattaccccattatcctgggtggcttgggcaacagtgagggaaatgttggctacgtgcagatgcgtctgaagaaacatcgctggtataagaaaatcctcaagtcccgagatccaatcatattttctgtagggtggaggaggtttcagaccatcccactgtattatatcgaagaccacaatggaagacaaaggcttctaaagtataccccacagcacatgcattgcggagcagccttttggggccctatcactccacagggaactggtttcttggcaatacagtctgtcagtggcataatgcctgattttcggatagctgctacaggagttgtccttgatctggataaatccataaaaattgtgaagaaattaaagctaactggttttccatataaaattttcaagaacacttcatttattaagggaatgtttaattctgccttggaagtggccaaatttgaaggtgctgtgattcgaacagtcagtgggataagggggcagatcaagaaagcactccgagctccagaaggagctttcagggccagctttgaggataagctgctgatgagcgatattgtcttcatgcgaacttggtatcctgtttccatcccagcgttctataacccagtaacatctttgttgaaaccagtgggtgagaaagacacctggtcaggaatgcggaccacgggccaactcaggctcgcccatggcgtcagactaaaggcgaacaaggactctctgtataagccaatcctgaggcaaaagaaacattttaattcactgcacattccagcaggcaaggtgccaaaggacaggcggagaccggccgtcatacgcgagcctcatgaaagaaagatccttgcactgctggatgctctgagtacggtgcatagtcagaagatgaagaaggccaaggagcagcggcacctgcacaataaagagcacttcagagccaagcagaaggaggaggaggagaagctgaagcggcagaaggacctcaggaagaagctcttcagaattcaggggcagaaggaaagaagaaaccagaagtccagtttgaagggggctgagggccaattgcagtgagcctttggactggagggactgtccctggatctgcggaggtagacagtttcaaacatcacagtttgaatgcctgtgaatgacacgtcagtgggaaagagctcaagagatgtctctactcaaactgtgcctgcaggaggaggaacagagaagcctgggctgctgggactgggttcattctcatgacttggggctgtcgagatttaaagtgatgtaagctgtggttatgtggattctcttactttcctctgcctgcctcagtttaattattttgtcctacagaaatatcattaaaatatttttttgttac

SEQ ID NO: 439511 - DNA, 4460 bp, Homo sapiens
gctgacctgaggagtcgcggctgcgagcaggttagagttacttgttattggtaaatagccactatggaggctaaggaccagaagaaacacagaaagaaaaacagtggacccaaagctgcaaagaaaaagaagcggcttctgcaggatctccagctaggagacgaagaagatgcccggaagagaaatcccaaagcttttgcagttcagtctgctgtgcggatggctcgatcctttcacaggactcaggatttgaagacaaaaaagcatcatattccagtggttgatcgaactccactagagcccccaccaatagtggtagtggtgatgggacctccaaaagttggaaagagcactttgatacaatgcctcattcggaactttacccggcagaagttgactgagatcagaggccctgtgacgattgtgtcaggtaaaaagcgcagactcaccattattgaatgtgggtgtgacattaacatgatgattgatctggctaaagtagcagatctggtactgatgcttatagatgccagctttgggtttgaaatggaaacgtttgagtttctaaacatctgtcaagtacatggctttcctaaaattatgggagttctcacccacctcgactccttcaagcataataagcaactgaagaagacaaagaagcgattaaaacacaggttctggacggaagtttacccgggtgccaagctgttctacctttctggaatggtgcatggagaatatcaaaaccaagaaatccacaatctgggccgttttattacagttatgaagtttaggcctctcacatggcaaacttctcacccttatatcctggcagacaggatggaagatttgacaaacccagaggatatccgaacaaacatcaaatgtgaccggaaggtgtcactttatggttatttaagaggagcacacttgaaaaataaaagccaaattcacatgccaggggtaggagattttgccgtgagtgacatcagtttcctcccagacccttgcgctcttcctgaacaacaaaagaagcgctgtttaaatgagaaggagaagctggtttatgcgcctctttctggagttgggggtgtgctgtatgacaaagacgctgtctatgttgaccttggtggcagccacgtttttcaggatgaagtggggcccacccatgagctggtccagagtctcatctctacccactccaccattgatgccaagatggcttcaagtcgagtgacgctgttttctgattccaagccacttgggtcagaggatatagataatcaagggctaatgatgccaaaggaggaaaaacaaatggacttgaacactggtcgaatgcgtcggaaagccattttcggagatgaagatgaatctggagatagtgatgatgaagaagatgatgaaatgtctgaagatgacgggttggaaaacggctctagtgatgaggaagcagaagaggaggaaaatgctgagatgactgatcagtatatggctgttaagggcatcaaacgacggaaacttgagttggaagaagacagtgaaatggatttgccagcatttgctgacagtgacgatgaccttgagaggagctcagcggaagaaggggaagcggaggaagctgatgaaagcagtgaagaagaggactgcactgcaggagagaagggcatttcaggatcaaaggctgctggagaaggtagtaaagcagggctgtcaccagctaattgccagagtgaccgtgtgaatctggagaagtctttgctgatgaagaaagcagctctccccactttcgattctgggcattgcacagctgaagaggtgtttgcatctgaagatgaatctgaagaaagctcctcactcagtgcagaggaagaagactcagaaaatgaagaggctattagaaaaaagctttcaaagccttctcaagtgagcagtggtcagaaactggggccacagaacttcattgatgagaccagtgatatagaaaatttactcaaagaggaagaagattacaaggaagaaaataatgattccaaagaaacgtcaggtgccctcaagtggaaggaagacctttccagaaaggcagctgaggcctttctgaggcagcagcaagcagctccaaacctccgaaagcttatttatgggacagtgacagaagataatgaagaagaagatgatgatactctagaagagcttggagggttgtttcgtgtcaaccagcctgacagagagtgtaagcacaaggctgactctttggactgctccagatttcttgtggaggccccccatgactgggatttagaggaggttatgaacagtatcagagattgcttcgtgactggaaagtgggaagatgataaagatgcagccaaggtcttagcagaagatgaggagctctacggtgactttgaagacttggaaacaggggacgtgcacaagggaaaatcaggccccaatactcagaatgaagatatagagaaagaagttaaggaagaaattgaccccgacgaagaagaaagtgccaagaaaaagcatttggataagaagagaaaattgaaggagatgtttgatgcagaatatgatgaaggagaaagcacatattttgatgatcttaaaggagaaatgcagaaacaagcacagctgaatcgcgcagaatttgaagatcaagatgatgaagccagagttcagtatgagggttttcgacctgggatgtacgtccgcattgagattgaaaatgttccctgtgaatttgtgcagaactttgacccccattaccccattatcctgggtggcttgggcaacagtgagggaaatgttggctacgtgcagatgcgtctgaagaaacatcgctggtataagaaaatcctcaagtcccgagatccaatcatattttctgtagggtggaggaggtttcagaccatcccactgtattatatcgaagaccacaatggaagacaaaggcttctaaagtataccccacagcacatgcattgcggagcagccttttggggccctatcactccacagggaactggtttcttggcaatacagtctgtcagtggcataatgcctgattttcggatagctgctacaggagttgtccttgatctggataaatccataaaaattgtgaagaaattaaagctaactggttttccatataaaattttcaagaacacttcatttattaagggaatgtttaattctgccttggaagtggccaaatttgaaggtgctgtgattcgaacagtcagtgggataagggggcagatcaagaaagcactccgagctccagaaggagctttcagggccagctttgaggataagctgctgatgagcgatattgtcttcatgcgaacttggtatcctgtttccatcccagcgttctataacccagtaacatctttgttgaaaccagtgggtgagaaagacacctggtcaggaatgcggaccacgggccaactcaggctcgcccatggcgtcagactaaaggcgaacaaggactctctgtataagccaatcctgaggcaaaagaaacattttaattcactgcacattccaaaagccttgcagaaggccctgccatttaagaacaagcccaagacccaagcaaaggcaggcaaggtgccaaaggacaggcggagaccggccgtcatacgcgagcctcatgaaagaaagatccttgcactgctggatgctctgagtacggtgcatagtcagaagatgaagaaggccaaggagcagcggcacctgcacaataaagagcacttcagagccaagcagaaggaggaggaggagaagctgaagcggcagaaggacctcaggaagaagctcttcagaattcaggggcagaaggaaagaagaaaccagaagtccagtttgaagggggctgagggccaattgcagtgagcctttggactggagggactgtccctggatctgcggaggtagacagtttcaaacatcacagtttgaatgcctgtgaatgacacgtcagtgggaaagagctcaagagatgtctctactcaaactgtgcctgcaggaggaggaacagagaagcctgggctgctgggactgggttcattctcatgacttggggctgtcgagatttaaagtgatgtaagctgtggttatgtggattctcttactttcctctgcctgcctcagtttaattattttgtcctacagaaatatcattaaaatatttttttgttacaaaagaaagaagagaaaaaaaaaaaaaaaaaaaaaaaaaaaaaataaaaaaaaataaaaataaaaaaaaaaaaaaaacttgagggggggcccggggcccaattggccctatagggagttgtattacaattcattggcctgagttgtacaacgttttaactgggccgtgaagaacccaactaaatcgcccttgagcaaatcccctttttgccagttggcggaatatgcaggatgtggccgtt

SEQ ID NO: 439512 - DNA, 3916 bp, Homo sapiens
gctgacctgaggagtcgcggctgcgagcaggttagagttacttgttattggtaaatagccactatggaggctaaggaccagaagaaacacagaaagaaaaacagtggacccaaagctgcaaagaaaaagaagcggcttctgcaggatctccagctaggagacgaagaagatgcccggaagagaaatcccaaagcttttgcagttcagtctgctgtgcggatggctcgatcctttcacaggactcaggatttgaagacaaaaaagcatcatattccagtggttgatcgaactccactagagcccccaccaatagtggtagtggtgatgggacctccaaaagttggaaagagcactttgatacaatgcctcattcggaactttacccggcagaagttgactgagatcagaggccctgtgacgattgtgtcaggtaaaaagcgcagactcaccattattgaatgtgggtgtgacattaacatgatgattgatctggctaaagtagcagatctggtactgatgcttatagatgccagctttgggtttgaaatggaaacgtttgagtttctaaacatctgtcaagtacatggctttcctaaaattatgggagttctcacccacctcgactccttcaagcataataagcaactgaagaagacaaagaagcgattaaaacacaggttctggacggaagtttacccgggtgccaagctgttctacctttctggaatggtgcatggagaatatcaaaaccaagaaatccacaatctgggccgttttattacagttatgaagtttaggcctctcacatggcaaacttctcacccttatatcctggcagacaggatggaagatttgacaaacccagaggatatccgaacaaacatcaaatgtgaccggaaggtgtcactttatggttatttaagaggagcacacttgaaaaataaaagccaaattcacatgccaggggtaggagattttgccgtgagtgacatcagtttcctcccagacccttgcgctcttcctgaacaacaaaagaagcgctgtttaaatgagaaggagaagctggtttatgcgcctctttctggagttgggggtgtgctgtatgacaaagacgctgtctatgttgaccttggtggcagccacgtttttcaggatgaagtggggcccacccatgagctggtccagagtctcatctctacccactccaccattgatgccaagatggcttcaagtcgagtgacgctgttttctgattccaagccacttgggtcagaggatatagataatcaagggctaatgatgccaaaggaggaaaaacaaatggacttgaacactggtcgaatgcgtcggaaagccattttcggagatgaagatgaatctggagatagtgatgatgaagaagatgatgaaatgtctgaagatgacgggttggaaaacggctctagtgatgaggaagcagaagaggaggaaaatgctgagatgactgatcagtatatggctgttaagggcatcaaacgacggaaacttgagttggaagaagacagtgaaatggatttgccagcatttgctgacagtgacgatgaccttgagaggagctcagcggaagaaggggaagcggaggaagctgatgaaagcagtgaagaagaggactgcactgcaggagagaagggcatttcaggatcaaaggctgctggagaaggtagtaaagcagggctgtcaccagctaattgccagagtgaccgtgtgaatctggagaagtctttgctgatgaagaaagcagctctccccactttcgattctgggcattgcacagctgaagaggtgtttgcatctgaagatgaatctgaagaaagctcctcactcagtgcagaggaagaagactcagaaaatgaagaggctattagaaaaaagctttcaaagccttctcaagtgagcagtggtcagaaactggggccacagaacttcattgatgagaccagtgatatagaaaatttactcaaagaggaagaagattacaaggaagaaaataatgattccaaagaaacgtcaggtgccctcaagtggaaggaagacctttccagaaaggcagctgaggcctttctgaggcagcagcaagcagctccaaacctccgaaagcttatttatgggacagtgacagaagataatgaagaagaagatgatgatactctagaagagcttggagggttgtttcgtgtcaaccagcctgacagagagtgtaagcacaaggctgactctttggactgctccagatttcttgtggaggccccccatgactgggatttagaggaggttatgaacagtatcagagattgcttcgtgactggaaagtgggaagatgataaagatgcagccaaggtcttagcagaagatgaggagctctacggtgactttgaagacttggaaacaggggacgtgcacaagggaaaatcaggccccaatactcagaatgaagatatagagaaagaagttaaggaagaaattgaccccgacgaagaagaaagtgccaagaaaaagcatttggataagaagagaaaattgaaggagatgtttgatgcagaatatgatgaaggagaaagcacatattttgatgatcttaaaggagaaatgcagaaacaagcacagctgaatcgcgcagaatttgaagatcaagatgatgaagccagagttcagtatgagggttttcgacctgggatgtacgtccgcattgagattgaaaatgttccctgtgaatttgtgcagaactttgacccccattaccccattatcctgggtggcttgggcaacagtgagggaaatgttggctacgtgcagatgcgtctgaagaaacatcgctggtataagaaaatcctcaagtcccgagatccaatcatattttctgtagggtggaggaggtttcagaccatcccactgtattatatcgaagaccacaatggaagacaaaggcttctaaagtataccccacagcacatgcattgcggagcagccttttggggccctatcactccacagggaactggtttcttggcaatacagtctgtcagtggcataatgcctgattttcggatagctgctacaggagttgtccttgatctggataaatccataaaaattgtgaagaaattaaagctaactggttttccatataaaattttcaagaacacttcatttattaagggaatgtttaattctgccttggaagtggccaaatttgaaggtgctgtgattcgaacagtcagtgggataagggggcagatcaagaaagcactccgagctccagaaggagctttcagggccagctttgaggataagctgctgatgagcgatattgtcttcatgcgaacttggtatcctgtttccatcccagcgttctataacccagtaacatctttgttgaaaccagtgggtgagaaagacacctggtcaggaatgcggaccacgggccaactcaggctcgcccatggcgtcagactaaaggcgaacaaggactctctgtataagccaatcctgaggcaaaagaaacattttaattcactgcacattccaaaagccttgcagaaggccctgccatttaagaacaagcccaagacccaagcaaaggcaggcaaggtgccaaaggacaggcggaggtagacagtttcaaacatcacagtttgaatgcctgtgaatgacacgtcagtgggaaagagctcaagagatgtctctactcaaactgtgcctgcaggaggaggaacagagaagcctgggctgctgggactgggttcattctcatgacttggggctgtcgagatttaaagtgatgtaagctgtggttatgtggattctcttactttcctctgcctgcctcagtttaattattttgtcctacagaaatatcattaaaatatttttttgttac

SEQ ID NO: 439513 - DNA, 1319 bp, Homo sapiens
gctgacctgaggagtcgcggctgcgagcaggttagagttacttgttattggtaaatagccactatggaggctaaggaccagaagaaacacagaaagaaaaacagtggacccaaagctgcaaagaaaaagaagcggcttctgcaggatctccagctaggagacgaagaagatgcccggaagagaaatcccaaagcttttgcagttcagtctgctgtgcggatggctcgatcctttcacaggactcaggatttgaagacaaaaaagcatcatattccagtggttgatcgaactccactagagcccccaccaatagtggtagtggtgatgggacctccaaaagttggaaagagcactttgatacaatgcctcattcggaactttacccggcagaagttgactgagatcagaggccctgtgacgattgtgtcaggtaaaaagcgcagactcaccattattgaatgtgggtgtgacattaacatgatgattgatctggctaaagtagcagatctggtactgatgcttatagatgccagctttgggtttgaaatggaaacgtttgagtttctaaacatctgtcaagtacatggctttcctaaaattatgggagttctcacccacctcgactccttcaagcataataagcaactgaagaagacaaagaagcgattaaaacacaggttctggacggaagtttacccgggtgccaagctgttctacctttctggaatggtgcatggagaatatcaaaaccaagaaatccacaatctgggccgttttattacagttatgaagtttaggcctctcacatggcaaacttctcacccttatatcctggcagacaggatggaagatttgacaaacccagaggatatccgaacaaacatcaaatgtgaccggaaggtgtcactttatggttatttaagaggagcacacttgaaaaataaaagccaaattcacatgccaggggtaggagattttgccgtgagtgacatcagtttcctcccagacccttgcgctcttcctgaacaacaaaagaagcgctgtttaaatgagaaggagaagctggtttatgcgcctctttctggagttgggggtgtgctgtatgacaaagacgctgtctatgttgaccttggtggcagccacgtttttcaggatgaagtggggcccacccatgagctggtccagagtctcatgacttggggctgtcgagatttaaagtgatgtaagctgtggttatgtggattctcttactttcctctgcctgcctcagtttaattattttgtcctacagaaatatcattaaaatatttttttgttac

SEQ ID NO: 439514 - DNA, 285 bp, Homo sapiens
gcagctgaggcctttctgaggcagcagcaagcagctccaaacctccgaaagcttatttatgggacaggtaaagaattctggttcagaactagaaatgttttagtttctctgattatttagatgagggaattggttggaggattcggctggtattgttgacatccataattgctgtccatcacatttcatatttgacagatgtctctaatcatcagcttatgaggaccacacattggtcttataaagtagacttatgggtttgctgtaaaacttgatgcaaatacc

SEQ ID NO: 439515 - DNA, 366 bp, Homo sapiens
gtaaaaagcgcagactcaccattattgaatgtgggtgtgacattaacatgatgattgatctggctaaagtagcagatctggtaagtgagcaggggcagcctggggtgctgatggagacttacagcattgtgataggttatttaccccgtgatgaagggaagagagtcttataattattaaaagaatcatggtcatcatcagtgatacggtagatatgattgaattgatgataattatggtaataaatgttgttatgttaataataaaaatggaatgtgcacaatgaaatgtgttccaaaatctaaaagcaaatcacaggatggagaaaacctttaatgaacacaactaataagagctcattaatat

SEQ ID NO: 439516 - DNA, 516 bp, Homo sapiens
tgaaatttccatgaaaagaaactgggatctattcatctgttctgttgagaccccatagttccataccatagaaatgggcacagtgggttttggggggagagttgtaagtgtaagctgtctgttcctctgtttactgagaattgtgggtgtccactgaggcagttcatatttggcagatgattgagtcctgatttctcagggccggcagattctggtgttactgatcttgtggaaaagtcaacccattgagaagattttatgcagaagttttaaatgcacattgatcataatttgaatatgtcacagtctttgtttttcttttcagccaatcctgaggcaaaagaaacattttaattcactgcacattccaaaagccttgcagaaggccctgccatttaagaacaagcccaagacccaagcaaaggcaggcaaggtgccaaaggacaggcggagaccggccgtcatacgcgagcctcatgaaagaaagaaaggtactgttgcccatgctgtactgca

SEQ ID NO: 439517 - DNA, 544 bp, Homo sapiens
ataagcacctcagtggcccaaagacaaggcctgaaatttccatgaaaagaaactgggatctattcatctgttctgttgagaccccatagttccataccatagaaatgggcacagtgggttttggggggagagttgtaagtgtaagctgtctgttcctctgtttactgagaattgtgggtgtccactgaggcagttcatatttggcagatgattgagtcctgatttctcagggccggcagattctggtgttactgatcttgtggaaaagtcaacccattgagaagattttatgcagaagttttaaatgcacattgatcataatttgaatatgtcacagtctttgtttttcttttcagccaatcctgaggcaaaagaaacattttaattcactgcacattccaaaagccttgcagaaggccctgccatttaagaacaagcccaagacccaagcaaaggcaggcaaggtgccaaaggacaggcggagaccggccgtcatacgcgagcctcatgaaagaaagaaaggtactgttgcccatgctgtact

SEQ ID NO: 439518 - DNA, 4219 bp, Homo sapiens
gctgacctgaggagtcgcggctgcgagcaggttagagttacttgttattggtaaatagccactatggaggctaaggaccagaagaaacacagaaagaaaaacagtggacccaaagctgcaaagaaaaagaagcggcttctgcaggatctccagctaggagacgaagaagatgcccggaagagaaatcccaaagcttttgcagttcagtctgctgtgcggatggctcgatcctttcacaggactcaggatttgaagacaaaaaagcatcatattccagtggttgatcgaactccactagagcccccaccaatagtggtagtggtgatgggacctccaaaagttggaaagagcactttgatacaatgcctcattcggaactttacccggcagaagttgactgagatcagaggccctgtgacgattgtgtcaggtaaaaagcgcagactcaccattattgaatgtgggtgtgacattaacatgatgattgatctggctaaagtagcagatctggtactgatgcttatagatgccagctttgggtttgaaatggaaacgtttgagtttctaaacatctgtcaagtacatggctttcctaaaattatgggagttctcacccacctcgactccttcaagcataataagcaactgaagaagacaaagaagcgattaaaacacaggttctggacggaagtttacccgggtgccaagctgttctacctttctggaatggtgcatggagaatatcaaaaccaagaaatccacaatctgggccgttttattacagttatgaagtttaggcctctcacatggcaaacttctcacccttatatcctggcagacaggatggaagatttgacaaacccagaggatatccgaacaaacatcaaatgtgaccggaaggtgtcactttatggttatttaagaggagcacacttgaaaaataaaagccaaattcacatgccaggggtaggagattttgccgtgagtgacatcagtttcctcccagacccttgcgctcttcctgaacaacaaaagaagcgctgtttaaatgagaaggagaagctggtttatgcgcctctttctggagttgggggtgtgctgtatgacaaagacgctgtctatgttgaccttggtggcagccacgtttttcaggatgaagtggggcccacccatgagctggtccagagtctcatctctacccactccaccattgatgccaagatggcttcaagtcgagtgacgctgttttctgattccaagccacttgggtcagaggatatagataatcaagggctaatgatgccaaaggaggaaaaacaaatggacttgaacactggtcgaatgcgtcggaaagccattttcggagatgaagatgaatctggagatagtgatgatgaagaagatgatgaaatgtctgaagatgacgggttggaaaacggctctagtgatgaggaagcagaagaggaggaaaatgctgagatgactgatcagtatatggctgttaagggcatcaaacgacggaaacttgagttggaagaagacagtgaaatggatttgccagcatttgctgacagtgacgatgaccttgagaggagctcagcggaagaaggggaagcggaggaagctgatgaaagcagtgaagaagaggactgcactgcaggagagaagggcatttcaggatcaaaggctgctggagaaggtagtaaagcagggctgtcaccagctaattgccagagtgaccgtgtgaatctggagaagtctttgctgatgaagaaagcagctctccccactttcgattctgggcattgcacagctgaagaggtgtttgcatctgaagatgaatctgaagaaagctcctcactcagtgcagaggaagaagactcagaaaatgaagaggctattagaaaaaagctttcaaagccttctcaagtgagcagtggtcagaaactggggccacagaacttcattgatgagaccagtgatatagaaaatttactcaaagaggaagaagattacaaggaagaaaataatgattccaaagaaacgtcaggtgccctcaagtggaaggaagacctttccagaaaggcagctgaggcctttctgaggcagcagcaagcagctccaaacctccgaaagcttatttatgggacagtgacagaagataatgaagaagaagatgatgatactctagaagagcttggagggttgtttcgtgtcaaccagcctgacagagagtgtaagcacaaggctgactctttggactgctccagatttcttgtggaggccccccatgactgggatttagaggaggttatgaacagtatcagagattgcttcgtgactggaaagtgggaagatgataaagatgcagccaaggtcttagcagaagatgaggagctctacggtgactttgaagacttggaaacaggggacgtgcacaagggaaaatcaggccccaatactcagaatgaagatatagagaaagaagttaaggaagaaattgaccccgacgaagaagaaagtgccaagaaaaagcatttggataagaagagaaaattgaaggagatgtttgatgcagaatatgatgaaggagaaagcacatattttgatgatcttaaaggagaaatgcagaaacaagcacagctgaatcgcgcagaatttgaagatcaagatgatgaagccagagttcagtatgagggttttcgacctgggatgtacgtccgcattgagattgaaaatgttccctgtgaatttgtgcagaactttgacccccattaccccattatcctgggtggcttgggcaacagtgagggaaatgttggctacgtgcagatgcgtctgaagaaacatcgctggtataagaaaatcctcaagtcccgagatccaatcatattttctgtagggtggaggaggtttcagaccatcccactgtattatatcgaagaccacaatggaagacaaaggcttctaaagtataccccacagcacatgcattgcggagcagccttttggggccctatcactccacagggaactggtttcttggcaatacagtctgtcagtggcataatgcctgattttcggatagctgctacaggagttgtccttgatctggataaatccataaaaattgtgaagaaattaaagctaactggttttccatataaaattttcaagaacacttcatttattaagggaatgtttaattctgccttggaagtggccaaatttgaaggtgctgtgattcgaacagtcagtgggataagggggcagatcaagaaagcactccgagctccagaaggagctttcagggccagctttgaggataagctgctgatgagcgatattgtcttcatgcgaacttggtatcctgtttccatcccagcgttctataacccagtaacatctttgttgaaaccagtgggtgagaaagacacctggtcaggaatgcggaccacgggccaactcaggctcgcccatggcgtcagactaaaggcgaacaaggactctctgtataagccaatcctgaggcaaaagaaacattttaattcactgcacattccaaaagccttgcagaaggccctgccatttaagaacaagcccaagacccaagcaaaggcaggcaaggtgccaaaggacaggcggagaccggccgtcatacgcgagcctcatgaaagaaagatccttgcactgctggatgctctgagtacggtgcatagtcagaagatgaagaaggccaaggagcagcggcacctgcacaataaagagcacttcagagccaagcagaaggaggaggaggagaagctgaagcggcagaaggacctcaggaagaagctcttcagaattcaggggcagaaggaaagaagaaaccagaagtccagtttgaagggggctgagggccaattgcagtgagcctttggactggagggactgtccctggatctgcggaggtagacagtttcaaacatcacagtttgaatgcctgtgaatgacacgtcagtgggaaagagctcaagagatgtctctactcaaactgtgcctgcaggaggaggaacagagaagcctgggctgctgggactgggttcattctcatgacttggggctgtcgagatttaaagtgatgtaagctgtggttatgtggattctcttactttcctctgcctgcctcagtttaattattttgtcctacagaaatatcattaaaatatttttttgttac

SEQ ID NO: 439519 - DNA, 986 bp, Homo sapiens
taagtgagtccgacagtcacggtgggattggggcgcgcagatcagaccagcaatccgggctccgaaccgcgcgtgctagcgcagtttagtggataatctggtgcttagcgatattgtcttcatgcgaacttggtatcctgtttccatcccagcgttctataacccagtaacatctttgttgaaaccagtgggtgagaaagacacctggtcaggaatgcggaccacgggccaactcaggctcgcccatggcgtcagactaaaggcgaacaaggactctctgtataagccaatcctgaggcaaaagaaacattttaattcactgcacattccaaaagccttgcagaaggccctgccatttaagaacaagcccaagacccaagcaaaggcaggcaaggtgccaaaggacaggcggagaccggccgtcatacgcgagcctcatgaaagaaagatccttgcactgctggatgctctgagtacggtgcatagtcagaagatgaagaaggccaaggagcagcggcacctgcacaataaagagcacttcagagccaagcagaaggaggaggaggagaagctgaagcggcagaaggacctcaggaagaagctcttcagaattcaggggcagaaggaaagaagaaaccagaagtccagtttgaagggggctgagggccaattgcagtgagcctttggactggagggactgtccctggatctgcggaggtagacagtttcaaacatcacagtttgaatgcctgtgaatgacacgtcagtgggaaagagctcaagagatgtctctactcaaactgtgcctgcaggaggaggaacagagaagcctgggctgctgggactgggttcattctcatgacttggggctgtcgagatttaaagtgatgtaagctgtggttatgtggattctcttactttcctctgcctgcctcagtttaattattttgtcctacagaaatatcattaaaatatttttttgttac

SEQ ID NO: 439520 - DNA, 3837 bp, Homo sapiens
gctgacctgaggagtcgcggctgcgagcaggttagagttacttgttattggtaaatagccactatggaggctaaggaccagaagaaacacagaaagaaaaacagtggacccaaagctgcaaagaaaaagaagcggcttctgcaggatctccagctaggagacgaagaagatgcccggaagagaaatcccaaagcttttgcagttcagtctgctgtgcggatggctcgatcctttcacaggactcaggatttgaagacaaaaaagcatcatattccagtggttgatcgaactccactagagcccccaccaatagtggtagtggtgatgggacctccaaaagttggaaagagcactttgatacaatgcctcattcggaactttacccggcagaagttgactgagatcagaggccctgtgacgattgtgtcaggtaaaaagcgcagactcaccattattgaatgtgggtgtgacattaacatgatgattgatctggctaaagtagcagatctggtactgatgcttatagatgccagctttgggtttgaaatggaaacgtttgagtttctaaacatctgtcaagtacatggctttcctaaaattatgggagttctcacccacctcgactccttcaagcataataagcaactgaagaagacaaagaagcgattaaaacacaggttctggacggaagtttacccgggtgccaagctgttctacctttctggaatggtgcatggagaatatcaaaaccaagaaatccacaatctgggccgttttattacagttatgaagtttaggcctctcacatggcaaacttctcacccttatatcctggcagacaggatggaagatttgacaaacccagaggatatccgaacaaacatcaaatgtgaccggaaggtgtcactttatggttatttaagaggagcacacttgaaaaataaaagccaaattcacatgccaggggtaggagattttgccgtgagtgacatcagtttcctcccagacccttgcgctcttcctgaacaacaaaagaagcgctgtttaaatgagaaggagaagctggtttatgcgcctctttctggagttgggggtgtgctgtatgacaaagacgctgtctatgttgaccttggtggcagccacgtttttcaggatgaagtggggcccacccatgagctggtccagagtctcatctctacccactccaccattgatgccaagatggcttcaagtcgagtgacgctgttttctgattccaagccacttgggtcagaggatatagataatcaagggctaatgatgccaaaggaggaaaaacaaatggacttgaacactggtcgaatgcgtcggaaagccattttcggagatgaagatgaatctggagatagtgatgatgaagaagatgatgaaatgtctgaagatgacgggttggaaaacggctctagtgatgaggaagcagaagaggaggaaaatgctgagatgactgatcagtatatggctgttaagggcatcaaacgacggaaacttgagttggaagaagacagtgaaatggatttgccagcatttgctgacagtgacgatgaccttgagaggagctcagcggaagaaggggaagcggaggaagctgatgaaagcagtgaagaagaggactgcactgcaggagagaagggcatttcaggatcaaaggctgctggagaaggtagtaaagcagggctgtcaccagctaattgccagagtgaccgtgtgaatctggagaagtctttgctgatgaagaaagcagctctccccactttcgattctgggcattgcacagctgaagaggtgtttgcatctgaagatgaatctgaagaaagctcctcactcagtgcagaggaagaagactcagaaaatgaagaggctattagaaaaaagctttcaaagccttctcaagtgagcagtggtcagaaactggggccacagaacttcattgatgagaccagtgatatagaaaatttactcaaagaggaagaagattacaaggaagaaaataatgattccaaagaaacgtcaggtgccctcaagtggaaggaagacctttccagaaaggcagctgaggcctttctgaggcagcagcaagcagctccaaacctccgaaagcttatttatgggacagtgacagaagataatgaagaagaagatgatgatactctagaagagcttggagggttgtttcgtgtcaaccagcctgacagagagtgtaagcacaaggctgactctttggactgctccagatttcttgtggaggccccccatgactgggatttagaggaggttatgaacagtatcagagattgcttcgtgactggaaagtgggaagatgataaagatgcagccaaggtcttagcagaagatgaggagctctacggtgactttgaagacttggaaacaggggacgtgcacaagggaaaatcaggccccaatactcagaatgaagatatagagaaagaagttaaggaagaaattgaccccgacgaagaagaaagtgccaagaaaaagcatttggataagaagagaaaattgaaggagatgtttgatgcagaatatgatgaaggagaaagcacatattttgatgatcttaaaggagaaatgcagaaacaagcacagctgaatcgcgcagaatttgaagatcaagatgatgaagccagagttcagtatgagggttttcgacctgggatgtacgtccgcattgagattgaaaatgttccctgtgaatttgtgcagaactttgacccccattaccccattatcctgggtggcttgggcaacagtgagggaaatgttggctacgtgcagatgcgtctgaagaaacatcgctggtataagaaaatcctcaagtcccgagatccaatcatattttctgtagggtggaggaggtttcagaccatcccactgtattatatcgaagaccacaatggaagacaaaggcttctaaagtataccccacagcacatgcattgcggagcagccttttggggccctatcactccacagggaactggtttcttggcaatacagtctgtcagtggcataatgcctgattttcggatagctgctacaggagttgtccttgatctggataaatccataaaaattgtgaagaaattaaagctaactggttttccatataaaattttcaagaacacttcatttattaagggaatgtttaattctgccttggaagtggccaaatttgaaggtgctgtgattcgaacagtcagtgggataagggggcagatcaagaaagcactccgagctccagaaggagctttcagggccagctttgaggataagctgctgatgagcgatattgtcttcatgcgaacttggtatcctgtttccatcccagcgttctataacccagtaacatctttgttgaaaccagtgggtgagaaagacacctggtcaggaatgcggaccacgggccaactcaggctcgcccatggcgtcagactaaaggcgaacaaggactctctgtataagccaatcctgaggcaaaagaaacattttaattcactgcacattccaaaagccttgcagaaggccctgccatttaagaacaagcccaagacccaagcaaaggcaggcaaggtgccaaaggacaggcggagaccggccgtcatacgcgagcctcatgaaagaaagctgggctgctgggactgggttcattctcatgacttggggctgtcgagatttaaagtgatgtaagctgtggttatgtggattctcttactttcctctgcctgcctcagtttaattattttgtcctacagaaatatcattaaaatatttttttgttac

SEQ ID NO: 439521 - DNA, 571 bp, Homo sapiens
ctgttcagaggatcccccaacgctctcattttatttgtattttcaagactttaaacatttatgtttaaaagtaagaagaaaaataatattcagaactgattcctgaaataatgcaagcttataatgtatcccgataactttgtgatgtttcgggaagatttttttctatagtgaactctgtgggcgtctcccagtattaccctggatgataggaattgactccggcgtgcacacacgtacacacccacacacatctatctatacataatggctgaagccaaacttgtcttgcagatgtagaaattgttgctttgtttctctgataaaactggttttagacaaaaaatagggatgatcactcttagaccatgctaatgttactagagaagaagccttcttttctttcttctatgtgaaacttgaaatgaggaaaagcaattctagtgtaaatcatgcaagcgctctaattcctataaatacgaaactcgagaagattcaatcactgtatagaatggtaaaataccaactcatttcttatatcatattgttaaataaactgtgtgcaacagac

SEQ ID NO: 439522 - DNA, 483 bp, Homo sapiens
  misc_feature (12)..(13): n is a, c, g, or t
  misc_feature (34)..(34): n is a, c, g, or t
  misc_feature (49)..(49): n is a, c, g, or t
  misc_feature (57)..(57): n is a, c, g, or t
  misc_feature (66)..(66): n is a, c, g, or t
  misc_feature (70)..(70): n is a, c, g, or t
taacgtcccttnncaaatggaagccctttagctngcgggaaccccaagntcaacccnataatattntganccttttatttgtattttcaagactttaaacatttatgtttaaaagtaagaagaaaaataatattcagaactgattcctgaaataatgcaagcttataatgtatcccgataactttgtgatgtttcgggaagatttttttctatagtgaactctgtgggcgtctcccagtattaccctggatgataggaattgactccggcgtgcacacacgtacacacccacacacatctatctatacataatggctgaagccaaacttgtcttgcagatgtagaaattgttgctttgtttctctgataaaactggttttagacaaaaagaaggcttcttctctagtaacattagcatggtctaagagtgatcaccctattttttgtctaaaaccagtttatacaggtaccgagctcgattgt

SEQ ID NO: 439523 - DNA, 10794 bp, Homo sapiens
  misc_feature (2)..(2): n is a, c, g, or t
tncttttttttttaattgaggaatcaacagccgccatcttgtcgcggacccgaccggggcttcgagcgcgatctactcggccccgccggtcccgggccccacaaccgcccgcgcaccccgctccgcccggccggcccgctccgcccggccctcggcgcccgccccggcggccccgctcgcctctcggctcggcctcccggagcccggcggcggcggcggcggcagcggcggcggcggcggcggaacggggggtgggggggccgcggcggcggcggcgaccccgctcggcgcattgtttttcctcacggcggcggcggcggcgggccgcgggccgggagcggagcccggagccccctcgtcgtcgggccgcgagcgaattcattaagtggggcgcggggggggagcgaggcggcggcggcggcggcaccatgttctcggggactgcctgagccgcccggccgggcgccgtcgctgccagccgggcccgggggggcggccgggccgccggggcgcccccaccgcggagtgtcgcgctcgggaggcgggcaggggatgagggggccgcggccggcggcggcggcggcggccgggggcgggcggtgagcgctgcggggcgctgttgctgtggctgagatttggccgccgcctcccccacccggcctgcgccctccctctccctcggcgcccgcccgcccgctcgcggcccgcgctcgctcctctccctcgcagccggcagggcccccgacccccgtccgggccctcgccggcccggccgcccgtgcccggggctgttttcgcgagcaggtgaaaatggctgagaacttgctggacggaccgcccaaccccaaaagagccaaactcagctcgcccggtttctcggcgaatgacagcacagattttggatcattgtttgacttggaaaatgatcttcctgatgagctgatacccaatggaggagaattaggccttttaaacagtgggaaccttgttccagatgctgcttccaaacataaacaactgtcggagcttctacgaggaggcagcggctctagtatcaacccaggaataggaaatgtgagcgccagcagccccgtgcagcagggcctgggtggccaggctcaagggcagccgaacagtgctaacatggccagcctcagtgccatgggcaagagccctctgagccagggagattcttcagcccccagcctgcctaaacaggcagccagcacctctgggcccacccccgctgcctcccaagcactgaatccgcaagcacaaaagcaagtggggctggcgactagcagccctgccacgtcacagactggacctggtatctgcatgaatgctaactttaaccagacccacccaggcctcctcaatagtaactctggccatagcttaattaatcaggcttcacaagggcaggcgcaagtcatgaatggatctcttggggctgctggcagaggaaggggagctggaatgccgtaccctactccagccatgcagggcgcctcgagcagcgtgctggctgagaccctaacgcaggtttccccgcaaatgactggtcacgcgggactgaacaccgcacaggcaggaggcatggccaagatgggaataactgggaacacaagtccatttggacagccctttagtcaagctggagggcagccaatgggagccactggagtgaacccccagttagccagcaaacagagcatggtcaacagtttgcccaccttccctacagatatcaagaatacttcagtcaccaacgtgccaaatatgtctcagatgcaaacatcagtgggaattgtacccacacaagcaattgcaacaggccccactgcagatcctgaaaaacgcaaactgatacagcagcagctggttctactgcttcatgctcataagtgtcagagacgagagcaagcaaacggagaggttcgggcctgctcgctcccgcattgtcgaaccatgaaaaacgttttgaatcacatgacgcattgtcaggctgggaaagcctgccaagttgcccattgtgcatcttcacgacaaatcatctctcattggaagaactgcacacgacatgactgtcctgtttgcctccctttgaaaaatgccagtgacaagcgaaaccaacaaaccatcctggggtctccagctagtggaattcaaaacacaattggttctgttggcacagggcaacagaatgccacttctttaagtaacccaaatcccatagaccccagctccatgcagcgagcctatgctgctctcggactcccctacatgaaccagccccagacgcagctgcagcctcaggttcctggccagcaaccagcacagcctcaaacccaccagcagatgaggactctcaaccccctgggaaataatccaatgaacattccagcaggaggaataacaacagatcagcagcccccaaacttgatttcagaatcagctcttccgacttccctgggggccacaaacccactgatgaacgatggctccaactctggtaacattggaaccctcagcactataccaacagcagctcctccttctagcaccggtgtaaggaaaggctggcacgaacatgtcactcaggacctgcggagccatctagtgcataaactcgtccaagccatcttcccaacacctgatcccgcagctctaaaggatcgccgcatggaaaacctggtagcctatgctaagaaagtggaaggggacatgtacgagtctgccaacagcagggatgaatattatcacttattagcagagaaaatctacaagatacaaaaagaactagaagaaaaacggaggtcgcgtttacataaacaaggcatcttggggaaccagccagccttaccagccccgggggctcagccccctgtgattccacaggcacaacctgtgagacctccaaatggacccctgtccctgccagtgaatcgcatgcaagtttctcaagggatgaattcatttaaccccatgtccttggggaacgtccagttgccacaagcacccatgggacctcgtgcagcctccccaatgaaccactctgtccagatgaacagcatgggctcagtgccagggatggccatttctccttcccgaatgcctcagcctccgaacatgatgggtgcacacaccaacaacatgatggcccaggcgcccgctcagagccagtttctgccacagaaccagttcccgtcatccagcggggcgatgagtgtgggcatggggcagccgccagcccaaacaggcgtgtcacagggacaggtgcctggtgctgctcttcctaaccctctcaacatgctggggcctcaggccagccagctaccttgccctccagtgacacagtcaccactgcacccaacaccgcctcctgcttccacggctgctggcatgccatctctccagcacacgacaccacctgggatgactcctccccagccagcagctcccactcagccatcaactcctgtgtcgtcttccgggcagactcccaccccgactcctggctcagtgcccagtgctacccaaacccagagcacccctacagtccaggcagcagcccaggcccaggtgaccccgcagcctcaaaccccagttcagcccccgtctgtggctacccctcagtcatcgcagcaacagccgacgcctgtgcacgcccagcctcctggcacaccgctttcccaggcagcagccagcattgataacagagtccctaccccctcctcggtggccagcgcagaaaccaattcccagcagccaggacctgacgtacctgtgctggaaatgaagacggagacccaagcagaggacactgagcccgatcctggtgaatccaaaggggagcccaggtctgagatgatggaggaggatttgcaaggagcttcccaagttaaagaagaaacagacatagcagagcagaaatcagaaccaatggaagtggatgaaaagaaacctgaagtgaaagtagaagttaaagaggaagaagagagtagcagtaacggcacagcctctcagtcaacatctccttcgcagccgcgcaaaaaaatctttaaaccagaggagttacgccaggccctcatgccaaccctagaagcactgtatcgacaggacccagagtcattacctttccggcagcctgtagatccccagctcctcggaattccagactattttgacatcgtaaagaatcccatggacctctccaccatcaagcggaagctggacacagggcaataccaagagccctggcagtacgtggacgacgtctggctcatgttcaacaatgcctggctctataatcgcaagacatcccgagtctataagttttgcagtaagcttgcagaggtctttgagcaggaaattgaccctgtcatgcagtcccttggatattgctgtggacgcaagtatgagttttccccacagactttgtgctgctatgggaagcagctgtgtaccattcctcgcgatgctgcctactacagctatcagaataggtatcatttctgtgagaagtgtttcacagagatccagggcgagaatgtgaccctgggtgacgacccttcacagccccagacgacaatttcaaaggatcagtttgaaaagaagaaaaatgataccttagaccccgaacctttcgttgattgcaaggagtgtggccggaagatgcatcagatttgcgttctgcactatgacatcatttggccttcaggttttgtgtgcgacaactgcttgaagaaaactggcagacctcgaaaagaaaacaaattcagtgctaagaggctgcagaccacaagactgggaaaccacttggaagaccgagtgaacaaatttttgcggcgccagaatcaccctgaagccggggaggtttttgtccgagtggtggccagctcagacaagacggtggaggtcaagcccgggatgaagtcacggtttgtggattctggggaaatgtctgaatctttcccatatcgaaccaaagctctgtttgcttttgaggaaattgacggcgtggatgtctgcttttttggaatgcacgtccaagaatacggctctgattgcccccctccaaacacgaggcgtgtgtacatttcttatctggatagtattcatttcttccggccacgttgcctccgcacagccgtttaccatgagatccttattggatatttagagtatgtgaagaaattagggtatgtgacagggcacatctgggcctgtcctccaagtgaaggagatgattacatcttccattgccacccacctgatcaaaaaatacccaagccaaaacgactgcaggagtggtacaaaaagatgctggacaaggcgtttgcagagcggatcatccatgactacaaggatattttcaaacaagcaactgaagacaggctcaccagtgccaaggaactgccctattttgaaggtgatttctggcccaatgtgttagaagagagcattaaggaactagaacaagaagaagaggagaggaaaaaggaagagagcactgcagccagtgaaaccactgagggcagtcagggcgacagcaagaatgccaagaagaagaacaacaagaaaaccaacaagaacaaaagcagcatcagccgcgccaacaagaagaagcccagcatgcccaacgtgtccaatgacctgtcccagaagctgtatgccaccatggagaagcacaaggaggtcttcttcgtgatccacctgcacgctgggcctgtcatcaacaccctgccccccatcgtcgaccccgaccccctgctcagctgtgacctcatggatgggcgcgacgccttcctcaccctcgccagagacaagcactgggagttctcctccttgcgccgctccaagtggtccacgctctgcatgctggtggagctgcacacccagggccaggaccgctttgtctacacctgcaacgagtgcaagcaccacgtggagacgcgctggcactgcactgtgtgcgaggactacgacctctgcatcaactgctataacacgaagagccatgcccataagatggtgaagtgggggctgggcctggatgacgagggcagcagccagggcgagccacagtcaaagagcccccaggagtcacgccggctgagcatccagcgctgcatccagtcgctggtgcacgcgtgccagtgccgcaacgccaactgctcgctgccatcctgccagaagatgaagcgggtggtgcagcacaccaagggctgcaaacgcaagaccaacgggggctgcccggtgtgcaagcagctcatcgccctctgctgctaccacgccaagcactgccaagaaaacaaatgccccgtgcccttctgcctcaacatcaaacacaagctccgccagcagcagatccagcaccgcctgcagcaggcccagctcatgcgccggcggatggccaccatgaacacccgcaacgtgcctcagcagagtctgccttctcctacctcagcaccgcccgggacccccacacagcagcccagcacaccccagacgccgcagccccctgcccagccccaaccctcacccgtgagcatgtcaccagctggcttccccagcgtggcccggactcagccccccaccacggtgtccacagggaagcctaccagccaggtgccggcccccccacccccggcccagccccctcctgcagcggtggaagcggctcggcagatcgagcgtgaggcccagcagcagcagcacctgtaccgggtgaacatcaacaacagcatgcccccaggacgcacgggcatggggaccccggggagccagatggcccccgtgagcctgaatgtgccccgacccaaccaggtgagcgggcccgtcatgcccagcatgcctcccgggcagtggcagcaggcgccccttccccagcagcagcccatgccaggcttgcccaggcctgtgatatccatgcaggcccaggcggccgtggctgggccccggatgcccagcgtgcagccacccaggagcatctcacccagcgctctgcaagacctgctgcggaccctgaagtcgcccagctcccctcagcagcaacagcaggtgctgaacattctcaaatcaaacccgcagctaatggcagctttcatcaaacagcgcacagccaagtacgtggccaatcagcccggcatgcagccccagcctggcctccagtcccagcccggcatgcaaccccagcctggcatgcaccagcagcccagcctgcagaacctgaatgccatgcaggctggcgtgccgcggcccggtgtgcctccacagcagcaggcgatgggaggcctgaacccccagggccaggccttgaacatcatgaacccaggacacaaccccaacatggcgagtatgaatccacagtaccgagaaatgttacggaggcagctgctgcagcagcagcagcaacagcagcagcaacaacagcagcaacagcagcagcagcaagggagtgccggcatggctgggggcatggcggggcacggccagttccagcagcctcaaggacccggaggctacccaccggccatgcagcagcagcagcgcatgcagcagcatctccccctccagggcagctccatgggccagatggcggctcagatgggacagcttggccagatggggcagccggggctgggggcagacagcacccccaacatccagcaagccctgcagcagcggattctgcagcaacagcagatgaagcagcagattgggtccccaggccagccgaaccccatgagcccccagcaacacatgctctcaggacagccacaggcctcgcatctccctggccagcagatcgccacgtcccttagtaaccaggtgcggtctccagcccctgtccagtctccacggccccagtcccagcctccacattccagcccgtcaccacggatacagccccagccttcgccacaccacgtctcaccccagactggttccccccaccccggactcgcagtcaccatggccagctccatagatcagggacacttggggaaccccgaacagagtgcaatgctcccccagctgaacacccccagcaggagtgcgctgtccagcgaactgtccctggtcggggacaccacgggggacacgctagagaagtttgtggagggcttgtagcattgtgagagcatcaccttttccctttcatgttcttggaccttttgtactgaaaatccaggcatctaggttctttttattcctagatggaactgcgacttccgagccatggaagggtggattgatgtttaaagaaacaatacaaagaatatatttttttgttaaaaaccagttgatttaaatatctggtctctctctttggtttttttttggcgggggggtggggggggttcttttttttccgttttgtttttgtttggggggaggggggttttgtttggattctttttgtcgtcattgctggtgactcatgcctttttttaacgggaaaaacaagttcattatattcatattttttatttgtattttcaagactttaaacatttatgtttaaaagtaagaagaaaaataatattcagaactgattcctgaaataatgcaagcttataatgtatcccgataactttgtgatgtttcgggaagatttttttctatagtgaactctgtgggcgtctcccagtattaccctggatgataggaattgactccggcgtgcacacacgtacacacccacacacatctatctatacataatggctgaagccaaacttgtcttgcagatgtagaaattgttgctttgtttctctgataaaactggttttagacaaaaaatagggatgatcactcttagaccatgctaatgttactagagaagaagccttcttttctttcttctatgtgaaacttgaaatgaggaaaagcaattctagtgtaaatcatgcaagcgctctaattcctataaatacgaaactcgagaagattcaatcactgtatagaatggtaaaataccaactcatttcttatatcatattgttaaataaactgtgtgcaacagacaaaaagggtggtccttcttgaattcatgtacatggtattaacacttagtgttcggggttttttgttatgaaaatgctgttttcaacattgtatttggactatgcatgtgttttttccccattgtatataaagtaccgcttaaaattgatataaattactgaggtttttaacatgtattctgttctttaagatccctgtaagaatgtttaaggtttttatttatttatatatattttttgagtctgttctttgtaagacatggttctggttgttcgctcatagcggagaggctggggctgcggttgtggttgtggcggcgtgggtggtggctgggaactgtggcccaggcttagcggccgcccggaggcttttcttcccggagactgaggtgggcggctcagcgttggccccacacattcgaggctcacaggtgattgtcgctcacacagttagggtcgtcagttggtctgaaactgcatttggcccactcctccatcctccctgtccgtcgtagctgccacccccagaggcggcgcttcttcccgtgttcaggcggctccccccccccgtacacgactcccagaatctgaggcagagagtgctccaggctcgcgaggtgctttctgacttccccccaaatcctgccgctgccgcgcagcatgtcccgtgtggcgtttgaggaaatgctgagggacagacaccttggagcaccagctccggtccctgttacagtgagaaaggtcccccacttcgggggatacttgcacttagccacatggtcctgcctcccttggagtccagttccaggctcccttactgagtgggtgagacaagttcacaaaaaccgtaaaactgagaggaggaccatgggcaggggagctgaagttcatcccctaagtctaccacccccagcacccagagaacccactttatccctagtcccccaacaaaggctggtctaggtgggggtgatggtaattttagaaatcacgccccaaatagcttccgtttgggcccttacattcacagataggttttaaatagctgaatacttggtttgggaatctgaattcgaggaacctttctaagaaattggaaaggtccgatctagttttagcacagagctttgaaccttgagttataaaatgcagaataattcaagtaaaaataagaccaccatctggcacccctgaccagcccccattcaccccatcccaggaggggaagcacaggccgggcctccgggtggagattgctgccactgctcggcctgctgggttcttaacctccagtgtcctcttcatcttttccacccgtagggaaaccttgagccatgtgttcaaacaagaagtggggctagagcccgagagcagcagctctaagcccacactcagaaagtggcgccctcctggttgtgcagccttttaatgtgggcagtggaggggcctctgtttcaggttatcctggaattcaaaacgttatgtaccaacctcatcctctttggagtctgcatcctgtgcaaccgtcttgggcaatccagatgtcgaaggatgtgaccgagagcatggtctgtggatgctaaccctaagtttgtcgtaaggaaatttctgtaagaaacctggaaagccccaacgctgtgtctcatgctgtatacttaagaggagaagaaaaagtcctatatttgtgatcaaaaagaggaaacttgaaatgtgatggtgtttataataaaagatggtaaaactacttggattcaaaaat

SEQ ID NO: 439524 - DNA, 9205 bp, Homo sapiens
  misc_feature (2)..(2): n is a, c, g, or t
tncttttttttttaattgaggaatcaacagccgccatcttgtcgcggacccgaccggggcttcgagcgcgatctactcggccccgccggtcccgggccccacaaccgcccgcgcaccccgctccgcccggccggcccgctccgcccggccctcggcgcccgccccggcggccccgctcgcctctcggctcggcctcccggagcccggcggcggcggcggcggcagcggcggcggcggcggcggaacggggggtgggggggccgcggcggcggcggcgaccccgctcggcgcattgtttttcctcacggcggcggcggcggcgggccgcgggccgggagcggagcccggagccccctcgtcgtcgggccgcgagcgaattcattaagtggggcgcggggggggagcgaggcggcggcggcggcggcaccatgttctcggggactgcctgagccgcccggccgggcgccgtcgctgccagccgggcccgggggggcggccgggccgccggggcgcccccaccgcggagtgtcgcgctcgggaggcgggcaggggatgagggggccgcggccggcggcggcggcggcggccgggggcgggcggtgagcgctgcggggcgctgttgctgtggctgagatttggccgccgcctcccccacccggcctgcgccctccctctccctcggcgcccgcccgcccgctcgcggcccgcgctcgctcctctccctcgcagccggcagggcccccgacccccgtccgggccctcgccggcccggccgcccgtgcccggggctgttttcgcgagcaggtgaaaatggctgagaacttgctggacggaccgcccaaccccaaaagagccaaactcagctcgcccggtttctcggcgaatgacagcacagattttggatcattgtttgacttggaaaatgatcttcctgatgagctgatacccaatggaggagaattaggccttttaaacagtgggaaccttgttccagatgctgcttccaaacataaacaactgtcggagcttctacgaggaggcagcggctctagtatcaacccaggaataggaaatgtgagcgccagcagccccgtgcagcagggcctgggtggccaggctcaagggcagccgaacagtgctaacatggccagcctcagtgccatgggcaagagccctctgagccagggagattcttcagcccccagcctgcctaaacaggcagccagcacctctgggcccacccccgctgcctcccaagcactgaatccgcaagcacaaaagcaagtggggctggcgactagcagccctgccacgtcacagactggacctggtatctgcatgaatgctaactttaaccagacccacccaggcctcctcaatagtaactctggccatagcttaattaatcaggcttcacaagggcaggcgcaagtcatgaatggatctcttggggctgctggcagaggaaggggagctggaatgccgtaccctactccagccatgcagggcgcctcgagcagcgtgctggctgagaccctaacgcaggtttccccgcaaatgactggtcacgcgggactgaacaccgcacaggcaggaggcatggccaagatgggaataactgggaacacaagtccatttggacagccctttagtcaagctggagggcagccaatgggagccactggagtgaacccccagttagccagcaaacagagcatggtcaacagtttgcccaccttccctacagatatcaagaatacttcagtcaccaacgtgccaaatatgtctcagatgcaaacatcagtgggaattgtacccacacaagcaattgcaacaggccccactgcagatcctgaaaaacgcaaactgatacagcagcagctggttctactgcttcatgctcataagtgtcagagacgagagcaagcaaacggagaggttcgggcctgctcgctcccgcattgtcgaaccatgaaaaacgttttgaatcacatgacgcattgtcaggctgggaaagcctgccaagttgcccattgtgcatcttcacgacaaatcatctctcattggaagaactgcacacgacatgactgtcctgtttgcctccctttgaaaaatgccagtgacaagcgaaaccaacaaaccatcctggggtctccagctagtggaattcaaaacacaattggttctgttggcacagggcaacagaatgccacttctttaagtaacccaaatcccatagaccccagctccatgcagcgagcctatgctgctctcggactcccctacatgaaccagccccagacgcagctgcagcctcaggttcctggccagcaaccagcacagcctcaaacccaccagcagatgaggactctcaaccccctgggaaataatccaatgaacattccagcaggaggaataacaacagatcagcagcccccaaacttgatttcagaatcagctcttccgacttccctgggggccacaaacccactgatgaacgatggctccaactctggtaacattggaaccctcagcactataccaacagcagctcctccttctagcaccggtgtaaggaaaggctggcacgaacatgtcactcaggacctgcggagccatctagtgcataaactcgtccaagccatcttcccaacacctgatcccgcagctctaaaggatcgccgcatggaaaacctggtagcctatgctaagaaagtggaaggggacatgtacgagtctgccaacagcagggatgaatattatcacttattagcagagaaaatctacaagatacaaaaagaactagaagaaaaacggaggtcgcgtttacataaacaaggcatcttggggaaccagccagccttaccagccccgggggctcagccccctgtgattccacaggcacaacctgtgagacctccaaatggacccctgtccctgccagtgaatcgcatgcaagtttctcaagggatgaattcatttaaccccatgtccttggggaacgtccagttgccacaagcacccatgggacctcgtgcagcctccccaatgaaccactctgtccagatgaacagcatgggctcagtgccagggatggccatttctccttcccgaatgcctcagcctccgaacatgatgggtgcacacaccaacaacatgatggcccaggcgcccgctcagagccagtttctgccacagaaccagttcccgtcatccagcggggcgatgagtgtgggcatggggcagccgccagcccaaacaggcgtgtcacagggacaggtgcctggtgctgctcttcctaaccctctcaacatgctggggcctcaggccagccagctaccttgccctccagtgacacagtcaccactgcacccaacaccgcctcctgcttccacggctgctggcatgccatctctccagcacacgacaccacctgggatgactcctccccagccagcagctcccactcagccatcaactcctgtgtcgtcttccgggcagactcccaccccgactcctggctcagtgcccagtgctacccaaacccagagcacccctacagtccaggcagcagcccaggcccaggtgaccccgcagcctcaaaccccagttcagcccccgtctgtggctacccctcagtcatcgcagcaacagccgacgcctgtgcacgcccagcctcctggcacaccgctttcccaggcagcagccagcattgataacagagtccctaccccctcctcggtggccagcgcagaaaccaattcccagcagccaggacctgacgtacctgtgctggaaatgaagacggagacccaagcagaggacactgagcccgatcctggtgaatccaaaggggagcccaggtctgagatgatggaggaggatttgcaaggagcttcccaagttaaagaagaaacagacatagcagagcagaaatcagaaccaatggaagtggatgaaaagaaacctgaagtgaaagtagaagttaaagaggaagaagagagtagcagtaacggcacagcctctcagtcaacatctccttcgcagccgcgcaaaaaaatctttaaaccagaggagttacgccaggccctcatgccaaccctagaagcactgtatcgacaggacccagagtcattacctttccggcagcctgtagatccccagctcctcggaattccagactattttgacatcgtaaagaatcccatggacctctccaccatcaagcggaagctggacacagggcaataccaagagccctggcagtacgtggacgacgtctggctcatgttcaacaatgcctggctctataatcgcaagacatcccgagtctataagttttgcagtaagcttgcagaggtctttgagcaggaaattgaccctgtcatgcagtcccttggatattgctgtggacgcaagtatgagttttccccacagactttgtgctgctatgggaagcagctgtgtaccattcctcgcgatgctgcctactacagctatcagaataggtatcatttctgtgagaagtgtttcacagagatccagggcgagaatgtgaccctgggtgacgacccttcacagccccagacgacaatttcaaaggatcagtttgaaaagaagaaaaatgataccttagaccccgaacctttcgttgattgcaaggagtgtggccggaagatgcatcagatttgcgttctgcactatgacatcatttggccttcaggttttgtgtgcgacaactgcttgaagaaaactggcagacctcgaaaagaaaacaaattcagtgctaagaggctgcagaccacaagactgggaaaccacttggaagaccgagtgaacaaatttttgcggcgccagaatcaccctgaagccggggaggtttttgtccgagtggtggccagctcagacaagacggtggaggtcaagcccgggatgaagtcacggtttgtggattctggggaaatgtctgaatctttcccatatcgaaccaaagctctgtttgcttttgaggaaattgacggcgtggatgtctgcttttttggaatgcacgtccaagaatacggctctgattgcccccctccaaacacgaggcgtgtgtacatttcttatctggatagtattcatttcttccggccacgttgcctccgcacagccgtttaccatgagatccttattggatatttagagtatgtgaagaaattagggtatgtgacagggcacatctgggcctgtcctccaagtgaaggagatgattacatcttccattgccacccacctgatcaaaaaatacccaagccaaaacgactgcaggagtggtacaaaaagatgctggacaaggcgtttgcagagcggatcatccatgactacaaggatattttcaaacaagcaactgaagacaggctcaccagtgccaaggaactgccctattttgaaggtgatttctggcccaatgtgttagaagagagcattaaggaactagaacaagaagaagaggagaggaaaaaggaagagagcactgcagccagtgaaaccactgagggcagtcagggcgacagcaagaatgccaagaagaagaacaacaagaaaaccaacaagaacaaaagcagcatcagccgcgccaacaagaagaagcccagcatgcccaacgtgtccaatgacctgtcccagaagctgtatgccaccatggagaagcacaaggaggtcttcttcgtgatccacctgcacgctgggcctgtcatcaacaccctgccccccatcgtcgaccccgaccccctgctcagctgtgacctcatggatgggcgcgacgccttcctcaccctcgccagagacaagcactgggagttctcctccttgcgccgctccaagtggtccacgctctgcatgctggtggagctgcacacccagggccaggaccgctttgtctacacctgcaacgagtgcaagcaccacgtggagacgcgctggcactgcactgtgtgcgaggactacgacctctgcatcaactgctataacacgaagagccatgcccataagatggtgaagtgggggctgggcctggatgacgagggcagcagccagggcgagccacagtcaaagagcccccaggagtcacgccggctgagcatccagcgctgcatccagtcgctggtgcacgcgtgccagtgccgcaacgccaactgctcgctgccatcctgccagaagatgaagcgggtggtgcagcacaccaagggctgcaaacgcaagaccaacgggggctgcccggtgtgcaagcagctcatcgccctctgctgctaccacgccaagcactgccaagaaaacaaatgccccgtgcccttctgcctcaacatcaaacacaagctccgccagcagcagatccagcaccgcctgcagcaggcccagctcatgcgccggcggatggccaccatgaacacccgcaacgtgcctcagcagagtctgccttctcctacctcagcaccgcccgggacccccacacagcagcccagcacaccccagacgccgcagccccctgcccagccccaaccctcacccgtgagcatgtcaccagctggcttccccagcgtggcccggactcagccccccaccacggtgtccacagggaagcctaccagccaggtgccggcccccccacccccggcccagccccctcctgcagcggtggaagcggctcggcagatcgagcgtgaggcccagcagcagcagcacctgtaccgggtgaacatcaacaacagcatgcccccaggacgcacgggcatggggaccccggggagccagatggcccccgtgagcctgaatgtgccccgacccaaccaggtgagcgggcccgtcatgcccagcatgcctcccgggcagtggcagcaggcgccccttccccagcagcagcccatgccaggcttgcccaggcctgtgatatccatgcaggcccaggcggccgtggctgggccccggatgcccagcgtgcagccacccaggagcatctcacccagcgctctgcaagacctgctgcggaccctgaagtcgcccagctcccctcagcagcaacagcaggtgctgaacattctcaaatcaaacccgcagctaatggcagctttcatcaaacagcgcacagccaagtacgtggccaatcagcccggcatgcagccccagcctggcctccagtcccagcccggcatgcaaccccagcctggcatgcaccagcagcccagcctgcagaacctgaatgccatgcaggctggcgtgccgcggcccggtgtgcctccacagcagcaggcgatgggaggcctgaacccccagggccaggccttgaacatcatgaacccaggacacaaccccaacatggcgagtatgaatccacagtaccgagaaatgttacggaggcagctgctgcagcagcagcagcaacagcagcagcaacaacagcagcaacagcagcagcagcaagggagtgccggcatggctgggggcatggcggggcacggccagttccagcagcctcaaggacccggaggctacccaccggccatgcagcagcagcagcgcatgcagcagcatctccccctccagggcagctccatgggccagatggcggctcagatgggacagcttggccagatggggcagccggggctgggggcagacagcacccccaacatccagcaagccctgcagcagcggattctgcagcaacagcagatgaagcagcagattgggtccccaggccagccgaaccccatgagcccccagcaacacatgctctcaggacagccacaggcctcgcatctccctggccagcagatcgccacgtcccttagtaaccaggtgcggtctccagcccctgtccagtctccacggccccagtcccagcctccacattccagcccgtcaccacggatacagccccagccttcgccacaccacgtctcaccccagactggttccccccaccccggactcgcagtcaccatggccagctccatagatcagggacacttggggaaccccgaacagagtgcaatgctcccccagctgaacacccccagcaggagtgcgctgtccagcgaactgtccctggtcggggacaccacgggggacacgctagagaagtttgtggagggcttgtagcattgtgagagcatcaccttttccctttcatgttcttggaccttttgtactgaaaatccaggcatctaggttctttttattcctagatggaactgcgacttccgagccatggaagggtggattgatgtttaaagaaacaatacaaagaatatatttttttgttaaaaaccagttgatttaaatatctggtctctctctttggtttttttttggcgggggggtggggggggttcttttttttccgttttgtttttgtttggggggaggggggttttgtttggattctttttgtcgtcattgctggtgactcatgcctttttttaacgggaaaaacaagttcattatattcatattttttatttgtattttcaagactttaaacatttatgtttaaaagtaagaagaaaaataatattcagaactgattcctgaaataatgcaagcttataatgtatcccgataactttgtgatgtttcgggaagatttttttctatagtgaactctgtgggcgtctcccagtattaccctggatgataggaattgactccggcgtgcacacacgtacacacccacacacatctatctatacataatggctgaagccaaacttgtcttgcagatgtagaaattgttgctttgtttctctgataaaactggttttagacaaaaaatagggatgatcactcttagaccatgctaatgttactagagaagaagccttcttttctttcttctatgtgaaacttgaaatgaggaaaagcaattctagtgtaaatcatgcaagcgctctaattcctataaatacgaaactcgagaagattcaatcactgtatagaatggtaaaataccaactcatttcttatatcatattgttaaataaactgtgtgcaacagacaaaaagggtggtccttcttgaattcatgtacatggtattaacacttagtgttcggggttttttgttatgaaaatgctgttttcaacattgtatttggactatgcatgtgttttttccccattgtatataaagtaccgcttaaaattgatataaattactgaggttttta

SEQ ID NO: 439525 - DNA, 10996 bp, Homo sapiens
gaggccaatgccaagattagaacccacatttgagatcgatgaagaagaggaggaagaggatgaaaatgaacttttccctagagaatacttccgtcgtttgtcttcgcaggatgtactcaggtgtcagtcctcttctaagaggaagtctaaagatgaagaagaagatgaagagtcagatgatgctgatgattttggatcattgtttgacttggaaaatgatcttcctgatgagctgatacccaatggaggagaattaggccttttaaacagtgggaaccttgttccagatgctgcttccaaacataaacaactgtcggagcttctacgaggaggcagcggctctagtatcaacccaggaataggaaatgtgagcgccagcagccccgtgcagcagggcctgggtggccaggctcaagggcagccgaacagtgctaacatggccagcctcagtgccatgggcaagagccctctgagccagggagattcttcagcccccagcctgcctaaacaggcagccagcacctctgggcccacccccgctgcctcccaagcactgaatccgcaagcacaaaagcaagtggggctggcgactagcagccctgccacgtcacagactggacctggtatctgcatgaatgctaactttaaccagacccacccaggcctcctcaatagtaactctggccatagcttaattaatcaggcttcacaagggcaggcgcaagtcatgaatggatctcttggggctgctggcagaggaaggggagctggaatgccgtaccctactccagccatgcagggcgcctcgagcagcgtgctggctgagaccctaacgcaggtttccccgcaaatgactggtcacgcgggactgaacaccgcacaggcaggaggcatggccaagatgggaataactgggaacacaagtccatttggacagccctttagtcaagctggagggcagccaatgggagccactggagtgaacccccagttagccagcaaacagagcatggtcaacagtttgcccaccttccctacagatatcaagaatacttcagtcaccaacgtgccaaatatgtctcagatgcaaacatcagtgggaattgtacccacacaagcaattgcaacaggccccactgcagatcctgaaaaacgcaaactgatacagcagcagctggttctactgcttcatgctcataagtgtcagagacgagagcaagcaaacggagaggttcgggcctgctcgctcccgcattgtcgaaccatgaaaaacgttttgaatcacatgacgcattgtcaggctgggaaagcctgccaagttgcccattgtgcatcttcacgacaaatcatctctcattggaagaactgcacacgacatgactgtcctgtttgcctccctttgaaaaatgccagtgacaagcgaaaccaacaaaccatcctggggtctccagctagtggaattcaaaacacaattggttctgttggcacagggcaacagaatgccacttctttaagtaacccaaatcccatagaccccagctccatgcagcgagcctatgctgctctcggactcccctacatgaaccagccccagacgcagctgcagcctcaggttcctggccagcaaccagcacagcctcaaacccaccagcagatgaggactctcaaccccctgggaaataatccaatgaacattccagcaggaggaataacaacagatcagcagcccccaaacttgatttcagaatcagctcttccgacttccctgggggccacaaacccactgatgaacgatggctccaactctggtaacattggaaccctcagcactataccaacagcagctcctccttctagcaccggtgtaaggaaaggctggcacgaacatgtcactcaggacctgcggagccatctagtgcataaactcgtccaagccatcttcccaacacctgatcccgcagctctaaaggatcgccgcatggaaaacctggtagcctatgctaagaaagtggaaggggacatgtacgagtctgccaacagcagggatgaatattatcacttattagcagagaaaatctacaagatacaaaaagaactagaagaaaaacggaggtcgcgtttacataaacaaggcatcttggggaaccagccagccttaccagccccgggggctcagccccctgtgattccacaggcacaacctgtgagacctccaaatggacccctgtccctgccagtgaatcgcatgcaagtttctcaagggatgaattcatttaaccccatgtccttggggaacgtccagttgccacaagcacccatgggacctcgtgcagcctccccaatgaaccactctgtccagatgaacagcatgggctcagtgccagggatggccatttctccttcccgaatgcctcagcctccgaacatgatgggtgcacacaccaacaacatgatggcccaggcgcccgctcagagccagtttctgccacagaaccagttcccgtcatccagcggggcgatgagtgtgggcatggggcagccgccagcccaaacaggcgtgtcacagggacaggtgcctggtgctgctcttcctaaccctctcaacatgctggggcctcaggccagccagctaccttgccctccagtgacacagtcaccactgcacccaacaccgcctcctgcttccacggctgctggcatgccatctctccagcacacgacaccacctgggatgactcctccccagccagcagctcccactcagccatcaactcctgtgtcgtcttccgggcagactcccaccccgactcctggctcagtgcccagtgctacccaaacccagagcacccctacagtccaggcagcagcccaggcccaggtgaccccgcagcctcaaaccccagttcagcccccgtctgtggctacccctcagtcatcgcagcaacagccgacgcctgtgcacgcccagcctcctggcacaccgctttcccaggcagcagccagcattgataacagagtccctaccccctcctcggtggccagcgcagaaaccaattcccagcagccaggacctgacgtacctgtgctggaaatgaagacggagacccaagcagaggacactgagcccgatcctggtgaatccaaaggggagcccaggtctgagatgatggaggaggatttgcaaggagcttcccaagttaaagaagaaacagacatagcagagcagaaatcagaaccaatggaagtggatgaaaagaaacctgaagtgaaagtagaagttaaagaggaagaagagagtagcagtaacggcacagcctctcagtcaacatctccttcgcagccgcgcaaaaaaatctttaaaccagaggagttacgccaggccctcatgccaaccctagaagcactgtatcgacaggacccagagtcattacctttccggcagcctgtagatccccagctcctcggaattccagactattttgacatcgtaaagaatcccatggacctctccaccatcaagcggaagctggacacagggcaataccaagagccctggcagtacgtggacgacgtctggctcatgttcaacaatgcctggctctataatcgcaagacatcccgagtctataagttttgcagtaagcttgcagaggtctttgagcaggaaattgaccctgtcatgcagtcccttggatattgctgtggacgcaagtatgagttttccccacagactttgtgctgctatgggaagcagctgtgtaccattcctcgcgatgctgcctactacagctatcagaataggtatcatttctgtgagaagtgtttcacagagatccagggcgagaatgtgaccctgggtgacgacccttcacagccccagacgacaatttcaaaggatcagtttgaaaagaagaaaaatgataccttagaccccgaacctttcgttgattgcaaggagtgtggccggaagatgcatcagatttgcgttctgcactatgacatcatttggccttcaggttttgtgtgcgacaactgcttgaagaaaactggcagacctcgaaaagaaaacaaattcagtgctaagaggctgcagaccacaagactgggaaaccacttggaagaccgagtgaacaaatttttgcggcgccagaatcaccctgaagccggggaggtttttgtccgagtggtggccagctcagacaagacggtggaggtcaagcccgggatgaagtcacggtttgtggattctggggaaatgtctgaatctttcccatatcgaaccaaagctctgtttgcttttgaggaaattgacggcgtggatgtctgcttttttggaatgcacgtccaagaatacggctctgattgcccccctccaaacacgaggtagttttccagctccttccagggcgtgtcattcagtgagccgtgttaggatagaccagggctcttaagtgtcccagaggagcctgtgagccttcataggggattaaagtaaatgaaaccacaattaactaaccaaagtagttagttttgttttccattaaactagcgggaaatgaactgttgagatgactgcagtgagcgtgttttgtgtggcgagtctgtgtgggaccccgctcttacctaacgcaggtaaacctggggagttgggattgggacagcctggcacctgaaccagaggaagtaagctctgccacgagggcttcatgtgcagtcaggaatctgggcaagaaggaactaaaagtggcttttctcagtttgccttaactgtggctctctgtgccgagtggtgccattcatccttttgttcagtgacgaaaactgaattccatttaactgattggcagcagggttggtgactggttggtttttgggttttggtttgtttgtttgtttatcacatcctgtttggtggccagtgtaaataccatcaaaagaaaaactggccaatcacagcactgtgggaggccgaggtgggaggataactggaccacaggagtctgagacaagtctgaacaacaaagtgagaccctagctctacaaaaaataaattatctgggcatgatggtacatgccttgtcatcctaactatgtgggagtctgaggcaggaggattgcttgagcccatgaggttgaggttgcagtgagctgtgaccgcgtcaccgcattgcagcctgaatgacagagcaagaccctgtctaaaaagtaaacttccagggtgttgtttgttgcttgtgtttgatttcagatttgagggataccctgagttaaacatgtgcctccttcccacaggcgtgtgtacatttcttatctggatagtattcatttcttccggccacgttgcctccgcacagccgtttaccatgagatccttattggatatttagagtatgtgaagaaattagggtatgtgacagggcacatctgggcctgtcctccaagtgaaggagatgattacatcttccattgccacccacctgatcaaaaaatacccaagccaaaacgactgcaggagtggtacaaaaagatgctggacaaggcgtttgcagagcggatcatccatgactacaaggatattttcaaacaagcaactgaagacaggctcaccagtgccaaggaactgccctattttgaaggtgatttctggcccaatgtgttagaagagagcattaaggaactagaacaagaagaagaggagaggaaaaaggaagagagcactgcagccagtgaaaccactgagggcagtcagggcgacagcaagaatgccaagaagaagaacaacaagaaaaccaacaagaacaaaagcagcatcagccgcgccaacaagaagaagcccagcatgcccaacgtgtccaatgacctgtcccagaagctgtatgccaccatggagaagcacaaggaggtcttcttcgtgatccacctgcacgctgggcctgtcatcaacaccctgccccccatcgtcgaccccgaccccctgctcagctgtgacctcatggatgggcgcgacgccttcctcaccctcgccagagacaagcactgggagttctcctccttgcgccgctccaagtggtccacgctctgcatgctggtggagctgcacacccagggccaggaccgctttgtctacacctgcaacgagtgcaagcaccacgtggagacgcgctggcactgcactgtgtgcgaggactacgacctctgcatcaactgctataacacgaagagccatgcccataagatggtgaagtgggggctgggcctggatgacgagggcagcagccagggcgagccacagtcaaagagcccccaggagtcacgccggctgagcatccagcgctgcatccagtcgctggtgcacgcgtgccagtgccgcaacgccaactgctcgctgccatcctgccagaagatgaagcgggtggtgcagcacaccaagggctgcaaacgcaagaccaacgggggctgcccggtgtgcaagcagctcatcgccctctgctgctaccacgccaagcactgccaagaaaacaaatgccccgtgcccttctgcctcaacatcaaacacaagctccgccagcagcagatccagcaccgcctgcagcaggcccagctcatgcgccggcggatggccaccatgaacacccgcaacgtgcctcagcagagtctgccttctcctacctcagcaccgcccgggacccccacacagcagcccagcacaccccagacgccgcagccccctgcccagccccaaccctcacccgtgagcatgtcaccagctggcttccccagcgtggcccggactcagccccccaccacggtgtccacagggaagcctaccagccaggtgccggcccccccacccccggcccagccccctcctgcagcggtggaagcggctcggcagatcgagcgtgaggcccagcagcagcagcacctgtaccgggtgaacatcaacaacagcatgcccccaggacgcacgggcatggggaccccggggagccagatggcccccgtgagcctgaatgtgccccgacccaaccaggtgagcgggcccgtcatgcccagcatgcctcccgggcagtggcagcaggcgccccttccccagcagcagcccatgccaggcttgcccaggcctgtgatatccatgcaggcccaggcggccgtggctgggccccggatgcccagcgtgcagccacccaggagcatctcacccagcgctctgcaagacctgctgcggaccctgaagtcgcccagctcccctcagcagcaacagcaggtgctgaacattctcaaatcaaacccgcagctaatggcagctttcatcaaacagcgcacagccaagtacgtggccaatcagcccggcatgcagccccagcctggcctccagtcccagcccggcatgcaaccccagcctggcatgcaccagcagcccagcctgcagaacctgaatgccatgcaggctggcgtgccgcggcccggtgtgcctccacagcagcaggcgatgggaggcctgaacccccagggccaggccttgaacatcatgaacccaggacacaaccccaacatggcgagtatgaatccacagtaccgagaaatgttacggaggcagctgctgcagcagcagcagcaacagcagcagcaacaacagcagcaacagcagcagcagcaagggagtgccggcatggctgggggcatggcggggcacggccagttccagcagcctcaaggacccggaggctacccaccggccatgcagcagcagcagcgcatgcagcagcatctccccctccagggcagctccatgggccagatggcggctcagatgggacagcttggccagatggggcagccggggctgggggcagacagcacccccaacatccagcaagccctgcagcagcggattctgcagcaacagcagatgaagcagcagattgggtccccaggccagccgaaccccatgagcccccagcaacacatgctctcaggacagccacaggcctcgcatctccctggccagcagatcgccacgtcccttagtaaccaggtgcggtctccagcccctgtccagtctccacggccccagtcccagcctccacattccagcccgtcaccacggatacagccccagccttcgccacaccacgtctcaccccagactggttccccccaccccggactcgcagtcaccatggccagctccatagatcagggacacttggggaaccccgaacagagtgcaatgctcccccagctgaacacccccagcaggagtgcgctgtccagcgaactgtccctggtcggggacaccacgggggacacgctagagaagtttgtggagggcttgtagcattgtgagagcatcaccttttccctttcatgttcttggaccttttgtactgaaaatccaggcatctaggttctttttattcctagatggaactgcgacttccgagccatggaagggtggattgatgtttaaagaaacaatacaaagaatatatttttttgttaaaaaccagttgatttaaatatctggtctctctctttggtttttttttggcgggggggtggggggggttcttttttttccgttttgtttttgtttggggggaggggggttttgtttggattctttttgtcgtcattgctggtgactcatgcctttttttaacgggaaaaacaagttcattatattcatattttttatttgtattttcaagactttaaacatttatgtttaaaagtaagaagaaaaataatattcagaactgattcctgaaataatgcaagcttataatgtatcccgataactttgtgatgtttcgggaagatttttttctatagtgaactctgtgggcgtctcccagtattaccctggatgataggaattgactccggcgtgcacacacgtacacacccacacacatctatctatacataatggctgaagccaaacttgtcttgcagatgtagaaattgttgctttgtttctctgataaaactggttttagacaaaaaatagggatgatcactcttagaccatgctaatgttactagagaagaagccttcttttctttcttctatgtgaaacttgaaatgaggaaaagcaattctagtgtaaatcatgcaagcgctctaattcctataaatacgaaactcgagaagattcaatcactgtatagaatggtaaaataccaactcatttcttatatcatattgttaaataaactgtgtgcaacagacaaaaagggtggtccttcttgaattcatgtacatggtattaacacttagtgttcggggttttttgttatgaaaatgctgttttcaacattgtatttggactatgcatgtgttttttccccattgtatataaagtaccgcttaaaattgatataaattactgaggtttttaacatgtattctgttctttaagatccctgtaagaatgtttaaggtttttatttatttatatatattttttgagtctgttctttgtaagacatggttctggttgttcgctcatagcggagaggctggggctgcggttgtggttgtggcggcgtgggtggtggctgggaactgtggcccaggcttagcggccgcccggaggcttttcttcccggagactgaggtgggcggctcagcgttggccccacacattcgaggctcacaggtgattgtcgctcacacagttagggtcgtcagttggtctgaaactgcatttggcccactcctccatcctccctgtccgtcgtagctgccacccccagaggcggcgcttcttcccgtgttcaggcggctccccccccccgtacacgactcccagaatctgaggcagagagtgctccaggctcgcgaggtgctttctgacttccccccaaatcctgccgctgccgcgcagcatgtcccgtgtggcgtttgaggaaatgctgagggacagacaccttggagcaccagctccggtccctgttacagtgagaaaggtcccccacttcgggggatacttgcacttagccacatggtcctgcctcccttggagtccagttccaggctcccttactgagtgggtgagacaagttcacaaaaaccgtaaaactgagaggaggaccatgggcaggggagctgaagttcatcccctaagtctaccacccccagcacccagagaacccactttatccctagtcccccaacaaaggctggtctaggtgggggtgatggtaattttagaaatcacgccccaaatagcttccgtttgggcccttacattcacagataggttttaaatagctgaatacttggtttgggaatctgaattcgaggaacctttctaagaaattggaaaggtccgatctagttttagcacagagctttgaaccttgagttataaaatgcagaataattcaagtaaaaataagaccaccatctggcacccctgaccagcccccattcaccccatcccaggaggggaagcacaggccgggcctccgggtggagattgctgccactgctcggcctgctgggttcttaacctccagtgtcctcttcatcttttccacccgtagggaaaccttgagccatgtgttcaaacaagaagtggggctagagcccgagagcagcagctctaagcccacactcagaaagtggcgccctcctggttgtgcagccttttaatgtgggcagtggaggggcctctgtttcaggttatcctggaattcaaaacgttatgtaccaacctcatcctctttggagtctgcatcctgtgcaaccgtcttgggcaatccagatgtcgaaggatgtgaccgagagcatggtctgtggatgctaaccctaagtttgtcgtaaggaaatttctgtaagaaacctggaaagccccaacgctgtgtctcatgctgtatacttaagaggagaagaaaaagtcctatatttgtgatcaaaaagaggaaacttgaaatgtgatggtgtttataataaaagatggtaaaactacttggattcaaaaat

SEQ ID NO: 439526 - DNA, 9850 bp, Homo sapiens
gaggccaatgccaagattagaacccacatttgagatcgatgaagaagaggaggaagaggatgaaaatgaacttttccctagagaatacttccgtcgtttgtcttcgcaggatgtactcaggtgtcagtcctcttctaagaggaagtctaaagatgaagaagaagatgaagagtcagatgatgctgatgattttggatcattgtttgacttggaaaatgatcttcctgatgagctgatacccaatggaggagaattaggccttttaaacagtgggaaccttgttccagatgctgcttccaaacataaacaactgtcggagcttctacgaggaggcagcggctctagtatcaacccaggaataggaaatgtgagcgccagcagccccgtgcagcagggcctgggtggccaggctcaagggcagccgaacagtgctaacatggccagcctcagtgccatgggcaagagccctctgagccagggagattcttcagcccccagcctgcctaaacaggcagccagcacctctgggcccacccccgctgcctcccaagcactgaatccgcaagcacaaaagcaagtggggctggcgactagcagccctgccacgtcacagactggacctggtatctgcatgaatgctaactttaaccagacccacccaggcctcctcaatagtaactctggccatagcttaattaatcaggcttcacaagggcaggcgcaagtcatgaatggatctcttggggctgctggcagaggaaggggagctggaatgccgtaccctactccagccatgcagggcgcctcgagcagcgtgctggctgagaccctaacgcaggtttccccgcaaatgactggtcacgcgggactgaacaccgcacaggcaggaggcatggccaagatgggaataactgggaacacaagtccatttggacagccctttagtcaagctggagggcagccaatgggagccactggagtgaacccccagttagccagcaaacagagcatggtcaacagtttgcccaccttccctacagatatcaagaatacttcagtcaccaacgtgccaaatatgtctcagatgcaaacatcagtgggaattgtacccacacaagcaattgcaacaggccccactgcagatcctgaaaaacgcaaactgatacagcagcagctggttctactgcttcatgctcataagtgtcagagacgagagcaagcaaacggagaggttcgggcctgctcgctcccgcattgtcgaaccatgaaaaacgttttgaatcacatgacgcattgtcaggctgggaaagcctgccaagttgcccattgtgcatcttcacgacaaatcatctctcattggaagaactgcacacgacatgactgtcctgtttgcctccctttgaaaaatgccagtgacaagcgaaaccaacaaaccatcctggggtctccagctagtggaattcaaaacacaattggttctgttggcacagggcaacagaatgccacttctttaagtaacccaaatcccatagaccccagctccatgcagcgagcctatgctgctctcggactcccctacatgaaccagccccagacgcagctgcagcctcaggttcctggccagcaaccagcacagcctcaaacccaccagcagatgaggactctcaaccccctgggaaataatccaatgaacattccagcaggaggaataacaacagatcagcagcccccaaacttgatttcagaatcagctcttccgacttccctgggggccacaaacccactgatgaacgatggctccaactctggtaacattggaaccctcagcactataccaacagcagctcctccttctagcaccggtgtaaggaaaggctggcacgaacatgtcactcaggacctgcggagccatctagtgcataaactcgtccaagccatcttcccaacacctgatcccgcagctctaaaggatcgccgcatggaaaacctggtagcctatgctaagaaagtggaaggggacatgtacgagtctgccaacagcagggatgaatattatcacttattagcagagaaaatctacaagatacaaaaagaactagaagaaaaacggaggtcgcgtttacataaacaaggcatcttggggaaccagccagccttaccagccccgggggctcagccccctgtgattccacaggcacaacctgtgagacctccaaatggacccctgtccctgccagtgaatcgcatgcaagtttctcaagggatgaattcatttaaccccatgtccttggggaacgtccagttgccacaagcacccatgggacctcgtgcagcctccccaatgaaccactctgtccagatgaacagcatgggctcagtgccagggatggccatttctccttcccgaatgcctcagcctccgaacatgatgggtgcacacaccaacaacatgatggcccaggcgcccgctcagagccagtttctgccacagaaccagttcccgtcatccagcggggcgatgagtgtgggcatggggcagccgccagcccaaacaggcgtgtcacagggacaggtgcctggtgctgctcttcctaaccctctcaacatgctggggcctcaggccagccagctaccttgccctccagtgacacagtcaccactgcacccaacaccgcctcctgcttccacggctgctggcatgccatctctccagcacacgacaccacctgggatgactcctccccagccagcagctcccactcagccatcaactcctgtgtcgtcttccgggcagactcccaccccgactcctggctcagtgcccagtgctacccaaacccagagcacccctacagtccaggcagcagcccaggcccaggtgaccccgcagcctcaaaccccagttcagcccccgtctgtggctacccctcagtcatcgcagcaacagccgacgcctgtgcacgcccagcctcctggcacaccgctttcccaggcagcagccagcattgataacagagtccctaccccctcctcggtggccagcgcagaaaccaattcccagcagccaggacctgacgtacctgtgctggaaatgaagacggagacccaagcagaggacactgagcccgatcctggtgaatccaaaggggagcccaggtctgagatgatggaggaggatttgcaaggagcttcccaagttaaagaagaaacagacatagcagagcagaaatcagaaccaatggaagtggatgaaaagaaacctgaagtgaaagtagaagttaaagaggaagaagagagtagcagtaacggcacagcctctcagtcaacatctccttcgcagccgcgcaaaaaaatctttaaaccagaggagttacgccaggccctcatgccaaccctagaagcactgtatcgacaggacccagagtcattacctttccggcagcctgtagatccccagctcctcggaattccagactattttgacatcgtaaagaatcccatggacctctccaccatcaagcggaagctggacacagggcaataccaagagccctggcagtacgtggacgacgtctggctcatgttcaacaatgcctggctctataatcgcaagacatcccgagtctataagttttgcagtaagctgacaatttcaaaggatcagtttgaaaagaagaaaaatgataccttagaccccgaacctttcgttgattgcaaggagtgtggccggaagatgcatcagatttgcgttctgcactatgacatcatttggccttcaggttttgtgtgcgacaactgcttgaagaaaactggcagacctcgaaaagaaaacaaattcagtgctaagaggctgcagaccacaagactgggaaaccacttggaagaccgagtgaacaaatttttgcggcgccagaatcaccctgaagccggggaggtttttgtccgagtggtggccagctcagacaagacggtggaggtcaagcccgggatgaagtcacggtttgtggattctggggaaatgtctgaatctttcccatatcgaaccaaagctctgtttgcttttgaggaaattgacggcgtggatgtctgcttttttggaatgcacgtccaagaatacggctctgattgcccccctccaaacacgaggcgtgtgtacatttcttatctggatagtattcatttcttccggccacgttgcctccgcacagccgtttaccatgagatccttattggatatttagagtatgtgaagaaattagggtatgtgacagggcacatctgggcctgtcctccaagtgaaggagatgattacatcttccattgccacccacctgatcaaaaaatacccaagccaaaacgactgcaggagtggtacaaaaagatgctggacaaggcgtttgcagagcggatcatccatgactacaaggatattttcaaacaagcaactgaagacaggctcaccagtgccaaggaactgccctattttgaaggtgatttctggcccaatgtgttagaagagagcattaaggaactagaacaagaagaagaggagaggaaaaaggaagagagcactgcagccagtgaaaccactgagggcagtcagggcgacagcaagaatgccaagaagaagaacaacaagaaaaccaacaagaacaaaagcagcatcagccgcgccaacaagaagaagcccagcatgcccaacgtgtccaatgacctgtcccagaagctgtatgccaccatggagaagcacaaggaggtcttcttcgtgatccacctgcacgctgggcctgtcatcaacaccctgccccccatcgtcgaccccgaccccctgctcagctgtgacctcatggatgggcgcgacgccttcctcaccctcgccagagacaagcactgggagttctcctccttgcgccgctccaagtggtccacgctctgcatgctggtggagctgcacacccagggccaggaccgctttgtctacacctgcaacgagtgcaagcaccacgtggagacgcgctggcactgcactgtgtgcgaggactacgacctctgcatcaactgctataacacgaagagccatgcccataagatggtgaagtgggggctgggcctggatgacgagggcagcagccagggcgagccacagtcaaagagcccccaggagtcacgccggctgagcatccagcgctgcatccagtcgctggtgcacgcgtgccagtgccgcaacgccaactgctcgctgccatcctgccagaagatgaagcgggtggtgcagcacaccaagggctgcaaacgcaagaccaacgggggctgcccggtgtgcaagcagctcatcgccctctgctgctaccacgccaagcactgccaagaaaacaaatgccccgtgcccttctgcctcaacatcaaacacaagctccgccagcagcagatccagcaccgcctgcagcaggcccagctcatgcgccggcggatggccaccatgaacacccgcaacgtgcctcagcagagtctgccttctcctacctcagcaccgcccgggacccccacacagcagcccagcacaccccagacgccgcagccccctgcccagccccaaccctcacccgtgagcatgtcaccagctggcttccccagcgtggcccggactcagccccccaccacggtgtccacagggaagcctaccagccaggtgccggcccccccacccccggcccagccccctcctgcagcggtggaagcggctcggcagatcgagcgtgaggcccagcagcagcagcacctgtaccgggtgaacatcaacaacagcatgcccccaggacgcacgggcatggggaccccggggagccagatggcccccgtgagcctgaatgtgccccgacccaaccaggtgagcgggcccgtcatgcccagcatgcctcccgggcagtggcagcaggcgccccttccccagcagcagcccatgccaggcttgcccaggcctgtgatatccatgcaggcccaggcggccgtggctgggccccggatgcccagcgtgcagccacccaggagcatctcacccagcgctctgcaagacctgctgcggaccctgaagtcgcccagctcccctcagcagcaacagcaggtgctgaacattctcaaatcaaacccgcagctaatggcagctttcatcaaacagcgcacagccaagtacgtggccaatcagcccggcatgcagccccagcctggcctccagtcccagcccggcatgcaaccccagcctggcatgcaccagcagcccagcctgcagaacctgaatgccatgcaggctggcgtgccgcggcccggtgtgcctccacagcagcaggcgatgggaggcctgaacccccagggccaggccttgaacatcatgaacccaggacacaaccccaacatggcgagtatgaatccacagtaccgagaaatgttacggaggcagctgctgcagcagcagcagcaacagcagcagcaacaacagcagcaacagcagcagcagcaagggagtgccggcatggctgggggcatggcggggcacggccagttccagcagcctcaaggacccggaggctacccaccggccatgcagcagcagcagcgcatgcagcagcatctccccctccagggcagctccatgggccagatggcggctcagatgggacagcttggccagatggggcagccggggctgggggcagacagcacccccaacatccagcaagccctgcagcagcggattctgcagcaacagcagatgaagcagcagattgggtccccaggccagccgaaccccatgagcccccagcaacacatgctctcaggacagccacaggcctcgcatctccctggccagcagatcgccacgtcccttagtaaccaggtgcggtctccagcccctgtccagtctccacggccccagtcccagcctccacattccagcccgtcaccacggatacagccccagccttcgccacaccacgtctcaccccagactggttccccccaccccggactcgcagtcaccatggccagctccatagatcagggacacttggggaaccccgaacagagtgcaatgctcccccagctgaacacccccagcaggagtgcgctgtccagcgaactgtccctggtcggggacaccacgggggacacgctagagaagtttgtggagggcttgtagcattgtgagagcatcaccttttccctttcatgttcttggaccttttgtactgaaaatccaggcatctaggttctttttattcctagatggaactgcgacttccgagccatggaagggtggattgatgtttaaagaaacaatacaaagaatatatttttttgttaaaaaccagttgatttaaatatctggtctctctctttggtttttttttggcgggggggtggggggggttcttttttttccgttttgtttttgtttggggggaggggggttttgtttggattctttttgtcgtcattgctggtgactcatgcctttttttaacgggaaaaacaagttcattatattcatattttttatttgtattttcaagactttaaacatttatgtttaaaagtaagaagaaaaataatattcagaactgattcctgaaataatgcaagcttataatgtatcccgataactttgtgatgtttcgggaagatttttttctatagtgaactctgtgggcgtctcccagtattaccctggatgataggaattgactccggcgtgcacacacgtacacacccacacacatctatctatacataatggctgaagccaaacttgtcttgcagatgtagaaattgttgctttgtttctctgataaaactggttttagacaaaaaatagggatgatcactcttagaccatgctaatgttactagagaagaagccttcttttctttcttctatgtgaaacttgaaatgaggaaaagcaattctagtgtaaatcatgcaagcgctctaattcctataaatacgaaactcgagaagattcaatcactgtatagaatggtaaaataccaactcatttcttatatcatattgttaaataaactgtgtgcaacagacaaaaagggtggtccttcttgaattcatgtacatggtattaacacttagtgttcggggttttttgttatgaaaatgctgttttcaacattgtatttggactatgcatgtgttttttccccattgtatataaagtaccgcttaaaattgatataaattactgaggtttttaacatgtattctgttctttaagatccctgtaagaatgtttaaggtttttatttatttatatatattttttgagtctgttctttgtaagacatggttctggttgttcgctcatagcggagaggctggggctgcggttgtggttgtggcggcgtgggtggtggctgggaactgtggcccaggcttagcggccgcccggaggcttttcttcccggagactgaggtgggcggctcagcgttggccccacacattcgaggctcacaggtgattgtcgctcacacagttagggtcgtcagttggtctgaaactgcatttggcccactcctccatcctccctgtccgtcgtagctgccacccccagaggcggcgcttcttcccgtgttcaggcggctccccccccccgtacacgactcccagaatctgaggcagagagtgctccaggctcgcgaggtgctttctgacttccccccaaatcctgccgctgccgcgcagcatgtcccgtgtggcgtttgaggaaatgctgagggacagacaccttggagcaccagctccggtccctgttacagtgagaaaggtcccccacttcgggggatacttgcacttagccacatggtcctgcctcccttggagtccagttccaggctcccttactgagtgggtgagacaagttcacaaaaaccgtaaaactgagaggaggaccatgggcaggggagctgaagttcatcccctaagtctaccacccccagcacccagagaacccactttatccctagtcccccaacaaaggctggtctaggtgggggtgatggtaattttagaaatcacgccccaaatagcttccgtttgggcccttacattcacagataggttttaaatagctgaatacttggtttgggaatctgaattcgaggaacctttctaagaaattggaaaggtccgatctagttttagcacagagctttgaaccttgagttataaaatgcagaataattcaagtaaaaataagaccaccatctggcacccctgaccagcccccattcaccccatcccaggaggggaagcacaggccgggcctccgggtggagattgctgccactgctcggcctgctgggttcttaacctccagtgtcctcttcatcttttccacccgtagggaaaccttgagccatgtgttcaaacaagaagtggggctagagcccgagagcagcagctctaagcccacactcagaaagtggcgccctcctggttgtgcagccttttaatgtgggcagtggaggggcctctgtttcaggttatcctggaattcaaaacgttatgtaccaacctcatcctctttggagtctgcatcctgtgcaaccgtcttgggcaatccagatgtcgaaggatgtgaccgagagcatggtctgtggatgctaaccctaagtttgtcgtaaggaaatttctgtaagaaacctggaaagccccaacgctgtgtctcatgctgtatacttaagaggagaagaaaaagtcctatatttgtgatcaaaaagaggaaacttgaaatgtgatggtgtttataataaaagatggtaaaactacttggattcaaaaat

SEQ ID NO: 439527 - DNA, 9374 bp, Homo sapiens
gaggccaatgccaagattagaacccacatttgagatcgatgaagaagaggaggaagaggatgaaaatgaacttttccctagagaatacttccgtcgtttgtcttcgcaggatgtactcaggtgtcagtcctcttctaagaggaagtctaaagatgaagaagaagatgaagagtcagatgatgctgatgatgggaataactgggaacacaagtccatttggacagccctttagtcaagctggagggcagccaatgggagccactggagtgaacccccagttagccagcaaacagagcatggtcaacagtttgcccaccttccctacagatatcaagaatacttcagtcaccaacgtgccaaatatgtctcagatgcaaacatcagtgggaattgtacccacacaagcaattgcaacaggccccactgcagatcctgaaaaacgcaaactgatacagcagcagctggttctactgcttcatgctcataagtgtcagagacgagagcaagcaaacggagaggttcgggcctgctcgctcccgcattgtcgaaccatgaaaaacgttttgaatcacatgacgcattgtcaggctgggaaagcctgccaagttgcccattgtgcatcttcacgacaaatcatctctcattggaagaactgcacacgacatgactgtcctgtttgcctccctttgaaaaatgccagtgacaagcgaaaccaacaaaccatcctggggtctccagctagtggaattcaaaacacaattggttctgttggcacagggcaacagaatgccacttctttaagtaacccaaatcccatagaccccagctccatgcagcgagcctatgctgctctcggactcccctacatgaaccagccccagacgcagctgcagcctcaggttcctggccagcaaccagcacagcctcaaacccaccagcagatgaggactctcaaccccctgggaaataatccaatgaacattccagcaggaggaataacaacagatcagcagcccccaaacttgatttcagaatcagctcttccgacttccctgggggccacaaacccactgatgaacgatggctccaactctggtaacattggaaccctcagcactataccaacagcagctcctccttctagcaccggtgtaaggaaaggctggcacgaacatgtcactcaggacctgcggagccatctagtgcataaactcgtccaagccatcttcccaacacctgatcccgcagctctaaaggatcgccgcatggaaaacctggtagcctatgctaagaaagtggaaggggacatgtacgagtctgccaacagcagggatgaatattatcacttattagcagagaaaatctacaagatacaaaaagaactagaagaaaaacggaggtcgcgtttacataaacaaggcatcttggggaaccagccagccttaccagccccgggggctcagccccctgtgattccacaggcacaacctgtgagacctccaaatggacccctgtccctgccagtgaatcgcatgcaagtttctcaagggatgaattcatttaaccccatgtccttggggaacgtccagttgccacaagcacccatgggacctcgtgcagcctccccaatgaaccactctgtccagatgaacagcatgggctcagtgccagggatggccatttctccttcccgaatgcctcagcctccgaacatgatgggtgcacacaccaacaacatgatggcccaggcgcccgctcagagccagtttctgccacagaaccagttcccgtcatccagcggggcgatgagtgtgggcatggggcagccgccagcccaaacaggcgtgtcacagggacaggtgcctggtgctgctcttcctaaccctctcaacatgctggggcctcaggccagccagctaccttgccctccagtgacacagtcaccactgcacccaacaccgcctcctgcttccacggctgctggcatgccatctctccagcacacgacaccacctgggatgactcctccccagccagcagctcccactcagccatcaactcctgtgtcgtcttccgggcagactcccaccccgactcctggctcagtgcccagtgctacccaaacccagagcacccctacagtccaggcagcagcccaggcccaggtgaccccgcagcctcaaaccccagttcagcccccgtctgtggctacccctcagtcatcgcagcaacagccgacgcctgtgcacgcccagcctcctggcacaccgctttcccaggcagcagccagcattgataacagagtccctaccccctcctcggtggccagcgcagaaaccaattcccagcagccaggacctgacgtacctgtgctggaaatgaagacggagacccaagcagaggacactgagcccgatcctggtgaatccaaaggggagcccaggtctgagatgatggaggaggatttgcaaggagcttcccaagttaaagaagaaacagacatagcagagcagaaatcagaaccaatggaagtggatgaaaagaaacctgaagtgaaagtagaagttaaagaggaagaagagagtagcagtaacggcacagcctctcagtcaacatctccttcgcagccgcgcaaaaaaatctttaaaccagaggagttacgccaggccctcatgccaaccctagaagcactgtatcgacaggacccagagtcattacctttccggcagcctgtagatccccagctcctcggaattccagactattttgacatcgtaaagaatcccatggacctctccaccatcaagcggaagctggacacagggcaataccaagagccctggcagtacgtggacgacgtctggctcatgttcaacaatgcctggctctataatcgcaagacatcccgagtctataagttttgcagtaagcttgcagaggtctttgagcaggaaattgaccctgtcatgcagtcccttggatattgctgtggacgcaagtatgagttttccccacagactttgtgctgctatgggaagcagctgtgtaccattcctcgcgatgctgcctactacagctatcagaataggtatcatttctgtgagaagtgtttcacagagatccagggcgagaatgtgaccctgggtgacgacccttcacagccccagacgacaatttcaaaggatcagtttgaaaagaagaaaaatgataccttagaccccgaacctttcgttgattgcaaggagtgtggccggaagatgcatcagatttgcgttctgcactatgacatcatttggccttcaggttttgtgtgcgacaactgcttgaagaaaactggcagacctcgaaaagaaaacaaattcagtgctaagaggctgcagaccacaagactgggaaaccacttggaagaccgagtgaacaaatttttgcggcgccagaatcaccctgaagccggggaggtttttgtccgagtggtggccagctcagacaagacggtggaggtcaagcccgggatgaagtcacggtttgtggattctggggaaatgtctgaatctttcccatatcgaaccaaagctctgtttgcttttgaggaaattgacggcgtggatgtctgcttttttggaatgcacgtccaagaatacggctctgattgcccccctccaaacacgaggcgtgtgtacatttcttatctggatagtattcatttcttccggccacgttgcctccgcacagccgtttaccatgagatccttattggatatttagagtatgtgaagaaattagggtatgtgacagggcacatctgggcctgtcctccaagtgaaggagatgattacatcttccattgccacccacctgatcaaaaaatacccaagccaaaacgactgcaggagtggtacaaaaagatgctggacaaggcgtttgcagagcggatcatccatgactacaaggatattttcaaacaagcaactgaagacaggctcaccagtgccaaggaactgccctattttgaaggtgatttctggcccaatgtgttagaagagagcattaaggaactagaacaagaagaagaggagaggaaaaaggaagagagcactgcagccagtgaaaccactgagggcagtcagggcgacagcaagaatgccaagaagaagaacaacaagaaaaccaacaagaacaaaagcagcatcagccgcgccaacaagaagaagcccagcatgcccaacgtgtccaatgacctgtcccagaagctgtatgccaccatggagaagcacaaggaggtcttcttcgtgatccacctgcacgctgggcctgtcatcaacaccctgccccccatcgtcgaccccgaccccctgctcagctgtgacctcatggatgggcgcgacgccttcctcaccctcgccagagacaagcactgggagttctcctccttgcgccgctccaagtggtccacgctctgcatgctggtggagctgcacacccagggccaggaccgctttgtctacacctgcaacgagtgcaagcaccacgtggagacgcgctggcactgcactgtgtgcgaggactacgacctctgcatcaactgctataacacgaagagccatgcccataagatggtgaagtgggggctgggcctggatgacgagggcagcagccagggcgagccacagtcaaagagcccccaggagtcacgccggctgagcatccagcgctgcatccagtcgctggtgcacgcgtgccagtgccgcaacgccaactgctcgctgccatcctgccagaagatgaagcgggtggtgcagcacaccaagggctgcaaacgcaagaccaacgggggctgcccggtgtgcaagcagctcatcgccctctgctgctaccacgccaagcactgccaagaaaacaaatgccccgtgcccttctgcctcaacatcaaacacaagctccgccagcagcagatccagcaccgcctgcagcaggcccagctcatgcgccggcggatggccaccatgaacacccgcaacgtgcctcagcagagtctgccttctcctacctcagcaccgcccgggacccccacacagcagcccagcacaccccagacgccgcagccccctgcccagccccaaccctcacccgtgagcatgtcaccagctggcttccccagcgtggcccggactcagccccccaccacggtgtccacagggaagcctaccagccaggtgccggcccccccacccccggcccagccccctcctgcagcggtggaagcggctcggcagatcgagcgtgaggcccagcagcagcagcacctgtaccgggtgaacatcaacaacagcatgcccccaggacgcacgggcatggggaccccggggagccagatggcccccgtgagcctgaatgtgccccgacccaaccaggtgagcgggcccgtcatgcccagcatgcctcccgggcagtggcagcaggcgccccttccccagcagcagcccatgccaggcttgcccaggcctgtgatatccatgcaggcccaggcggccgtggctgggccccggatgcccagcgtgcagccacccaggagcatctcacccagcgctctgcaagacctgctgcggaccctgaagtcgcccagctcccctcagcagcaacagcaggtgctgaacattctcaaatcaaacccgcagctaatggcagctttcatcaaacagcgcacagccaagtacgtggccaatcagcccggcatgcagccccagcctggcctccagtcccagcccggcatgcaaccccagcctggcatgcaccagcagcccagcctgcagaacctgaatgccatgcaggctggcgtgccgcggcccggtgtgcctccacagcagcaggcgatgggaggcctgaacccccagggccaggccttgaacatcatgaacccaggacacaaccccaacatggcgagtatgaatccacagtaccgagaaatgttacggaggcagctgctgcagcagcagcagcaacagcagcagcaacaacagcagcaacagcagcagcagcaagggagtgccggcatggctgggggcatggcggggcacggccagttccagcagcctcaaggacccggaggctacccaccggccatgcagcagcagcagcgcatgcagcagcatctccccctccagggcagctccatgggccagatggcggctcagatgggacagcttggccagatggggcagccggggctgggggcagacagcacccccaacatccagcaagccctgcagcagcggattctgcagcaacagcagatgaagcagcagattgggtccccaggccagccgaaccccatgagcccccagcaacacatgctctcaggacagccacaggcctcgcatctccctggccagcagatcgccacgtcccttagtaaccaggtgcggtctccagcccctgtccagtctccacggccccagtcccagcctccacattccagcccgtcaccacggatacagccccagccttcgccacaccacgtctcaccccagactggttccccccaccccggactcgcagtcaccatggccagctccatagatcagggacacttggggaaccccgaacagagtgcaatgctcccccagctgaacacccccagcaggagtgcgctgtccagcgaactgtccctggtcggggacaccacgggggacacgctagagaagtttgtggagggcttgtagcattgtgagagcatcaccttttccctttcatgttcttggaccttttgtactgaaaatccaggcatctaggttctttttattcctagatggaactgcgacttccgagccatggaagggtggattgatgtttaaagaaacaatacaaagaatatatttttttgttaaaaaccagttgatttaaatatctggtctctctctttggtttttttttggcgggggggtggggggggttcttttttttccgttttgtttttgtttggggggaggggggttttgtttggattctttttgtcgtcattgctggtgactcatgcctttttttaacgggaaaaacaagttcattatattcatattttttatttgtattttcaagactttaaacatttatgtttaaaagtaagaagaaaaataatattcagaactgattcctgaaataatgcaagcttataatgtatcccgataactttgtgatgtttcgggaagatttttttctatagtgaactctgtgggcgtctcccagtattaccctggatgataggaattgactccggcgtgcacacacgtacacacccacacacatctatctatacataatggctgaagccaaacttgtcttgcagatgtagaaattgttgctttgtttctctgataaaactggttttagacaaaaaatagggatgatcactcttagaccatgctaatgttactagagaagaagccttcttttctttcttctatgtgaaacttgaaatgaggaaaagcaattctagtgtaaatcatgcaagcgctctaattcctataaatacgaaactcgagaagattcaatcactgtatagaatggtaaaataccaactcatttcttatatcatattgttaaataaactgtgtgcaacagacaaaaagggtggtccttcttgaattcatgtacatggtattaacacttagtgttcggggttttttgttatgaaaatgctgttttcaacattgtatttggactatgcatgtgttttttccccattgtatataaagtaccgcttaaaattgatataaattactgaggtttttaacatgtattctgttctttaagatccctgtaagaatgtttaaggtttttatttatttatatatattttttgagtctgttctttgtaagacatggttctggttgttcgctcatagcggagaggctggggctgcggttgtggttgtggcggcgtgggtggtggctgggaactgtggcccaggcttagcggccgcccggaggcttttcttcccggagactgaggtgggcggctcagcgttggccccacacattcgaggctcacaggtgattgtcgctcacacagttagggtcgtcagttggtctgaaactgcatttggcccactcctccatcctccctgtccgtcgtagctgccacccccagaggcggcgcttcttcccgtgttcaggcggctccccccccccgtacacgactcccagaatctgaggcagagagtgctccaggctcgcgaggtgctttctgacttccccccaaatcctgccgctgccgcgcagcatgtcccgtgtggcgtttgaggaaatgctgagggacagacaccttggagcaccagctccggtccctgttacagtgagaaaggtcccccacttcgggggatacttgcacttagccacatggtcctgcctcccttggagtccagttccaggctcccttactgagtgggtgagacaagttcacaaaaaccgtaaaactgagaggaggaccatgggcaggggagctgaagttcatcccctaagtctaccacccccagcacccagagaacccactttatccctagtcccccaacaaaggctggtctaggtgggggtgatggtaattttagaaatcacgccccaaatagcttccgtttgggcccttacattcacagataggttttaaatagctgaatacttggtttgggaatctgaattcgaggaacctttctaagaaattggaaaggtccgatctagttttagcacagagctttgaaccttgagttataaaatgcagaataattcaagtaaaaataagaccaccatctggcacccctgaccagcccccattcaccccatcccaggaggggaagcacaggccgggcctccgggtggagattgctgccactgctcggcctgctgggttcttaacctccagtgtcctcttcatcttttccacccgtagggaaaccttgagccatgtgttcaaacaagaagtggggctagagcccgagagcagcagctctaagcccacactcagaaagtggcgccctcctggttgtgcagccttttaatgtgggcagtggaggggcctctgtttcaggttatcctggaattcaaaacgttatgtaccaacctcatcctctttggagtctgcatcctgtgcaaccgtcttgggcaatccagatgtcgaaggatgtgaccgagagcatggtctgtggatgctaaccctaagtttgtcgtaaggaaatttctgtaagaaacctggaaagccccaacgctgtgtctcatgctgtatacttaagaggagaagaaaaagtcctatatttgtgatcaaaaagaggaaacttgaaatgtgatggtgtttataataaaagatggtaaaactacttggattcaaaaat

SEQ ID NO: 439528 - DNA, 8693 bp, Homo sapiens
gccacagaaccagttcccgtcatccagcggggcgatgagtgtgggcatggggcagccgccagcccaaacaggcgtgtcacagggacaggtgcctggtgctgctcttcctaaccctctcaacatgctggggcctcaggccacccagctccatgcagcgagcctatgctgctctcggactcccctacatgaaccagccccagacgcagctgcagcctcaggttcctggccagcaaccagcacagcctcaaacccaccagcagatgaggactctcaaccccctgggaaataatccaatgaacattccagcaggaggaataacaacagatcagcagcccccaaacttgatttcagaatcagctcttccgacttccctgggggccacaaacccactgatgaacgatggctccaactctggtaacattggaaccctcagcactataccaacagcagctcctccttctagcaccggtgtaaggaaaggctggcacgaacatgtcactcaggacctgcggagccatctagtgcataaactcgtccaagccatcttcccaacacctgatcccgcagctctaaaggatcgccgcatggaaaacctggtagcctatgctaagaaagtggaaggggacatgtacgagtctgccaacagcagggatgaatattatcacttattagcagagaaaatctacaagatacaaaaagaactagaagaaaaacggaggtcgcgtttacataaacaaggcatcttggggaaccagccagccttaccagccccgggggctcagccccctgtgattccacaggcacaacctgtgagacctccaaatggacccctgtccctgccagtgaatcgcatgcaagtttctcaagggatgaattcatttaaccccatgtccttggggaacgtccagttgccacaagcacccatgggacctcgtgcagcctccccaatgaaccactctgtccagatgaacagcatgggctcagtgccagggatggccatttctccttcccgaatgcctcagcctccgaacatgatgggtgcacacaccaacaacatgatggcccaggcgcccgctcagagccagtttctgccacagaaccagttcccgtcatccagcggggcgatgagtgtgggcatggggcagccgccagcccaaacaggcgtgtcacagggacaggtgcctggtgctgctcttcctaaccctctcaacatgctggggcctcaggccagccagctaccttgccctccagtgacacagtcaccactgcacccaacaccgcctcctgcttccacggctgctggcatgccatctctccagcacacgacaccacctgggatgactcctccccagccagcagctcccactcagccatcaactcctgtgtcgtcttccgggcagactcccaccccgactcctggctcagtgcccagtgctacccaaacccagagcacccctacagtccaggcagcagcccaggcccaggtgaccccgcagcctcaaaccccagttcagcccccgtctgtggctacccctcagtcatcgcagcaacagccgacgcctgtgcacgcccagcctcctggcacaccgctttcccaggcagcagccagcattgataacagagtccctaccccctcctcggtggccagcgcagaaaccaattcccagcagccaggacctgacgtacctgtgctggaaatgaagacggagacccaagcagaggacactgagcccgatcctggtgaatccaaaggggagcccaggtctgagatgatggaggaggatttgcaaggagcttcccaagttaaagaagaaacagacatagcagagcagaaatcagaaccaatggaagtggatgaaaagaaacctgaagtgaaagtagaagttaaagaggaagaagagagtagcagtaacggcacagcctctcagtcaacatctccttcgcagccgcgcaaaaaaatctttaaaccagaggagttacgccaggccctcatgccaaccctagaagcactgtatcgacaggacccagagtcattacctttccggcagcctgtagatccccagctcctcggaattccagactattttgacatcgtaaagaatcccatggacctctccaccatcaagcggaagctggacacagggcaataccaagagccctggcagtacgtggacgacgtctggctcatgttcaacaatgcctggctctataatcgcaagacatcccgagtctataagttttgcagtaagcttgcagaggtctttgagcaggaaattgaccctgtcatgcagtcccttggatattgctgtggacgcaagtatgagttttccccacagactttgtgctgctatgggaagcagctgtgtaccattcctcgcgatgctgcctactacagctatcagaataggtatcatttctgtgagaagtgtttcacagagatccagggcgagaatgtgaccctgggtgacgacccttcacagccccagacgacaatttcaaaggatcagtttgaaaagaagaaaaatgataccttagaccccgaacctttcgttgattgcaaggagtgtggccggaagatgcatcagatttgcgttctgcactatgacatcatttggccttcaggttttgtgtgcgacaactgcttgaagaaaactggcagacctcgaaaagaaaacaaattcagtgctaagaggctgcagaccacaagactgggaaaccacttggaagaccgagtgaacaaatttttgcggcgccagaatcaccctgaagccggggaggtttttgtccgagtggtggccagctcagacaagacggtggaggtcaagcccgggatgaagtcacggtttgtggattctggggaaatgtctgaatctttcccatatcgaaccaaagctctgtttgcttttgaggaaattgacggcgtggatgtctgcttttttggaatgcacgtccaagaatacggctctgattgcccccctccaaacacgaggcgtgtgtacatttcttatctggatagtattcatttcttccggccacgttgcctccgcacagccgtttaccatgagatccttattggatatttagagtatgtgaagaaattagggtatgtgacagggcacatctgggcctgtcctccaagtgaaggagatgattacatcttccattgccacccacctgatcaaaaaatacccaagccaaaacgactgcaggagtggtacaaaaagatgctggacaaggcgtttgcagagcggatcatccatgactacaaggatattttcaaacaagcaactgaagacaggctcaccagtgccaaggaactgccctattttgaaggtgatttctggcccaatgtgttagaagagagcattaaggaactagaacaagaagaagaggagaggaaaaaggaagagagcactgcagccagtgaaaccactgagggcagtcagggcgacagcaagaatgccaagaagaagaacaacaagaaaaccaacaagaacaaaagcagcatcagccgcgccaacaagaagaagcccagcatgcccaacgtgtccaatgacctgtcccagaagctgtatgccaccatggagaagcacaaggaggtcttcttcgtgatccacctgcacgctgggcctgtcatcaacaccctgccccccatcgtcgaccccgaccccctgctcagctgtgacctcatggatgggcgcgacgccttcctcaccctcgccagagacaagcactgggagttctcctccttgcgccgctccaagtggtccacgctctgcatgctggtggagctgcacacccagggccaggaccgctttgtctacacctgcaacgagtgcaagcaccacgtggagacgcgctggcactgcactgtgtgcgaggactacgacctctgcatcaactgctataacacgaagagccatgcccataagatggtgaagtgggggctgggcctggatgacgagggcagcagccagggcgagccacagtcaaagagcccccaggagtcacgccggctgagcatccagcgctgcatccagtcgctggtgcacgcgtgccagtgccgcaacgccaactgctcgctgccatcctgccagaagatgaagcgggtggtgcagcacaccaagggctgcaaacgcaagaccaacgggggctgcccggtgtgcaagcagctcatcgccctctgctgctaccacgccaagcactgccaagaaaacaaatgccccgtgcccttctgcctcaacatcaaacacaagctccgccagcagcagatccagcaccgcctgcagcaggcccagctcatgcgccggcggatggccaccatgaacacccgcaacgtgcctcagcagagtctgccttctcctacctcagcaccgcccgggacccccacacagcagcccagcacaccccagacgccgcagccccctgcccagccccaaccctcacccgtgagcatgtcaccagctggcttccccagcgtggcccggactcagccccccaccacggtgtccacagggaagcctaccagccaggtgccggcccccccacccccggcccagccccctcctgcagcggtggaagcggctcggcagatcgagcgtgaggcccagcagcagcagcacctgtaccgggtgaacatcaacaacagcatgcccccaggacgcacgggcatggggaccccggggagccagatggcccccgtgagcctgaatgtgccccgacccaaccaggtgagcgggcccgtcatgcccagcatgcctcccgggcagtggcagcaggcgccccttccccagcagcagcccatgccaggcttgcccaggcctgtgatatccatgcaggcccaggcggccgtggctgggccccggatgcccagcgtgcagccacccaggagcatctcacccagcgctctgcaagacctgctgcggaccctgaagtcgcccagctcccctcagcagcaacagcaggtgctgaacattctcaaatcaaacccgcagctaatggcagctttcatcaaacagcgcacagccaagtacgtggccaatcagcccggcatgcagccccagcctggcctccagtcccagcccggcatgcaaccccagcctggcatgcaccagcagcccagcctgcagaacctgaatgccatgcaggctggcgtgccgcggcccggtgtgcctccacagcagcaggcgatgggaggcctgaacccccagggccaggccttgaacatcatgaacccaggacacaaccccaacatggcgagtatgaatccacagtaccgagaaatgttacggaggcagctgctgcagcagcagcagcaacagcagcagcaacaacagcagcaacagcagcagcagcaagggagtgccggcatggctgggggcatggcggggcacggccagttccagcagcctcaaggacccggaggctacccaccggccatgcagcagcagcagcgcatgcagcagcatctccccctccagggcagctccatgggccagatggcggctcagatgggacagcttggccagatggggcagccggggctgggggcagacagcacccccaacatccagcaagccctgcagcagcggattctgcagcaacagcagatgaagcagcagattgggtccccaggccagccgaaccccatgagcccccagcaacacatgctctcaggacagccacaggcctcgcatctccctggccagcagatcgccacgtcccttagtaaccaggtgcggtctccagcccctgtccagtctccacggccccagtcccagcctccacattccagcccgtcaccacggatacagccccagccttcgccacaccacgtctcaccccagactggttccccccaccccggactcgcagtcaccatggccagctccatagatcagggacacttggggaaccccgaacagagtgcaatgctcccccagctgaacacccccagcaggagtgcgctgtccagcgaactgtccctggtcggggacaccacgggggacacgctagagaagtttgtggagggcttgtagcattgtgagagcatcaccttttccctttcatgttcttggaccttttgtactgaaaatccaggcatctaggttctttttattcctagatggaactgcgacttccgagccatggaagggtggattgatgtttaaagaaacaatacaaagaatatatttttttgttaaaaaccagttgatttaaatatctggtctctctctttggtttttttttggcgggggggtggggggggttcttttttttccgttttgtttttgtttggggggaggggggttttgtttggattctttttgtcgtcattgctggtgactcatgcctttttttaacgggaaaaacaagttcattatattcatattttttatttgtattttcaagactttaaacatttatgtttaaaagtaagaagaaaaataatattcagaactgattcctgaaataatgcaagcttataatgtatcccgataactttgtgatgtttcgggaagatttttttctatagtgaactctgtgggcgtctcccagtattaccctggatgataggaattgactccggcgtgcacacacgtacacacccacacacatctatctatacataatggctgaagccaaacttgtcttgcagatgtagaaattgttgctttgtttctctgataaaactggttttagacaaaaaatagggatgatcactcttagaccatgctaatgttactagagaagaagccttcttttctttcttctatgtgaaacttgaaatgaggaaaagcaattctagtgtaaatcatgcaagcgctctaattcctataaatacgaaactcgagaagattcaatcactgtatagaatggtaaaataccaactcatttcttatatcatattgttaaataaactgtgtgcaacagacaaaaagggtggtccttcttgaattcatgtacatggtattaacacttagtgttcggggttttttgttatgaaaatgctgttttcaacattgtatttggactatgcatgtgttttttccccattgtatataaagtaccgcttaaaattgatataaattactgaggtttttaacatgtattctgttctttaagatccctgtaagaatgtttaaggtttttatttatttatatatattttttgagtctgttctttgtaagacatggttctggttgttcgctcatagcggagaggctggggctgcggttgtggttgtggcggcgtgggtggtggctgggaactgtggcccaggcttagcggccgcccggaggcttttcttcccggagactgaggtgggcggctcagcgttggccccacacattcgaggctcacaggtgattgtcgctcacacagttagggtcgtcagttggtctgaaactgcatttggcccactcctccatcctccctgtccgtcgtagctgccacccccagaggcggcgcttcttcccgtgttcaggcggctccccccccccgtacacgactcccagaatctgaggcagagagtgctccaggctcgcgaggtgctttctgacttccccccaaatcctgccgctgccgcgcagcatgtcccgtgtggcgtttgaggaaatgctgagggacagacaccttggagcaccagctccggtccctgttacagtgagaaaggtcccccacttcgggggatacttgcacttagccacatggtcctgcctcccttggagtccagttccaggctcccttactgagtgggtgagacaagttcacaaaaaccgtaaaactgagaggaggaccatgggcaggggagctgaagttcatcccctaagtctaccacccccagcacccagagaacccactttatccctagtcccccaacaaaggctggtctaggtgggggtgatggtaattttagaaatcacgccccaaatagcttccgtttgggcccttacattcacagataggttttaaatagctgaatacttggtttgggaatctgaattcgaggaacctttctaagaaattggaaaggtccgatctagttttagcacagagctttgaaccttgagttataaaatgcagaataattcaagtaaaaataagaccaccatctggcacccctgaccagcccccattcaccccatcccaggaggggaagcacaggccgggcctccgggtggagattgctgccactgctcggcctgctgggttcttaacctccagtgtcctcttcatcttttccacccgtagggaaaccttgagccatgtgttcaaacaagaagtggggctagagcccgagagcagcagctctaagcccacactcagaaagtggcgccctcctggttgtgcagccttttaatgtgggcagtggaggggcctctgtttcaggttatcctggaattcaaaacgttatgtaccaacctcatcctctttggagtctgcatcctgtgcaaccgtcttgggcaatccagatgtcgaaggatgtgaccgagagcatggtctgtggatgctaaccctaagtttgtcgtaaggaaatttctgtaagaaacctggaaagccccaacgctgtgtctcatgctgtatacttaagaggagaagaaaaagtcctatatttgtgatcaaaaagaggaaacttgaaatgtgatggtgtttataataaaagatggtaaaactacttggattcaaaaat

SEQ ID NO: 439529 - DNA, 8341 bp, Homo sapiens
gaggccaatgccaagattagaacccacatttgagatcgatgaagaagaggaggaagaggatgaaaatgaacttttccctagagaatacttccgtcgtttgtcttcgcaggatgtactcaggtgtcagtcctcttctaagaggaagtctaaagatgaagaagaagatgaagagtcagatgatgctgatgattttggatcattgtttgacttggaaaatgatcttcctgatgagctgatacccaatggaggagaattaggccttttaaacagtgggaaccttgttccagatgctgcttccaaacataaacaactgtcggagcttctacgaggaggcagcggctctagtatcaacccaggaataggaaatgtgagcgccagcagccccgtgcagcagggcctgggtggccaggctcaagggcagccgaacagtgctaacatggccagcctcagtgccatgggcaagagccctctgagccagggagattcttcagcccccagcctgcctaaacaggcagccagcacctctgggcccacccccgctgcctcccaagcactgaatccacaagcacccatgggacctcgtgcagcctccccaatgaaccactctgtccagatgaacagcatgggctcagtgccagggatggccatttctccttcccgaatgcctcagcctccgaacatgatgggtgcacacaccaacaacatgatggcccaggcgcccgctcagagccagtttctgccacagaaccagttcccgtcatccagcggggcgatgagtgtgggcatggggcagccgccagcccaaacaggcgtgtcacagggacaggtgcctggtgctgctcttcctaaccctctcaacatgctggggcctcaggccagccagctaccttgccctccagtgacacagtcaccactgcacccaacaccgcctcctgcttccacggctgctggcatgccatctctccagcacacgacaccacctgggatgactcctccccagccagcagctcccactcagccatcaactcctgtgtcgtcttccgggcagactcccaccccgactcctggctcagtgcccagtgctacccaaacccagagcacccctacagtccaggcagcagcccaggcccaggtgaccccgcagcctcaaaccccagttcagcccccgtctgtggctacccctcagtcatcgcagcaacagccgacgcctgtgcacgcccagcctcctggcacaccgctttcccaggcagcagccagcattgataacagagtccctaccccctcctcggtggccagcgcagaaaccaattcccagcagccaggacctgacgtacctgtgctggaaatgaagacggagacccaagcagaggacactgagcccgatcctggtgaatccaaaggggagcccaggtctgagatgatggaggaggatttgcaaggagcttcccaagttaaagaagaaacagacatagcagagcagaaatcagaaccaatggaagtggatgaaaagaaacctgaagtgaaagtagaagttaaagaggaagaagagagtagcagtaacggcacagcctctcagtcaacatctccttcgcagccgcgcaaaaaaatctttaaaccagaggagttacgccaggccctcatgccaaccctagaagcactgtatcgacaggacccagagtcattacctttccggcagcctgtagatccccagctcctcggaattccagactattttgacatcgtaaagaatcccatggacctctccaccatcaagcggaagctggacacagggcaataccaagagccctggcagtacgtggacgacgtctggctcatgttcaacaatgcctggctctataatcgcaagacatcccgagtctataagttttgcagtaagcttgcagaggtctttgagcaggaaattgaccctgtcatgcagtcccttggatattgctgtggacgcaagtatgagttttccccacagactttgtgctgctatgggaagcagctgtgtaccattcctcgcgatgctgcctactacagctatcagaataggtatcatttctgtgagaagtgtttcacagagatccagggcgagaatgtgaccctgggtgacgacccttcacagccccagacgacaatttcaaaggatcagtttgaaaagaagaaaaatgataccttagaccccgaacctttcgttgattgcaaggagtgtggccggaagatgcatcagatttgcgttctgcactatgacatcatttggccttcaggttttgtgtgcgacaactgcttgaagaaaactggcagacctcgaaaagaaaacaaattcagtgctaagaggctgcagaccacaagactgggaaaccacttggaagaccgagtgaacaaatttttgcggcgccagaatcaccctgaagccggggaggtttttgtccgagtggtggccagctcagacaagacggtggaggtcaagcccgggatgaagtcacggtttgtggattctggggaaatgtctgaatctttcccatatcgaaccaaagctctgtttgcttttgaggaaattgacggcgtggatgtctgcttttttggaatgcacgtccaagaatacggctctgattgcccccctccaaacacgaggcgtgtgtacatttcttatctggatagtattcatttcttccggccacgttgcctccgcacagccgtttaccatgagatccttattggatatttagagtatgtgaagaaattagggtatgtgacagggcacatctgggcctgtcctccaagtgaaggagatgattacatcttccattgccacccacctgatcaaaaaatacccaagccaaaacgactgcaggagtggtacaaaaagatgctggacaaggcgtttgcagagcggatcatccatgactacaaggatattttcaaacaagcaactgaagacaggctcaccagtgccaaggaactgccctattttgaaggtgatttctggcccaatgtgttagaagagagcattaaggaactagaacaagaagaagaggagaggaaaaaggaagagagcactgcagccagtgaaaccactgagggcagtcagggcgacagcaagaatgccaagaagaagaacaacaagaaaaccaacaagaacaaaagcagcatcagccgcgccaacaagaagaagcccagcatgcccaacgtgtccaatgacctgtcccagaagctgtatgccaccatggagaagcacaaggaggtcttcttcgtgatccacctgcacgctgggcctgtcatcaacaccctgccccccatcgtcgaccccgaccccctgctcagctgtgacctcatggatgggcgcgacgccttcctcaccctcgccagagacaagcactgggagttctcctccttgcgccgctccaagtggtccacgctctgcatgctggtggagctgcacacccagggccaggaccgctttgtctacacctgcaacgagtgcaagcaccacgtggagacgcgctggcactgcactgtgtgcgaggactacgacctctgcatcaactgctataacacgaagagccatgcccataagatggtgaagtgggggctgggcctggatgacgagggcagcagccagggcgagccacagtcaaagagcccccaggagtcacgccggctgagcatccagcgctgcatccagtcgctggtgcacgcgtgccagtgccgcaacgccaactgctcgctgccatcctgccagaagatgaagcgggtggtgcagcacaccaagggctgcaaacgcaagaccaacgggggctgcccggtgtgcaagcagctcatcgccctctgctgctaccacgccaagcactgccaagaaaacaaatgccccgtgcccttctgcctcaacatcaaacacaagctccgccagcagcagatccagcaccgcctgcagcaggcccagctcatgcgccggcggatggccaccatgaacacccgcaacgtgcctcagcagagtctgccttctcctacctcagcaccgcccgggacccccacacagcagcccagcacaccccagacgccgcagccccctgcccagccccaaccctcacccgtgagcatgtcaccagctggcttccccagcgtggcccggactcagccccccaccacggtgtccacagggaagcctaccagccaggtgccggcccccccacccccggcccagccccctcctgcagcggtggaagcggctcggcagatcgagcgtgaggcccagcagcagcagcacctgtaccgggtgaacatcaacaacagcatgcccccaggacgcacgggcatggggaccccggggagccagatggcccccgtgagcctgaatgtgccccgacccaaccaggtgagcgggcccgtcatgcccagcatgcctcccgggcagtggcagcaggcgccccttccccagcagcagcccatgccaggcttgcccaggcctgtgatatccatgcaggcccaggcggccgtggctgggccccggatgcccagcgtgcagccacccaggagcatctcacccagcgctctgcaagacctgctgcggaccctgaagtcgcccagctcccctcagcagcaacagcaggtgctgaacattctcaaatcaaacccgcagctaatggcagctttcatcaaacagcgcacagccaagtacgtggccaatcagcccggcatgcagccccagcctggcctccagtcccagcccggcatgcaaccccagcctggcatgcaccagcagcccagcctgcagaacctgaatgccatgcaggctggcgtgccgcggcccggtgtgcctccacagcagcaggcgatgggaggcctgaacccccagggccaggccttgaacatcatgaacccaggacacaaccccaacatggcgagtatgaatccacagtaccgagaaatgttacggaggcagctgctgcagcagcagcagcaacagcagcagcaacaacagcagcaacagcagcagcagcaagggagtgccggcatggctgggggcatggcggggcacggccagttccagcagcctcaaggacccggaggctacccaccggccatgcagcagcagcagcgcatgcagcagcatctccccctccagggcagctccatgggccagatggcggctcagatgggacagcttggccagatggggcagccggggctgggggcagacagcacccccaacatccagcaagccctgcagcagcggattctgcagcaacagcagatgaagcagcagattgggtccccaggccagccgaaccccatgagcccccagcaacacatgctctcaggacagccacaggcctcgcatctccctggccagcagatcgccacgtcccttagtaaccaggtgcggtctccagcccctgtccagtctccacggccccagtcccagcctccacattccagcccgtcaccacggatacagccccagccttcgccacaccacgtctcaccccagactggttccccccaccccggactcgcagtcaccatggccagctccatagatcagggacacttggggaaccccgaacagagtgcaatgctcccccagctgaacacccccagcaggagtgcgctgtccagcgaactgtccctggtcggggacaccacgggggacacgctagagaagtttgtggagggcttgtagcattgtgagagcatcaccttttccctttcatgttcttggaccttttgtactgaaaatccaggcatctaggttctttttattcctagatggaactgcgacttccgagccatggaagggtggattgatgtttaaagaaacaatacaaagaatatatttttttgttaaaaaccagttgatttaaatatctggtctctctctttggtttttttttggcgggggggtggggggggttcttttttttccgttttgtttttgtttggggggaggggggttttgtttggattctttttgtcgtcattgctggtgactcatgcctttttttaacgggaaaaacaagttcattatattcatattttttatttgtattttcaagactttaaacatttatgtttaaaagtaagaagaaaaataatattcagaactgattcctgaaataatgcaagcttataatgtatcccgataactttgtgatgtttcgggaagatttttttctatagtgaactctgtgggcgtctcccagtattaccctggatgataggaattgactccggcgtgcacacacgtacacacccacacacatctatctatacataatggctgaagccaaacttgtcttgcagatgtagaaattgttgctttgtttctctgataaaactggttttagacaaaaaatagggatgatcactcttagaccatgctaatgttactagagaagaagccttcttttctttcttctatgtgaaacttgaaatgaggaaaagcaattctagtgtaaatcatgcaagcgctctaattcctataaatacgaaactcgagaagattcaatcactgtatagaatggtaaaataccaactcatttcttatatcatattgttaaataaactgtgtgcaacagacaaaaagggtggtccttcttgaattcatgtacatggtattaacacttagtgttcggggttttttgttatgaaaatgctgttttcaacattgtatttggactatgcatgtgttttttccccattgtatataaagtaccgcttaaaattgatataaattactgaggtttttaacatgtattctgttctttaagatccctgtaagaatgtttaaggtttttatttatttatatatattttttgagtctgttctttgtaagacatggttctggttgttcgctcatagcggagaggctggggctgcggttgtggttgtggcggcgtgggtggtggctgggaactgtggcccaggcttagcggccgcccggaggcttttcttcccggagactgaggtgggcggctcagcgttggccccacacattcgaggctcacaggtgattgtcgctcacacagttagggtcgtcagttggtctgaaactgcatttggcccactcctccatcctccctgtccgtcgtagctgccacccccagaggcggcgcttcttcccgtgttcaggcggctccccccccccgtacacgactcccagaatctgaggcagagagtgctccaggctcgcgaggtgctttctgacttccccccaaatcctgccgctgccgcgcagcatgtcccgtgtggcgtttgaggaaatgctgagggacagacaccttggagcaccagctccggtccctgttacagtgagaaaggtcccccacttcgggggatacttgcacttagccacatggtcctgcctcccttggagtccagttccaggctcccttactgagtgggtgagacaagttcacaaaaaccgtaaaactgagaggaggaccatgggcaggggagctgaagttcatcccctaagtctaccacccccagcacccagagaacccactttatccctagtcccccaacaaaggctggtctaggtgggggtgatggtaattttagaaatcacgccccaaatagcttccgtttgggcccttacattcacagataggttttaaatagctgaatacttggtttgggaatctgaattcgaggaacctttctaagaaattggaaaggtccgatctagttttagcacagagctttgaaccttgagttataaaatgcagaataattcaagtaaaaataagaccaccatctggcacccctgaccagcccccattcaccccatcccaggaggggaagcacaggccgggcctccgggtggagattgctgccactgctcggcctgctgggttcttaacctccagtgtcctcttcatcttttccacccgtagggaaaccttgagccatgtgttcaaacaagaagtggggctagagcccgagagcagcagctctaagcccacactcagaaagtggcgccctcctggttgtgcagccttttaatgtgggcagtggaggggcctctgtttcaggttatcctggaattcaaaacgttatgtaccaacctcatcctctttggagtctgcatcctgtgcaaccgtcttgggcaatccagatgtcgaaggatgtgaccgagagcatggtctgtggatgctaaccctaagtttgtcgtaaggaaatttctgtaagaaacctggaaagccccaacgctgtgtctcatgctgtatacttaagaggagaagaaaaagtcctatatttgtgatcaaaaagaggaaacttgaaatgtgatggtgtttataataaaagatggtaaaactacttggattcaaaaat

SEQ ID NO: 439530 - DNA, 8309 bp, Homo sapiens
  misc_feature (2)..(2): n is a, c, g, or t
tncttttttttttaattgaggaatcaacagccgccatcttgtcgcggacccgaccggggcttcgagcgcgatctactcggccccgccggtcccgggccccacaaccgcccgcgcaccccgctccgcccggccggcccgctccgcccggccctcggcgcccgccccggcggccccgctcgcctctcggctcggcctcccggagcccggcggcggcggcggcggcagcggcggcggcggcggcggaacggggggtgggggggccgcggcggcggcggcgaccccgctcggcgcattgtttttcctcacggcggcggcggcggcgggccgcgggccgggagcggagcccggagccccctcgtcgtcgggccgcgagcgaattcattaagtggggcgcggggggggagcgaggcggcggcggcggcggcaccatgttctcggggactgcctgagccgcccggccgggcgccgtcgctgccagccgggcccgggggggcggccgggccgccggggcgcccccaccgcggagtgtcgcgctcgggaggcgggcaggggatgagggggccgcggccggcggcggcggcggcggccgggggcgggcggtgagcgctgcggggcgctgttgctgtggctgagatttggccgccgcctcccccacccggcctgcgccctccctctccctcggcgcccgcccgcccgctcgcggcccgcgctcgctcctctccctcgcagccggcagggcccccgacccccgtccgggccctcgccggcccggccgcccgtgcccggggctgttttcgcgagcaggtgaaaatggctgagaacttgctggacggaccgcccaaccccaaaagagccaaactcagctcgcccggtttctcggcgaatgacagcacagattttggatcattgtttgacttggaaaatgatcttcctgatgagctgatacccaatggaggagaattaggccttttaaacagtgggaaccttgttccagatgctgcttccaaacataaacaactgtcggagcttctacgaggaggcagcggctctagtatcaacccaggaataggaaatgtgagcgccagcagccccgtgcagcagggcctgggtggccaggctcaagggcagccgaacagtgctaacatggccagcctcagtgccatgggcaagagccctctgagccagggagattcttcagcccccagcctgcctaaacaggcagccagcacctctgggcccacccccgctgcctcccaagcactgaatccgcaagcacaaaagcaagtggggctggcgactagcagccctgccacgtcacagactggacctggtatctgcatgaatgctaactttaaccagacccacccaggcctcctcaatagtaactctggccatagcttaattaatcaggcttcacaagggcaggcgcaagtcatgaatggatctcttggggctgctggcagaggaaggggagctggaatgccgtaccctactccagccatgcagggcgcctcgagcagcgtgctggctgagaccctaacgcaggtttccccgcaaatgactggtcacgcgggactgaacaccgcacaggcaggaggcatggccaagatgggaataactgggaacacaagtccatttggacagccctttagtcaagctggagggcagccaatgggagccactggagtgaacccccagttagccagcaaacagagcatggtcaacagtttgcccaccttccctacagatatcaagaatacttcagtcaccaacgtgccaaatatgtctcagatgcaaacatcagtgggaattgtacccacacaagcaattgcaacaggccccactgcagatcctgaaaaacgcaaactgatacagcagcagctggttctactgcttcatgctcataagtgtcagagacgagagcaagcaaacggagaggttcgggcctgctcgctcccgcattgtcgaaccatgaaaaacgttttgaatcacatgacgcattgtcaggctgggaaagcctgccaagttgcccattgtgcatcttcacgacaaatcatctctcattggaagaactgcacacgacatgactgtcctgtttgcctccctttgaaaaatgccagtgacaagcgaaaccaacaaaccatcctggggtctccagctagtggaattcaaaacacaattggttctgttggcacagggcaacagaatgccacttctttaagtaacccaaatcccatagaccccagctccatgcagcgagcctatgctgctctcggactcccctacatgaaccagccccagacgcagctgcagcctcaggttcctggccagcaaccagcacagcctcaaacccaccagcagatgaggactctcaaccccctgggaaataatccaatgaacattccagcaggaggaataacaacagatcagcagcccccaaacttgatttcagaatcagctcttccgacttccctgggggccacaaacccactgatgaacgatggctccaactctggtaacattggaaccctcagcactataccaacagcagctcctccttctagcaccggtgtaaggaaaggctggcacgaacatgtcactcaggacctgcggagccatctagtgcataaactcgtccaagccatcttcccaacacctgatcccgcagctctaaaggatcgccgcatggaaaacctggtagcctatgctaagaaagtggaaggggacatgtacgagtctgccaacagcagggatgaatattatcacttattagcagagaaaatctacaagatacaaaaagaactagaagaaaaacggaggtcgcgtttacataaacaaggcatcttggggaaccagccagccttaccagccccgggggctcagccccctgtgattccacaggcacaacctgtgagacctccaaatggacccctgtccctgccagtgaatcgcatgcaagtttctcaagggatgaattcatttaaccccatgtccttggggaacgtccagttgccacaagcacccatgggacctcgtgcagcctccccaatgaaccactctgtccagatgaacagcatgggctcagtgccagggatggccatttctccttcccgaatgcctcagcctccgaacatgatgggtgcacacaccaacaacatgatggcccaggcgcccgctcagagccagtttctgccacagaaccagttcccgtcatccagcggggcgatgagtgtgggcatggggcagccgccagcccaaacaggcgtgtcacagggacaggtgcctggtgctgctcttcctaaccctctcaacatgctggggcctcaggccagccagctaccttgccctccagtgacacagtcaccactgcacccaacaccgcctcctgcttccacggctgctggcatgccatctctccagcacacgacaccacctgggatgactcctccccagccagcagctcccactcagccatcaactcctgtgtcgtcttccgggcagactcccaccccgactcctggctcagtgcccagtgctacccaaacccagagcacccctacagtccaggcagcagcccaggcccaggtgaccccgcagcctcaaaccccagttcagcccccgtctgtggctacccctcagtcatcgcagcaacagccgacgcctgtgcacgcccagcctcctggcacaccgctttcccaggcagcagccagcattgataacagagtccctaccccctcctcggtggccagcgcagaaaccaattcccagcagccaggacctgacgtacctgtgctggaaatgaagacggagacccaagcagaggacactgagcccgatcctggtgaatccaaaggggagcccaggtctgagatgatggaggaggatttgcaaggagcttcccaagttaaagaagaaacagacatagcagagcagaaatcagaaccaatggaagtggatgaaaagaaacctgaagtgaaagtagaagttaaagaggaagaagagagtagcagtaacggcacagcctctcagtcaacatctccttcgcagccgcgcaaaaaaatctttaaaccagaggagttacgccaggccctcatgccaaccctagaagcactgtatcgacaggacccagagtcattacctttccggcagcctgtagatccccagctcctcggaattccagactattttgacatcgtaaagaatcccatggacctctccaccatcaagcggaagctggacacagggcaataccaagagccctggcagtacgtggacgacgtctggctcatgttcaacaatgcctggctctataatcgcaagacatcccgagtctataagttttgcagtaagcttgcagaggtctttgagcaggaaattgaccctgtcatgcagtcccttggatattgctgtggacgcaagtatgagttttccccacagactttgtgctgctatgggaagcagctgtgtaccattcctcgcgatgctgcctactacagctatcagaataggtatcatttctgtgagaagtgtttcacagagatccagggcgagaatgtgaccctgggtgacgacccttcacagccccagacgacaatttcaaaggatcagtttgaaaagaagaaaaatgataccttagaccccgaacctttcgttgattgcaaggagtgtggccggaagatgcatcagatttgcgttctgcactatgacatcatttggccttcaggttttgtgtgcgacaactgcttgaagaaaactggcagacctcgaaaagaaaacaaattcagtgctaagaggctgcagaccacaagactgggaaaccacttggaagaccgagtgaacaaatttttgcggcgccagaatcaccctgaagccggggaggtttttgtccgagtggtggccagctcagacaagacggtggaggtcaagcccgggatgaagtcacggtttgtggattctggggaaatgtctgaatctttcccatatcgaaccaaagctctgtttgcttttgaggaaattgacggcgtggatgtctgcttttttggaatgcacgtccaagaatacggctctgattgcccccctccaaacacgaggcgtgtgtacatttcttatctggatagtattcatttcttccggccacgttgcctccgcacagccgtttaccatgagatccttattggatatttagagtatgtgaagaaattagggtatgtgacagggcacatctgggcctgtcctccaagtgaaggagatgattacatcttccattgccacccacctgatcaaaaaatacccaagccaaaacgactgcaggagtggtacaaaaagatgctggacaaggcgtttgcagagcggatcatccatgactacaaggatattttcaaacaagcaactgaagacaggctcaccagtgccaaggaactgccctattttgaaggtgatttctggcccaatgtgttagaagagagcattaaggaactagaacaagaagaagaggagaggaaaaaggaagagagcactgcagccagtgaaaccactgagggcagtcagggcgacagcaagaatgccaagaagaagaacaacaagaaaaccaacaagaacaaaagcagcatcagccgcgccaacaagaagaagcccagcatgcccaacgtgtccaatgacctgtcccagaagctgtatgccaccatggagaagcacaaggaggtcttcttcgtgatccacctgcacgctgggcctgtcatcaacaccctgccccccatcgtcgaccccgaccccctgctcagctgtgacctcatggatgggcgcgacgccttcctcaccctcgccagagacaagcactgggagttctcctccttgcgccgctccaagtggtccacgctctgcatgctggtggagctgcacacccagggccaggaccgctttgtctacacctgcaacgagtgcaagcaccacgtggagacgcgctggcactgcactgtgtgcgaggactacgacctctgcatcaactgctataacacgaagagccatgcccataagatggtgaagtgggggctgggcctggatgacgagggcagcagccagggcgagccacagtcaaagagcccccaggagtcacgccggctgagcatccagcgctgcatccagtcgctggtgcacgcgtgccagtgccgcaacgccaactgctcgctgccatcctgccagaagatgaagcgggtggtgcagcacaccaagggctgcaaacgcaagaccaacgggggctgcccggtgtgcaagcagctcatcgccctctgctgctaccacgccaagcactgccaagaaaacaaatgccccgtgcccttctgcctcaacatcaaacacaagctccgccagcagcagatccagcaccgcctgcagcaggcccagctcatgcgccggcggatggccaccatgaacacccgcaacgtgcctcagcagagtctgccttctcctacctcagcaccgcccgggacccccacacagcagcccagcacaccccagacgccgcagccccctgcccagccccaaccctcacccgtgagcatgtcaccagctggcttccccagcgtggcccggactcagccccccaccacggtgtccacagggaagcctaccagccaggtgccggcccccccacccccggcccagccccctcctgcagcggtggaagcggctcggcagatcgagcgtgaggcccagcagcagcagcacctgtaccgggtgaacatcaacaacagcatgcccccaggacgcacgggcatggggaccccggggagccagatggcccccgtgagcctgaatgtgccccgacccaaccaggtgagcgggcccgtcatgcccagcatgcctcccgggcagtggcagcaggcgccccttccccagcagcagcccatgccaggcttgcccaggcctgtgatatccatgcaggcccaggcggccgtggctgggccccggatgcccagcgtgcagccacccaggagcatctcacccagcgctctgcaagacctgctgcggaccctgaagtcgcccagctcccctcagcagcaacagcaggtgctgaacattctcaaatcaaacccgcagctaatggcagctttcatcaaacagcgcacagccaagtacgtggccaatcagcccggcatgcagccccagcctggcctccagtcccagcccggcatgcaaccccagcctggcatgcaccagcagcccagcctgcagaacctgaatgccatgcaggctggcgtgccgcggcccggtgtgcctccacagcagcaggcgatgggaggcctgaacccccagggccaggccttgaacatcatgaacccaggacacaaccccaacatggcgagtatgaatccacagtaccgagaaatgttacggaggcagctgctgcagcagcagcagcaacagcagcagcaacaacagcagcaacagcagcagcagcaagggagtgccggcatggctgggggcatggcggggcacggccagttccagcagcctcaaggacccggaggctacccaccggccatgcagcagcagcagcgcatgcagcagcatctccccctccagggcagctccatgggccagatggcggctcagatgggacagcttggccagatggggcagccggggctgggggcagacagcacccccaacatccagcaagccctgcagcagcggattctgcagcaacagcagatgaagcagcagattgggtccccaggccagccgaaccccatgagcccccagcaacacatgctctcaggacagccacaggcctcgcatctccctggccagcagatcgccacgtcccttagtaaccaggtgcggtctccagcccctgtccagtctccacggccccagtcccagcctccacattccagcccgtcaccacggatacagccccagccttcgccacaccacgtctcaccccagactggttccccccaccccggactcgcagtcaccatggccagctccatagatcagggacacttggggaaccccgaacagagtgcaatgctcccccagctgaacacccccagcaggagtgcgctgtccagcgaactgtccctggtcggggacaccacgggggacacgctagagaagtttgtggagggcttgtagcattgtgagagcatcaccttttccctttcatgttcttggaccttttgtactgaaaatccaggcatctaggttctttttattcctagatggaactgcgacttccgagccatggaagggtggattgatgtttaaagaaacaatacaaagaatatatttttttgttaaaaacc

SEQ ID NO: 439531 - DNA, 7128 bp, Homo sapiens
tcagtgctttctgatcattcacagctttcccaggcagcagccagcattgataacagagtccctaccccctcctcggtggccagcgcagaaaccaattcccagcagccaggacctgacgtacctgtgctggaaatgaagacggagacccaagcagaggacactgagcccgatcctggtgaatccaaaggggagcccaggtctgagatgatggaggaggatttgcaaggagcttcccaagttaaagaagaaacagacatagcagagcagaaatcagaaccaatggaagtggatgaaaagaaacctgaagtgaaagtagaagttaaagaggaagaagagagtagcagtaacggcacagcctctcagtcaacatctccttcgcagccgcgcaaaaaaatctttaaaccagaggagttacgccaggccctcatgccaaccctagaagcactgtatcgacaggacccagagtcattacctttccggcagcctgtagatccccagctcctcggaattccagactattttgacatcgtaaagaatcccatggacctctccaccatcaagcggaagctggacacagggcaataccaagagccctggcagtacgtggacgacgtctggctcatgttcaacaatgcctggctctataatcgcaagacatcccgagtctataagttttgcagtaagcttgcagaggtctttgagcaggaaattgaccctgtcatgcagtcccttggatattgctgtggacgcaagtatgagttttccccacagactttgtgctgctatgggaagcagctgtgtaccattcctcgcgatgctgcctactacagctatcagaataggtatcatttctgtgagaagtgtttcacagagatccagggcgagaatgtgaccctgggtgacgacccttcacagccccagacgacaatttcaaaggatcagtttgaaaagaagaaaaatgataccttagaccccgaacctttcgttgattgcaaggagtgtggccggaagatgcatcagatttgcgttctgcactatgacatcatttggccttcaggttttgtgtgcgacaactgcttgaagaaaactggcagacctcgaaaagaaaacaaattcagtgctaagaggctgcagaccacaagactgggaaaccacttggaagaccgagtgaacaaatttttgcggcgccagaatcaccctgaagccggggaggtttttgtccgagtggtggccagctcagacaagacggtggaggtcaagcccgggatgaagtcacggtttgtggattctggggaaatgtctgaatctttcccatatcgaaccaaagctctgtttgcttttgaggaaattgacggcgtggatgtctgcttttttggaatgcacgtccaagaatacggctctgattgcccccctccaaacacgaggcgtgtgtacatttcttatctggatagtattcatttcttccggccacgttgcctccgcacagccgtttaccatgagatccttattggatatttagagtatgtgaagaaattagggtatgtgacagggcacatctgggcctgtcctccaagtgaaggagatgattacatcttccattgccacccacctgatcaaaaaatacccaagccaaaacgactgcaggagtggtacaaaaagatgctggacaaggcgtttgcagagcggatcatccatgactacaaggatattttcaaacaagcaactgaagacaggctcaccagtgccaaggaactgccctattttgaaggtgatttctggcccaatgtgttagaagagagcattaaggaactagaacaagaagaagaggagaggaaaaaggaagagagcactgcagccagtgaaaccactgagggcagtcagggcgacagcaagaatgccaagaagaagaacaacaagaaaaccaacaagaacaaaagcagcatcagccgcgccaacaagaagaagcccagcatgcccaacgtgtccaatgacctgtcccagaagctgtatgccaccatggagaagcacaaggaggtcttcttcgtgatccacctgcacgctgggcctgtcatcaacaccctgccccccatcgtcgaccccgaccccctgctcagctgtgacctcatggatgggcgcgacgccttcctcaccctcgccagagacaagcactgggagttctcctccttgcgccgctccaagtggtccacgctctgcatgctggtggagctgcacacccagggccaggaccgctttgtctacacctgcaacgagtgcaagcaccacgtggagacgcgctggcactgcactgtgtgcgaggactacgacctctgcatcaactgctataacacgaagagccatgcccataagatggtgaagtgggggctgggcctggatgacgagggcagcagccagggcgagccacagtcaaagagcccccaggagtcacgccggctgagcatccagcgctgcatccagtcgctggtgcacgcgtgccagtgccgcaacgccaactgctcgctgccatcctgccagaagatgaagcgggtggtgcagcacaccaagggctgcaaacgcaagaccaacgggggctgcccggtgtgcaagcagctcatcgccctctgctgctaccacgccaagcactgccaagaaaacaaatgccccgtgcccttctgcctcaacatcaaacacaagctccgccagcagcagatccagcaccgcctgcagcaggcccagctcatgcgccggcggatggccaccatgaacacccgcaacgtgcctcagcagagtctgccttctcctacctcagcaccgcccgggacccccacacagcagcccagcacaccccagacgccgcagccccctgcccagccccaaccctcacccgtgagcatgtcaccagctggcttccccagcgtggcccggactcagccccccaccacggtgtccacagggaagcctaccagccaggtgccggcccccccacccccggcccagccccctcctgcagcggtggaagcggctcggcagatcgagcgtgaggcccagcagcagcagcacctgtaccgggtgaacatcaacaacagcatgcccccaggacgcacgggcatggggaccccggggagccagatggcccccgtgagcctgaatgtgccccgacccaaccaggtgagcgggcccgtcatgcccagcatgcctcccgggcagtggcagcaggcgccccttccccagcagcagcccatgccaggcttgcccaggcctgtgatatccatgcaggcccaggcggccgtggctgggccccggatgcccagcgtgcagccacccaggagcatctcacccagcgctctgcaagacctgctgcggaccctgaagtcgcccagctcccctcagcagcaacagcaggtgctgaacattctcaaatcaaacccgcagctaatggcagctttcatcaaacagcgcacagccaagtacgtggccaatcagcccggcatgcagccccagcctggcctccagtcccagcccggcatgcaaccccagcctggcatgcaccagcagcccagcctgcagaacctgaatgccatgcaggctggcgtgccgcggcccggtgtgcctccacagcagcaggcgatgggaggcctgaacccccagggccaggccttgaacatcatgaacccaggacacaaccccaacatggcgagtatgaatccacagtaccgagaaatgttacggaggcagctgctgcagcagcagcagcaacagcagcagcaacaacagcagcaacagcagcagcagcaagggagtgccggcatggctgggggcatggcggggcacggccagttccagcagcctcaaggacccggaggctacccaccggccatgcagcagcagcagcgcatgcagcagcatctccccctccagggcagctccatgggccagatggcggctcagatgggacagcttggccagatggggcagccggggctgggggcagacagcacccccaacatccagcaagccctgcagcagcggattctgcagcaacagcagatgaagcagcagattgggtccccaggccagccgaaccccatgagcccccagcaacacatgctctcaggacagccacaggcctcgcatctccctggccagcagatcgccacgtcccttagtaaccaggtgcggtctccagcccctgtccagtctccacggccccagtcccagcctccacattccagcccgtcaccacggatacagccccagccttcgccacaccacgtctcaccccagactggttccccccaccccggactcgcagtcaccatggccagctccatagatcagggacacttggggaaccccgaacagagtgcaatgctcccccagctgaacacccccagcaggagtgcgctgtccagcgaactgtccctggtcggggacaccacgggggacacgctagagaagtttgtggagggcttgtagcattgtgagagcatcaccttttccctttcatgttcttggaccttttgtactgaaaatccaggcatctaggttctttttattcctagatggaactgcgacttccgagccatggaagggtggattgatgtttaaagaaacaatacaaagaatatatttttttgttaaaaaccagttgatttaaatatctggtctctctctttggtttttttttggcgggggggtggggggggttcttttttttccgttttgtttttgtttggggggaggggggttttgtttggattctttttgtcgtcattgctggtgactcatgcctttttttaacgggaaaaacaagttcattatattcatattttttatttgtattttcaagactttaaacatttatgtttaaaagtaagaagaaaaataatattcagaactgattcctgaaataatgcaagcttataatgtatcccgataactttgtgatgtttcgggaagatttttttctatagtgaactctgtgggcgtctcccagtattaccctggatgataggaattgactccggcgtgcacacacgtacacacccacacacatctatctatacataatggctgaagccaaacttgtcttgcagatgtagaaattgttgctttgtttctctgataaaactggttttagacaaaaaatagggatgatcactcttagaccatgctaatgttactagagaagaagccttcttttctttcttctatgtgaaacttgaaatgaggaaaagcaattctagtgtaaatcatgcaagcgctctaattcctataaatacgaaactcgagaagattcaatcactgtatagaatggtaaaataccaactcatttcttatatcatattgttaaataaactgtgtgcaacagacaaaaagggtggtccttcttgaattcatgtacatggtattaacacttagtgttcggggttttttgttatgaaaatgctgttttcaacattgtatttggactatgcatgtgttttttccccattgtatataaagtaccgcttaaaattgatataaattactgaggtttttaacatgtattctgttctttaagatccctgtaagaatgtttaaggtttttatttatttatatatattttttgagtctgttctttgtaagacatggttctggttgttcgctcatagcggagaggctggggctgcggttgtggttgtggcggcgtgggtggtggctgggaactgtggcccaggcttagcggccgcccggaggcttttcttcccggagactgaggtgggcggctcagcgttggccccacacattcgaggctcacaggtgattgtcgctcacacagttagggtcgtcagttggtctgaaactgcatttggcccactcctccatcctccctgtccgtcgtagctgccacccccagaggcggcgcttcttcccgtgttcaggcggctccccccccccgtacacgactcccagaatctgaggcagagagtgctccaggctcgcgaggtgctttctgacttccccccaaatcctgccgctgccgcgcagcatgtcccgtgtggcgtttgaggaaatgctgagggacagacaccttggagcaccagctccggtccctgttacagtgagaaaggtcccccacttcgggggatacttgcacttagccacatggtcctgcctcccttggagtccagttccaggctcccttactgagtgggtgagacaagttcacaaaaaccgtaaaactgagaggaggaccatgggcaggggagctgaagttcatcccctaagtctaccacccccagcacccagagaacccactttatccctagtcccccaacaaaggctggtctaggtgggggtgatggtaattttagaaatcacgccccaaatagcttccgtttgggcccttacattcacagataggttttaaatagctgaatacttggtttgggaatctgaattcgaggaacctttctaagaaattggaaaggtccgatctagttttagcacagagctttgaaccttgagttataaaatgcagaataattcaagtaaaaataagaccaccatctggcacccctgaccagcccccattcaccccatcccaggaggggaagcacaggccgggcctccgggtggagattgctgccactgctcggcctgctgggttcttaacctccagtgtcctcttcatcttttccacccgtagggaaaccttgagccatgtgttcaaacaagaagtggggctagagcccgagagcagcagctctaagcccacactcagaaagtggcgccctcctggttgtgcagccttttaatgtgggcagtggaggggcctctgtttcaggttatcctggaattcaaaacgttatgtaccaacctcatcctctttggagtctgcatcctgtgcaaccgtcttgggcaatccagatgtcgaaggatgtgaccgagagcatggtctgtggatgctaaccctaagtttgtcgtaaggaaatttctgtaagaaacctggaaagccccaacgctgtgtctcatgctgtatacttaagaggagaagaaaaagtcctatatttgtgatcaaaaagaggaaacttgaaatgtgatggtgtttataataaaagatggtaaaactacttggattcaaaaat

SEQ ID NO: 439532 - DNA, 6763 bp, Homo sapiens
tggcagagcgcatcaccacattgcgcctggtttcctggacaagatgacatttacattgaaggtgcagaccattctagatacacaggcatgaaagaacacaggttgctccataaaactaccaggcccctagaatgggtggttgttagtccgagcttaacttcatgaagggcccttaccctgtctcttgacgtttagactttatcctataatgtgctgaggaggttttgaagaatagccctggttctagtgtaagagggtcatctttggtctatgaggtgaactgcactccagcctgggcaacagagcaagaccttgtctctgaaaaaacagaaggaaaagaaatgatagtggaatatgtagaaaaagacattgtagtgttctacgaaattaaattttctgttcattccgttattacatgtacttgagattttaaggggccatcatgtctttttgtttgaagaactagttacaaaataacattccagagaccctatagtttatactcaacagataaattttagttaataaaacatgttttcttattttaaaacaaggacagacaatttcaaaggatcagtttgaaaagaagaaaaatgataccttagaccccgaacctttcgttgattgcaaggagtgtggccggaagatgcatcagatttgcgttctgcactatgacatcatttggccttcaggttttgtgtgcgacaactgcttgaagaaaactggcagacctcgaaaagaaaacaaattcagtgctaagaggctgcagaccacaagactgggaaaccacttggaagaccgagtgaacaaatttttgcggcgccagaatcaccctgaagccggggaggtttttgtccgagtggtggccagctcagacaagacggtggaggtcaagcccgggatgaagtcacggtttgtggattctggggaaatgtctgaatctttcccatatcgaaccaaagctctgtttgcttttgaggaaattgacggcgtggatgtctgcttttttggaatgcacgtccaagaatacggctctgattgcccccctccaaacacgaggcgtgtgtacatttcttatctggatagtattcatttcttccggccacgttgcctccgcacagccgtttaccatgagatccttattggatatttagagtatgtgaagaaattagggtatgtgacagggcacatctgggcctgtcctccaagtgaaggagatgattacatcttccattgccacccacctgatcaaaaaatacccaagccaaaacgactgcaggagtggtacaaaaagatgctggacaaggcgtttgcagagcggatcatccatgactacaaggatattttcaaacaagcaactgaagacaggctcaccagtgccaaggaactgccctattttgaaggtgatttctggcccaatgtgttagaagagagcattaaggaactagaacaagaagaagaggagaggaaaaaggaagagagcactgcagccagtgaaaccactgagggcagtcagggcgacagcaagaatgccaagaagaagaacaacaagaaaaccaacaagaacaaaagcagcatcagccgcgccaacaagaagaagcccagcatgcccaacgtgtccaatgacctgtcccagaagctgtatgccaccatggagaagcacaaggaggtcttcttcgtgatccacctgcacgctgggcctgtcatcaacaccctgccccccatcgtcgaccccgaccccctgctcagctgtgacctcatggatgggcgcgacgccttcctcaccctcgccagagacaagcactgggagttctcctccttgcgccgctccaagtggtccacgctctgcatgctggtggagctgcacacccagggccaggaccgctttgtctacacctgcaacgagtgcaagcaccacgtggagacgcgctggcactgcactgtgtgcgaggactacgacctctgcatcaactgctataacacgaagagccatgcccataagatggtgaagtgggggctgggcctggatgacgagggcagcagccagggcgagccacagtcaaagagcccccaggagtcacgccggctgagcatccagcgctgcatccagtcgctggtgcacgcgtgccagtgccgcaacgccaactgctcgctgccatcctgccagaagatgaagcgggtggtgcagcacaccaagggctgcaaacgcaagaccaacgggggctgcccggtgtgcaagcagctcatcgccctctgctgctaccacgccaagcactgccaagaaaacaaatgccccgtgcccttctgcctcaacatcaaacacaagctccgccagcagcagatccagcaccgcctgcagcaggcccagctcatgcgccggcggatggccaccatgaacacccgcaacgtgcctcagcagagtctgccttctcctacctcagcaccgcccgggacccccacacagcagcccagcacaccccagacgccgcagccccctgcccagccccaaccctcacccgtgagcatgtcaccagctggcttccccagcgtggcccggactcagccccccaccacggtgtccacagggaagcctaccagccaggtgccggcccccccacccccggcccagccccctcctgcagcggtggaagcggctcggcagatcgagcgtgaggcccagcagcagcagcacctgtaccgggtgaacatcaacaacagcatgcccccaggacgcacgggcatggggaccccggggagccagatggcccccgtgagcctgaatgtgccccgacccaaccaggtgagcgggcccgtcatgcccagcatgcctcccgggcagtggcagcaggcgccccttccccagcagcagcccatgccaggcttgcccaggcctgtgatatccatgcaggcccaggcggccgtggctgggccccggatgcccagcgtgcagccacccaggagcatctcacccagcgctctgcaagacctgctgcggaccctgaagtcgcccagctcccctcagcagcaacagcaggtgctgaacattctcaaatcaaacccgcagctaatggcagctttcatcaaacagcgcacagccaagtacgtggccaatcagcccggcatgcagccccagcctggcctccagtcccagcccggcatgcaaccccagcctggcatgcaccagcagcccagcctgcagaacctgaatgccatgcaggctggcgtgccgcggcccggtgtgcctccacagcagcaggcgatgggaggcctgaacccccagggccaggccttgaacatcatgaacccaggacacaaccccaacatggcgagtatgaatccacagtaccgagaaatgttacggaggcagctgctgcagcagcagcagcaacagcagcagcaacaacagcagcaacagcagcagcagcaagggagtgccggcatggctgggggcatggcggggcacggccagttccagcagcctcaaggacccggaggctacccaccggccatgcagcagcagcagcgcatgcagcagcatctccccctccagggcagctccatgggccagatggcggctcagatgggacagcttggccagatggggcagccggggctgggggcagacagcacccccaacatccagcaagccctgcagcagcggattctgcagcaacagcagatgaagcagcagattgggtccccaggccagccgaaccccatgagcccccagcaacacatgctctcaggacagccacaggcctcgcatctccctggccagcagatcgccacgtcccttagtaaccaggtgcggtctccagcccctgtccagtctccacggccccagtcccagcctccacattccagcccgtcaccacggatacagccccagccttcgccacaccacgtctcaccccagactggttccccccaccccggactcgcagtcaccatggccagctccatagatcagggacacttggggaaccccgaacagagtgcaatgctcccccagctgaacacccccagcaggagtgcgctgtccagcgaactgtccctggtcggggacaccacgggggacacgctagagaagtttgtggagggcttgtagcattgtgagagcatcaccttttccctttcatgttcttggaccttttgtactgaaaatccaggcatctaggttctttttattcctagatggaactgcgacttccgagccatggaagggtggattgatgtttaaagaaacaatacaaagaatatatttttttgttaaaaaccagttgatttaaatatctggtctctctctttggtttttttttggcgggggggtggggggggttcttttttttccgttttgtttttgtttggggggaggggggttttgtttggattctttttgtcgtcattgctggtgactcatgcctttttttaacgggaaaaacaagttcattatattcatattttttatttgtattttcaagactttaaacatttatgtttaaaagtaagaagaaaaataatattcagaactgattcctgaaataatgcaagcttataatgtatcccgataactttgtgatgtttcgggaagatttttttctatagtgaactctgtgggcgtctcccagtattaccctggatgataggaattgactccggcgtgcacacacgtacacacccacacacatctatctatacataatggctgaagccaaacttgtcttgcagatgtagaaattgttgctttgtttctctgataaaactggttttagacaaaaaatagggatgatcactcttagaccatgctaatgttactagagaagaagccttcttttctttcttctatgtgaaacttgaaatgaggaaaagcaattctagtgtaaatcatgcaagcgctctaattcctataaatacgaaactcgagaagattcaatcactgtatagaatggtaaaataccaactcatttcttatatcatattgttaaataaactgtgtgcaacagacaaaaagggtggtccttcttgaattcatgtacatggtattaacacttagtgttcggggttttttgttatgaaaatgctgttttcaacattgtatttggactatgcatgtgttttttccccattgtatataaagtaccgcttaaaattgatataaattactgaggtttttaacatgtattctgttctttaagatccctgtaagaatgtttaaggtttttatttatttatatatattttttgagtctgttctttgtaagacatggttctggttgttcgctcatagcggagaggctggggctgcggttgtggttgtggcggcgtgggtggtggctgggaactgtggcccaggcttagcggccgcccggaggcttttcttcccggagactgaggtgggcggctcagcgttggccccacacattcgaggctcacaggtgattgtcgctcacacagttagggtcgtcagttggtctgaaactgcatttggcccactcctccatcctccctgtccgtcgtagctgccacccccagaggcggcgcttcttcccgtgttcaggcggctccccccccccgtacacgactcccagaatctgaggcagagagtgctccaggctcgcgaggtgctttctgacttccccccaaatcctgccgctgccgcgcagcatgtcccgtgtggcgtttgaggaaatgctgagggacagacaccttggagcaccagctccggtccctgttacagtgagaaaggtcccccacttcgggggatacttgcacttagccacatggtcctgcctcccttggagtccagttccaggctcccttactgagtgggtgagacaagttcacaaaaaccgtaaaactgagaggaggaccatgggcaggggagctgaagttcatcccctaagtctaccacccccagcacccagagaacccactttatccctagtcccccaacaaaggctggtctaggtgggggtgatggtaattttagaaatcacgccccaaatagcttccgtttgggcccttacattcacagataggttttaaatagctgaatacttggtttgggaatctgaattcgaggaacctttctaagaaattggaaaggtccgatctagttttagcacagagctttgaaccttgagttataaaatgcagaataattcaagtaaaaataagaccaccatctggcacccctgaccagcccccattcaccccatcccaggaggggaagcacaggccgggcctccgggtggagattgctgccactgctcggcctgctgggttcttaacctccagtgtcctcttcatcttttccacccgtagggaaaccttgagccatgtgttcaaacaagaagtggggctagagcccgagagcagcagctctaagcccacactcagaaagtggcgccctcctggttgtgcagccttttaatgtgggcagtggaggggcctctgtttcaggttatcctggaattcaaaacgttatgtaccaacctcatcctctttggagtctgcatcctgtgcaaccgtcttgggcaatccagatgtcgaaggatgtgaccgagagcatggtctgtggatgctaaccctaagtttgtcgtaaggaaatttctgtaagaaacctggaaagccccaacgctgtgtctcatgctgtatacttaagaggagaagaaaaagtcctatatttgtgatcaaaaagaggaaacttgaaatgtgatggtgtttataataaaagatggtaaaactacttggattcaaaaat

SEQ ID NO: 439533 - DNA, 6467 bp, Homo sapiens
gaggccaatgccaagattagaacccacatttgagatcgatgaagaagaggaggaagaggatgaaaatgaacttttccctagagaatacttccgtcgtttgtcttcgcaggatgtactcaggtgtcagtcctcttctaagaggaagtctaaagatgaagaagaagatgaagagtcagatgatgctgatgattttggatcattgtttgacttggaaaatgatcttcctgatgagctgatacccaatggaggagaattaggccttttaaacagtgggaaccttgttccagatgctgcttccaaacataaacaactgtcggagcttctacgaggaggcagcggctctagtatcaacccaggaataggaaatgtgagcgccagcagccccgtgcagcagggcctgggtggccaggctcaagggcagccgaacagtgctaacatggccagcctcagtgccatgggcaagagccctctgagccagggagattcttcagcccccagcctgcctaaacaggcagccagcacctctgggcccacccccgctgcctcccaagcactgaatccgcaagcacaaaagcaagtggggctggcgactagcagccctgccacgtcacagactggacctggtatctgcatgaatgctaactttaaccagacccacccaggcctcctcaatagtaactctggccatagcttaattaatcaggcttcacaagggcaggcgcaagtcatgaatggatctcttggggctgctggcagaggaaggggagctggaatgccgtaccctactccagccatgcagggcgcctcgagcagcgtgctggctgagaccctaacgcaggtttccccgcaaatgactggtcacgcgggactgaacaccgcacaggcaggaggcatggccaaggtaagtgaactgaagcactttcaatacttcctacctaaccgcgggctttccctccgagtaatgcgtaaaatgggaccacgtggcccactcctgtttttcctcttgggctctccacgtgccactcatgcttggaagagacagatttctttctaggataaagatctctgccccatttctgtctttaaaatgagaattcttaaagaagtagggacagcttgcaggtcaggcagtttacagcgtcagggcagtttacagcgtcagggcagtttacagcgtcagggcagtttacagcgtcagggcagtttacagaggcagtcagggcgacagcaagaatgccaagaagaagaacaacaagaaaaccaacaagaacaaaagcagcatcagccgcgccaacaagaagaagcccagcatgcccaacgtgtccaatgacctgtcccagaagctgtatgccaccatggagaagcacaaggaggtcttcttcgtgatccacctgcacgctgggcctgtcatcaacaccctgccccccatcgtcgaccccgaccccctgctcagctgtgacctcatggatgggcgcgacgccttcctcaccctcgccagagacaagcactgggagttctcctccttgcgccgctccaagtggtccacgctctgcatgctggtggagctgcacacccagggccaggaccgctttgtctacacctgcaacgagtgcaagcaccacgtggagacgcgctggcactgcactgtgtgcgaggactacgacctctgcatcaactgctataacacgaagagccatgcccataagatggtgaagtgggggctgggcctggatgacgagggcagcagccagggcgagccacagtcaaagagcccccaggagtcacgccggctgagcatccagcgctgcatccagtcgctggtgcacgcgtgccagtgccgcaacgccaactgctcgctgccatcctgccagaagatgaagcgggtggtgcagcacaccaagggctgcaaacgcaagaccaacgggggctgcccggtgtgcaagcagctcatcgccctctgctgctaccacgccaagcactgccaagaaaacaaatgccccgtgcccttctgcctcaacatcaaacacaagctccgccagcagcagatccagcaccgcctgcagcaggcccagctcatgcgccggcggatggccaccatgaacacccgcaacgtgcctcagcagagtctgccttctcctacctcagcaccgcccgggacccccacacagcagcccagcacaccccagacgccgcagccccctgcccagccccaaccctcacccgtgagcatgtcaccagctggcttccccagcgtggcccggactcagccccccaccacggtgtccacagggaagcctaccagccaggtgccggcccccccacccccggcccagccccctcctgcagcggtggaagcggctcggcagatcgagcgtgaggcccagcagcagcagcacctgtaccgggtgaacatcaacaacagcatgcccccaggacgcacgggcatggggaccccggggagccagatggcccccgtgagcctgaatgtgccccgacccaaccaggtgagcgggcccgtcatgcccagcatgcctcccgggcagtggcagcaggcgccccttccccagcagcagcccatgccaggcttgcccaggcctgtgatatccatgcaggcccaggcggccgtggctgggccccggatgcccagcgtgcagccacccaggagcatctcacccagcgctctgcaagacctgctgcggaccctgaagtcgcccagctcccctcagcagcaacagcaggtgctgaacattctcaaatcaaacccgcagctaatggcagctttcatcaaacagcgcacagccaagtacgtggccaatcagcccggcatgcagccccagcctggcctccagtcccagcccggcatgcaaccccagcctggcatgcaccagcagcccagcctgcagaacctgaatgccatgcaggctggcgtgccgcggcccggtgtgcctccacagcagcaggcgatgggaggcctgaacccccagggccaggccttgaacatcatgaacccaggacacaaccccaacatggcgagtatgaatccacagtaccgagaaatgttacggaggcagctgctgcagcagcagcagcaacagcagcagcaacaacagcagcaacagcagcagcagcaagggagtgccggcatggctgggggcatggcggggcacggccagttccagcagcctcaaggacccggaggctacccaccggccatgcagcagcagcagcgcatgcagcagcatctccccctccagggcagctccatgggccagatggcggctcagatgggacagcttggccagatggggcagccggggctgggggcagacagcacccccaacatccagcaagccctgcagcagcggattctgcagcaacagcagatgaagcagcagattgggtccccaggccagccgaaccccatgagcccccagcaacacatgctctcaggacagccacaggcctcgcatctccctggccagcagatcgccacgtcccttagtaaccaggtgcggtctccagcccctgtccagtctccacggccccagtcccagcctccacattccagcccgtcaccacggatacagccccagccttcgccacaccacgtctcaccccagactggttccccccaccccggactcgcagtcaccatggccagctccatagatcagggacacttggggaaccccgaacagagtgcaatgctcccccagctgaacacccccagcaggagtgcgctgtccagcgaactgtccctggtcggggacaccacgggggacacgctagagaagtttgtggagggcttgtagcattgtgagagcatcaccttttccctttcatgttcttggaccttttgtactgaaaatccaggcatctaggttctttttattcctagatggaactgcgacttccgagccatggaagggtggattgatgtttaaagaaacaatacaaagaatatatttttttgttaaaaaccagttgatttaaatatctggtctctctctttggtttttttttggcgggggggtggggggggttcttttttttccgttttgtttttgtttggggggaggggggttttgtttggattctttttgtcgtcattgctggtgactcatgcctttttttaacgggaaaaacaagttcattatattcatattttttatttgtattttcaagactttaaacatttatgtttaaaagtaagaagaaaaataatattcagaactgattcctgaaataatgcaagcttataatgtatcccgataactttgtgatgtttcgggaagatttttttctatagtgaactctgtgggcgtctcccagtattaccctggatgataggaattgactccggcgtgcacacacgtacacacccacacacatctatctatacataatggctgaagccaaacttgtcttgcagatgtagaaattgttgctttgtttctctgataaaactggttttagacaaaaaatagggatgatcactcttagaccatgctaatgttactagagaagaagccttcttttctttcttctatgtgaaacttgaaatgaggaaaagcaattctagtgtaaatcatgcaagcgctctaattcctataaatacgaaactcgagaagattcaatcactgtatagaatggtaaaataccaactcatttcttatatcatattgttaaataaactgtgtgcaacagacaaaaagggtggtccttcttgaattcatgtacatggtattaacacttagtgttcggggttttttgttatgaaaatgctgttttcaacattgtatttggactatgcatgtgttttttccccattgtatataaagtaccgcttaaaattgatataaattactgaggtttttaacatgtattctgttctttaagatccctgtaagaatgtttaaggtttttatttatttatatatattttttgagtctgttctttgtaagacatggttctggttgttcgctcatagcggagaggctggggctgcggttgtggttgtggcggcgtgggtggtggctgggaactgtggcccaggcttagcggccgcccggaggcttttcttcccggagactgaggtgggcggctcagcgttggccccacacattcgaggctcacaggtgattgtcgctcacacagttagggtcgtcagttggtctgaaactgcatttggcccactcctccatcctccctgtccgtcgtagctgccacccccagaggcggcgcttcttcccgtgttcaggcggctccccccccccgtacacgactcccagaatctgaggcagagagtgctccaggctcgcgaggtgctttctgacttccccccaaatcctgccgctgccgcgcagcatgtcccgtgtggcgtttgaggaaatgctgagggacagacaccttggagcaccagctccggtccctgttacagtgagaaaggtcccccacttcgggggatacttgcacttagccacatggtcctgcctcccttggagtccagttccaggctcccttactgagtgggtgagacaagttcacaaaaaccgtaaaactgagaggaggaccatgggcaggggagctgaagttcatcccctaagtctaccacccccagcacccagagaacccactttatccctagtcccccaacaaaggctggtctaggtgggggtgatggtaattttagaaatcacgccccaaatagcttccgtttgggcccttacattcacagataggttttaaatagctgaatacttggtttgggaatctgaattcgaggaacctttctaagaaattggaaaggtccgatctagttttagcacagagctttgaaccttgagttataaaatgcagaataattcaagtaaaaataagaccaccatctggcacccctgaccagcccccattcaccccatcccaggaggggaagcacaggccgggcctccgggtggagattgctgccactgctcggcctgctgggttcttaacctccagtgtcctcttcatcttttccacccgtagggaaaccttgagccatgtgttcaaacaagaagtggggctagagcccgagagcagcagctctaagcccacactcagaaagtggcgccctcctggttgtgcagccttttaatgtgggcagtggaggggcctctgtttcaggttatcctggaattcaaaacgttatgtaccaacctcatcctctttggagtctgcatcctgtgcaaccgtcttgggcaatccagatgtcgaaggatgtgaccgagagcatggtctgtggatgctaaccctaagtttgtcgtaaggaaatttctgtaagaaacctggaaagccccaacgctgtgtctcatgctgtatacttaagaggagaagaaaaagtcctatatttgtgatcaaaaagaggaaacttgaaatgtgatggtgtttataataaaagatggtaaaactacttggattcaaaaat

SEQ ID NO: 439534 - DNA, 5620 bp, Homo sapiens
gaggccaatgccaagattagaacccacatttgagatcgatgaagaagaggaggaagaggatgaaaatgaacttttccctagagaatacttccgtcgtttgtcttcgcaggatgtactcaggtgtcagtcctcttctaagaggaagtctaaagatgaagaagaagatgaagagtcagatgatgctgatgattttggatcattgtttgacttggaaaatgatcttcctgatgagctgatacccaatggaggagaattaggccttttaaacagtgggaaccttgttccagatgctgcttccaaacataaacaactgtcggagcttctacgaggaggcagcggctctagtatcaacccaggaataggaaatgtgagcgccagcagccccgtgcagcagggcctgggtggccaggctcaagggcagccgaacagtgctaacatggccagcctcagtgccatgggcaagagccctctgagccagggagattcttcagcccccagcctgcctaaacaggcagccagcacctctgggcccacccccgctgcctcccaagcactgaatccgcaagcacaaaagcaagtggggctggcgactagcagccctgccacgtcacagactggacctggtatctgcatgaatgctaactttaaccagacccacccaggcctcctcaatagtaactctggccatagcttaattaatcaggcttcacaagggcaggcgcaagtcatgaatggatctcttggggctgctggcagaggaaggggagctggaatgccgtaccctactccagccatgcagggcgcctcgagcagcgtgctggctgagaccctaacgcaggtttccccgcaaatgactggtcacgcgggactgaacaccgcacaggcaggaggcatggccaagatgggaataactgggaacacaagtccatttggacagccctttagtcaagctggagggcagccaatgggagccactggagtgaacccccagttagccagcaaacagagcatggtcaacagtttgcccaccttccctacagatatcaagaatacttcagtcaccaacgtgccaaatatgtctcagatgcaaacatcagtgggaattgtacccacacaagcaattgcaacaggccccactgcagatcctgaaaaacgcaaactgatacagcagcagctggttctactgcttcatgctcataagtgtcagagacgagagcaagcaaacggagaggttcgggcctgctcgctcccgcattgtcgaaccatgaaaaacgttttgaatcacatgacgcattgtcaggctgggaaagcctgccaagttgcccattgtgcatcttcacgacaaatcatctctcattggaagaactgcacacgacatgactgtcctgtttgcctccctttgaaaaatgccagtgacaagcgaaaccaacaaaccatcctggggtctccagctagtggaattcaaaacacaattggttctgttggcacagggcaacagaatgccacttctttaagtaacccaaatcccatagaccccagctccatgcagcgagcctatgctgctctcggactcccctacatgaaccagccccagacgcagctgcagcctcaggttcctggccagcaaccagcacagcctcaaacccaccagcagatgaggactctcaaccccctgggaaataatccaatgaacattccagcaggaggaataacaacagatcagcagcccccaaacttgatttcagaatcagctcttccgacttccctgggggccacaaacccactgatgaacgatggctccaactctggtaacattggaaccctcagcactataccaacagcagctcctccttctagcaccggtgtaaggaaaggctggcacgaacatgtcactcaggacctgcggagccatctagtgcataaactcgtccaagccatcttcccaacacctgatcccgcagctctaaaggatcgccgcatggaaaacctggtagcctatgctaagaaagtggaaggggacatgtacgagtctgccaacagcagggatgaatattatcacttattagcagagaaaatctacaagatacaaaaagaactagaagaaaaacggaggtcgcgtttacataaacaaggcatcttggggaaccagccagccttaccagccccgggggctcagccccctgtgattccacaggcacaacctgtgagacctccaaatggacccctgtccctgccagtgaatcgcatgcaagtttctcaagggatgaattcatttaaccccatgtccttggggaacgtccagttgccacaagcacccatgggacctcgtgcagcctccccaatgaaccactctgtccagatgaacagcatgggctcagtgccagggatggccatttctccttcccgaatgcctcagcctccgaacatgatgggtgcacacaccaacaacatgatggcccaggcgcccgctcagagccagtttctgccacagaaccagttcccgtcatccagcggggcgatgagtgtgggcatggggcagccgccagcccaaacaggcgtgtcacagggacaggtgcctggtgctgctcttcctaaccctctcaacatgctggggcctcaggccagccagctaccttgccctccagtgacacagtcaccactgcacccaacaccgcctcctgcttccacggctgctggcatgccatctctccagcacacgacaccacctgggatgactcctccccagccagcagctcccactcagccatcaactcctgtgtcgtcttccgggcagactcccaccccgactcctggctcagtgcccagtgctacccaaacccagagcacccctacagtccaggcagcagcccaggcccaggtgaccccgcagcctcaaaccccagttcagcccccgtctgtggctacccctcagtcatcgcagcaacagccgacgcctgtgcacgcccagcctcctggcacaccgctttcccaggcagcagccagcattgataacagagtccctaccccctcctcggtggccagcgcagaaaccaattcccagcagccaggacctgacgtacctgtgctggaaatgaagacggagacccaagcagaggacactgagcccgatcctggtgaatccaaaggggagcccaggtctgagatgatggaggaggatttgcaaggagcttcccaagttaaagaagaaacagacatagcagagcagaaatcagaaccaatggaagtggatgaaaagaaacctgaagtgaaagtagaagttaaagaggaagaagagagtagcagtaacggcacagcctctcagtcaacatctccttcgcagccgcgcaaaaaaatctttaaaccagaggagttacgccaggccctcatgccaaccctagaagcactgtatcgacaggacccagagtcattacctttccggcagcctgtagatccccagctcctcggaattccagactattttgacatcgtaaagaatcccatggacctctccaccatcaagcggaagctggacacagggcaataccaagagccctggcagtacgtggacgacgtctggctcatgttcaacaatgcctggctctataatcgcaagacatcccgagtctataagttttgcagtaagcttgcagaggtctttgagcaggaaattgaccctgtcatgcagtcccttggatattgctgtggacgcaagtatgagttttccccacagactttgtgctgctatgggaagcagctgtgtaccattcctcgcgatgctgcctactacagctatcagaataggtatcatttctgtgagaagtgtttcacagagatccagggcgagaatgtgaccctgggtgacgacccttcacagccccagacgacaatttcaaaggatcagtttgaaaagaagaaaaatgataccttagaccccgaacctttcgttgattgcaaggagtgtggccggaagatgcatcagatttgcgttctgcactatgacatcatttggccttcaggttttgtgtgcgacaactgcttgaagaaaactggcagacctcgaaaagaaaacaaattcagtgctaagaggctgcagaccacaagactgggaaaccacttggaagaccgagtgaacaaatttttgcggcgccagaatcaccctgaagccggggaggtttttgtccgagtggtggccagctcagacaagacggtggaggtcaagcccgggatgaagtcacggtttgtggattctggggaaatgtctgaatctttcccatatcgaaccaaagctctgtttgcttttgaggaaattgacggcgtggatgtctgcttttttggaatgcacgtccaagaatacggctctgattgcccccctccaaacacgaggtagttttccagctccttccagggcgtgtcattcagtgagccgtgttaggatagaccagggctcttaagtgtcccagaggagcctgtgagccttcataggggattaaagtaaatgaaaccacaattaactaaccaaagtagttagttttgttttccattaaactagcgggaaatgaactgttgagatgactgcagtgagcgtgttttgtgtggcgagtctgtgtgggaccccgctcttacctaacgcaggtaaacctggggagttgggattgggacagcctggcacctgaaccagaggaagtaagctctgccacgagggcttcatgtgcagtcaggaatctgggcaagaaggaactaaaagtggcttttctcagtttgccttaactgtggctctctgtgccgagtggtgccattcatccttttgttcagtgacgaaaactgaattccatttaactgattggcagcagggttggtgactggttggtttttgggttttggtttgtttgtttgtttatcacatcctgtttggtggccagtgtaaataccatcaaaagaaaaactggccaatcacagcactgtgggaggccgaggtgggaggataactggaccacaggagtctgagacaagtctgaacaacaaagtgagaccctagctctacaaaaaataaattatctgggcatgatggtacatgccttgtcatcctaactatgtgggagtctgaggcaggaggattgcttgagcccatgaggttgaggttgcagtgagctgtgaccgcgtcaccgcattgcagcctgaatgacagagcaagaccctgtctaaaaagtaaacttccagggtgttgtttgttgcttgtgtttgatttcagatttgagggataccctgagttaaacatgtgcctccttcccacaggcgtgtgtacatttcttatctggatagtattcatttcttccggccacgttgcctccgcacagccgtttaccatgagatccttattggatatttagagtatgtgaagaaattagggtgagtttggattaaattatttggaactagtaagaaccctttattttttactgtatgtttattccgtgaaataatgggtattttaagttttatgcgtttttatttttccatcctaagatcaattcagaatctccaaagctcctctttccaggtgctccccgagcctcacaggtctggctcctgggcacgtagcaagctctttcccatctaatcc

SEQ ID NO: 439535 - DNA, 5224 bp, Homo sapiens
gaggccaatgccaagattagaacccacatttgagatcgatgaagaagaggaggaagaggatgaaaatgaacttttccctagagaatacttccgtcgtttgtcttcgcaggatgtactcaggtgtcagtcctcttctaagaggaagtctaaagatgaagaagaagatgaagagtcagatgatgctgatgattttggatcattgtttgacttggaaaatgatcttcctgatgagctgatacccaatggaggagaattaggccttttaaacagtgggaaccttgttccagatgctgcttccaaacataaacaactgtcggagcttctacgaggaggcagcggctctagtatcaacccaggaataggaaatgtgagcgccagcagccccgtgcagcagggcctgggtggccaggctcaagggcagccgaacagtgctaacatggccagcctcagtgccatgggcaagagccctctgagccagggagattcttcagcccccagcctgcctaaacaggcagccagcacctctgggcccacccccgctgcctcccaagcactgaatccgcaagcacaaaagcaagtggggctggcgactagcagccctgccacgtcacagactggacctggtatctgcatgaatgctaactttaaccagacccacccaggcctcctcaatagtaactctggccatagcttaattaatcaggcttcacaagggcaggcgcaagtcatgaatggatctcttggggctgctggcagaggaaggggagctggaatgccgtaccctactccagccatgcagggcgcctcgagcagcgtgctggctgagaccctaacgcaggtttccccgcaaatgactggtcacgcgggactgaacaccgcacaggcaggaggcatggccaagatgggaataactgggaacacaagtccatttggacagccctttagtcaagctggagggcagccaatgggagccactggagtgaacccccagttagccagcaaacagagcatggtcaacagtttgcccaccttccctacagatatcaagaatacttcagtcaccaacgtgccaaatatgtctcagatgcaaacatcagtgggaattgtacccacacaagcaattgcaacaggccccactgcagatcctgaaaaacgcaaactgatacagcagcagctggttctactgcttcatgctcataagtgtcagagacgagagcaagcaaacggagaggttcgggcctgctcgctcccgcattgtcgaaccatgaaaaacgttttgaatcacatgacgcattgtcaggctgggaaagcctgccaagttgcccattgtgcatcttcacgacaaatcatctctcattggaagaactgcacacgacatgactgtcctgtttgcctccctttgaaaaatgccagtgacaagcgaaaccaacaaaccatcctggggtctccagctagtggaattcaaaacacaattggttctgttggcacagggcaacagaatgccacttctttaagtaacccaaatcccatagaccccagctccatgcagcgagcctatgctgctctcggactcccctacatgaaccagccccagacgcagctgcagcctcaggttcctggccagcaaccagcacagcctcaaacccaccagcagatgaggactctcaaccccctgggaaataatccaatgaacattccagcaggaggaataacaacagatcagcagcccccaaacttgatttcagaatcagctcttccgacttccctgggggccacaaacccactgatgaacgatggctccaactctggtaacattggaaccctcagcactataccaacagcagctcctccttctagcaccggtgtaaggaaaggctggcacgaacatgtcactcaggacctgcggagccatctagtgcataaactcgtccaagccatcttcccaacacctgatcccgcagctctaaaggatcgccgcatggaaaacctggtagcctatgctaagaaagtggaaggggacatgtacgagtctgccaacagcagggatgaatattatcacttattagcagagaaaatctacaagatacaaaaagaactagaagaaaaacggaggtcgcgtttacataaacaaggcatcttggggaaccagccagccttaccagccccgggggctcagccccctgtgattccacaggcacaacctgtgagacctccaaatggacccctgtccctgccagtgaatcgcatgcaagtttctcaagggatgaattcatttaaccccatgtccttggggaacgtccagttgccacaagcacccatgggacctcgtgcagcctccccaatgaaccactctgtccagatgaacagcatgggctcagtgccagggatggccatttctccttcccgaatgcctcagcctccgaacatgatgggtgcacacaccaacaacatgatggcccaggcgcccgctcagagccagtttctgccacagaaccagttcccgtcatccagcggggcgatgagtgtgggcatggggcagccgccagcccaaacaggcgtgtcacagggacaggtgcctggtgctgctcttcctaaccctctcaacatgctggggcctcaggccagccagctaccttgccctccagtgacacagtcaccactgcacccaacaccgcctcctgcttccacggctgctggcatgccatctctccagcacacgacaccacctgggatgactcctccccagccagcagctcccactcagccatcaactcctgtgtcgtcttccgggcagactcccaccccgactcctggctcagtgcccagtgctacccaaacccagagcacccctacagtccaggcagcagcccaggcccaggtgaccccgcagcctcaaaccccagttcagcccccgtctgtggctacccctcagtcatcgcagcaacagccgacgcctgtgcacgcccagcctcctggcacaccgctttcccaggcagcagccagcattgataacagagtccctaccccctcctcggtggccagcgcagaaaccaattcccagcagccaggacctgacgtacctgtgctggaaatgaagacggagacccaagcagaggacactgagcccgatcctggtgaatccaaaggggagcccaggtctgagatgatggaggaggatttgcaaggagcttcccaagttaaagaagaaacagacatagcagagcagaaatcagaaccaatggaagtggatgaaaagaaacctgaagtgaaagtagaagttaaagaggaagaagagagtagcagtaacggcacagcctctcagtcaacatctccttcgcagccgcgcaaaaaaatctttaaaccagaggagttacgccaggccctcatgccaaccctagaagcactgtatcgacaggacccagagtcattacctttccggcagcctgtagatccccagctcctcggaattccagactattttgacatcgtaaagaatcccatggacctctccaccatcaagcggaagctggacacagggcaataccaagagccctggcagtacgtggacgacgtctggctcatgttcaacaatgcctggctctataatcgcaagacatcccgagtctataagttttgcagtaagcttgcagaggtctttgagcaggaaattgaccctgtcatgcagtcccttggatattgctgtggacgcaagtatgagttttccccacagactttgtgctgctatgggaagcagctgtgtaccattcctcgcgatgctgcctactacagctatcagaataggtatcatttctgtgagaagtgtttcacagagatccagggcgagaatgtgaccctgggtgacgacccttcacagccccagacgacaatttcaaaggatcagtttgaaaagaagaaaaatgataccttagaccccgaacctttcgttgattgcaaggagtgtggccggaagatgcatcagatttgcgttctgcactatgacatcatttggccttcaggttttgtgtgcgacaactgcttgaagaaaactggcagacctcgaaaagaaaacaaattcagtgctaagaggctgcagaccacaagactgggaaaccacttggaagaccgagtgaacaaatttttgcggcgccagaatcaccctgaagccggggaggtttttgtccgagtggtggccagctcagacaagacggtggaggtcaagcccgggatgaagtcacggtttgtggattctggggaaatgtctgaatctttcccatatcgaaccaaagctctgtttgcttttgaggaaattgacggcgtggatgtctgcttttttggaatgcacgtccaagaatacggctctgattgcccccctccaaacacgaggtagttttccagctccttccagggcgtgtcattcagtgagccgtgttaggatagaccagggctcttaagtgtcccagaggagcctgtgagccttcataggggattaaagtaaatgaaaccacaattaactaaccaaagtagttagttttgttttccattaaactagcgggaaatgaactgttgagatgactgcagtgagcgtgttttgtgtggcgagtctgtgtgggaccccgctcttacctaacgcaggtaaacctggggagttgggattgggacagcctggcacctgaaccagaggaagtaagctctgccacgagggcttcatgtgcagtcaggaatctgggcaagaaggaactaaaagtggcttttctcagtttgccttaactgtggctctctgtgccgagtggtgccattcatccttttgttcagtgacgaaaactgaattccatttaactgattggcagcagggttggtgactggttggtttttgggttttggtttgtttgtttgtttatcacatcctgtttggtggccagtgtaaataccatcaaaagaaaaactggccaatcacagcactgtgggaggccgaggtgggaggataactggaccacaggagtctgagacaagtctgaacaacaaagtgagaccctagctctacaaaaaataaattatctgggcatgatggtacatgccttgtcatcctaactatgtgggagtctgaggcaggaggattgcttgagcccatgaggttgaggttgcagtgagctgtgaccgcgtcaccgcattgcagcctgaatgacagagcaagacctccatctcaaaaaaagaaaaaagaaagaaa

SEQ ID NO: 439536 - DNA, 3840 bp, Homo sapiens
gaggccaatgccaagattagaacccacatttgagatcgatgaagaagaggaggaagaggatgaaaatgaacttttccctagagaatacttccgtcgtttgtcttcgcaggatgtactcaggtgtcagtcctcttctaagaggaagtctaaagatgaagaagaagatgaagagtcagatgatgctgatgattttggatcattgtttgacttggaaaatgatcttcctgatgagctgatacccaatggaggagaattaggccttttaaacagtgggaaccttgttccagatgctgcttccaaacataaacaactgtcggagcttctacgaggaggcagcggctctagtatcaacccaggaataggaaatgtgagcgccagcagccccgtgcagcagggcctgggtggccaggctcaagggcagccgaacagtgctaacatggccagcctcagtgccatgggcaagagccctctgagccagggagattcttcagcccccagcctgcctaaacaggcagccagcacctctgggcccacccccgctgcctcccaagcactgaatccgcaagcacaaaagcaagtggggctggcgactagcagccctgccacgtcacagactggacctggtatctgcatgaatgctaactttaaccagacccacccaggcctcctcaatagtaactctggccatagcttaattaatcaggcttcacaagggcaggcgcaagtcatgaatggatctcttggggctgctggcagaggaaggggagctggaatgccgtaccctactccagccatgcagggcgcctcgagcagcgtgctggctgagaccctaacgcaggtttccccgcaaatgactggtcacgcgggactgaacaccgcacaggcaggaggcatggccaagatgggaataactgggaacacaagtccatttggacagccctttagtcaagctggagggcagccaatgggagccactggagtgaacccccagttagccagcaaacagagcatggtcaacagtttgcccaccttccctacagatatcaagaatacttcagtcaccaacgtgccaaatatgtctcagatgcaaacatcagtgggaattgtacccacacaagcaattgcaacaggccccactgcagatcctgaaaaacgcaaactgatacagcagcagctggttctactgcttcatgctcataagtgtcagagacgagagcaagcaaacggagaggttcgggcctgctcgctcccgcattgtcgaaccatgaaaaacgttttgaatcacatgacgcattgtcaggctgggaaagcctgccaagttgcccattgtgcatcttcacgacaaatcatctctcattggaagaactgcacacgacatgactgtcctgtttgcctccctttgaaaaatgccagtgacaagcgaaaccaacaaaccatcctggggtctccagctagtggaattcaaaacacaattggttctgttggcacagggcaacagaatgccacttctttaagtaacccaaatcccatagaccccagctccatgcagcgagcctatgctgctctcggactcccctacatgaaccagccccagacgcagctgcagcctcaggttcctggccagcaaccagcacagcctcaaacccaccagcagatgaggactctcaaccccctgggaaataatccaatgaacattccagcaggaggaataacaacagatcagcagcccccaaacttgatttcagaatcagctcttccgacttccctgggggccacaaacccactgatgaacgatggctccaactctggtaacattggaaccctcagcactataccaacagcagctcctccttctagcaccggtgtaaggaaaggctggcacgaacatgtcactcaggacctgcggagccatctagtgcataaactcgtccaagccatcttcccaacacctgatcccgcagctctaaaggatcgccgcatggaaaacctggtagcctatgctaagaaagtggaaggggacatgtacgagtctgccaacagcagggatgaatattatcacttattagcagagaaaatctacaagatacaaaaagaactagaagaaaaacggaggtcgcgtttacataaacaaggcatcttggggaaccagccagccttaccagccccgggggctcagccccctgtgattccacaggcacaacctgtgagacctccaaatggacccctgtccctgccagtgaatcgcatgcaagtttctcaagggatgaattcatttaaccccatgtccttggggaacgtccagttgccacaagcacccatgggacctcgtgcagcctccccaatgaaccactctgtccagatgaacagcatgggctcagtgccagggatggccatttctccttcccgaatgcctcagcctccgaacatgatgggtgcacacaccaacaacatgatggcccaggcgcccgctcagagccagtttctgccacagaaccagttcccgtcatccagcggggcgatgagtgtgggcatggggcagccgccagcccaaacaggcgtgtcacagggacaggtgcctggtgctgctcttcctaaccctctcaacatgctggggcctcaggccagccagctaccttgccctccagtgacacagtcaccactgcacccaacaccgcctcctgcttccacggctgctggcatgccatctctccagcacacgacaccacctgggatgactcctccccagccagcagctcccactcagccatcaactcctgtgtcgtcttccgggcagactcccaccccgactcctggctcagtgcccagtgctacccaaacccagagcacccctacagtccaggcagcagcccaggcccaggtgaccccgcagcctcaaaccccagttcagcccccgtctgtggctacccctcagtcatcgcagcaacagccgacgcctgtgcacgcccagcctcctggcacaccgctttcccaggcagcagccagcattgataacagagtccctaccccctcctcggtggccagcgcagaaaccaattcccagcagccaggacctgacgtacctgtgctggaaatgaagacggagacccaagcagaggacactgagcccgatcctggtgaatccaaaggggagcccaggtctgagatgatggaggaggatttgcaaggagcttcccaagttaaagaagaaacagacatagcagagcagaaatcagaaccaatggaagtggatgaaaagaaacctgaagtgaaagtagaagttaaagaggaagaagagagtagcagtaacggcacagcctctcagtcaacatctccttcgcagccgcgcaaaaaaatctttaaaccagaggagttacgccaggccctcatgccaaccctagaagcactgtatcgacaggacccagagtcattacctttccggcagcctgtagatccccagctcctcggaattccagactattttgacatcgtaaagaatcccatggacctctccaccatcaagcggaagctggacacagggcaataccaagagccctggcagtacgtggacgacgtctggctcatgttcaacaatgcctggctctataatcgcaagacatcccgagtctataagttttgcagtaagcttgcagaggtctttgagcaggaaattgaccctgtcatgcagtcccttggatattgctgtggacgcaaggtacagttttaagtttttccggaaagtgaattttcctggttaatccagccagaggggtgttatactaatatgagaccacgcctgtatactgggagtgcatatgtgcaatctgctgcctggtgacacag

SEQ ID NO: 439537 - DNA, 2222 bp, Homo sapiens
cacaaacgcacagcacacacacgcacacacatgcatacacagcacacaaacgcacggcacacacacgcacacacatgcacacacagcacacacacaaacgcacagcacacacaaacgcacagcacacacgtacacacccacacacatctatctatacataatggctgaagccaaacttgtcttgcagatgtagaaattgttgctttgtttctctgataaaactggttttagacaaaaaatagggatgatcactcttagaccatgctaatgttactagagaagaagccttcttttctttcttctatgtgaaacttgaaatgaggaaaagcaattctagtgtaaatcatgcaagcgctctaattcctataaatacgaaactcgagaagattcaatcactgtatagaatggtaaaataccaactcatttcttatatcatattgttaaataaactgtgtgcaacagacaaaaagggtggtccttcttgaattcatgtacatggtattaacacttagtgttcggggttttttgttatgaaaatgctgttttcaacattgtatttggactatgcatgtgttttttccccattgtatataaagtaccgcttaaaattgatataaattactgaggtttttaacatgtattctgttctttaagatccctgtaagaatgtttaaggtttttatttatttatatatattttttgagtctgttctttgtaagacatggttctggttgttcgctcatagcggagaggctggggctgcggttgtggttgtggcggcgtgggtggtggctgggaactgtggcccaggcttagcggccgcccggaggcttttcttcccggagactgaggtgggcggctcagcgttggccccacacattcgaggctcacaggtgattgtcgctcacacagttagggtcgtcagttggtctgaaactgcatttggcccactcctccatcctccctgtccgtcgtagctgccacccccagaggcggcgcttcttcccgtgttcaggcggctccccccccccgtacacgactcccagaatctgaggcagagagtgctccaggctcgcgaggtgctttctgacttccccccaaatcctgccgctgccgcgcagcatgtcccgtgtggcgtttgaggaaatgctgagggacagacaccttggagcaccagctccggtccctgttacagtgagaaaggtcccccacttcgggggatacttgcacttagccacatggtcctgcctcccttggagtccagttccaggctcccttactgagtgggtgagacaagttcacaaaaaccgtaaaactgagaggaggaccatgggcaggggagctgaagttcatcccctaagtctaccacccccagcacccagagaacccactttatccctagtcccccaacaaaggctggtctaggtgggggtgatggtaattttagaaatcacgccccaaatagcttccgtttgggcccttacattcacagataggttttaaatagctgaatacttggtttgggaatctgaattcgaggaacctttctaagaaattggaaaggtccgatctagttttagcacagagctttgaaccttgagttataaaatgcagaataattcaagtaaaaataagaccaccatctggcacccctgaccagcccccattcaccccatcccaggaggggaagcacaggccgggcctccgggtggagattgctgccactgctcggcctgctgggttcttaacctccagtgtcctcttcatcttttccacccgtagggaaaccttgagccatgtgttcaaacaagaagtggggctagagcccgagagcagcagctctaagcccacactcagaaagtggcgccctcctggttgtgcagccttttaatgtgggcagtggaggggcctctgtttcaggttatcctggaattcaaaacgttatgtaccaacctcatcctctttggagtctgcatcctgtgcaaccgtcttgggcaatccagatgtcgaaggatgtgaccgagagcatggtctgtggatgctaaccctaagtttgtcgtaaggaaatttctgtaagaaacctggaaagccccaacgctgtgtctcatgctgtatacttaagaggagaagaaaaagtcctatatttgtgatcaaaaagaggaaacttgaaatgtgatggtgtttataataaaagatggtaaaactacttggattcaaaaat

SEQ ID NO: 439538 - DNA, 2681 bp, Homo sapiens
gaggccaatgccaagattagaacccacatttgagatcgatgaagaagaggaggaagaggatgaaaatgaacttttccctagagaatacttccgtcgtttgtcttcgcaggatgtactcaggtgtcagtcctcttctaagaggaagtctaaagatgaagaagaagatgaagagtcagatgatgctgatgattttggatcattgtttgacttggaaaatgatcttcctgatgagctgatacccaatggaggagaattaggccttttaaacagtgggaaccttgttccagatgctgcttccaaacataaacaactgtcggagcttctacgaggaggcagcggctctagtatcaacccaggaataggaaatgtgagcgccagcagccccgtgcagcagggcctgggtggccaggctcaagggcagccgaacagtgctaacatggccagcctcagtgccatgggcaagagccctctgagccagggagattcttcagcccccagcctgcctaaacaggcagccagcacctctgggcccacccccgctgcctcccaagcactgaatccgcaagcacaaaagcaagtggggctggcgactagcagccctgccacgtcacagactggacctggtatctgcatgaatgctaactttaaccagacccacccaggcctcctcaatagtaactctggccatagcttaattaatcaggcttcacaagggcaggcgcaagtcatgaatggatctcttggggctgctggcagaggaaggggagctggaatgccgtaccctactccagccatgcagggcgcctcgagcagcgtgctggctgagaccctaacgcaggtttccccgcaaatgactggtcacgcgggactgaacaccgcacaggcaggaggcatggccaagatgggaataactgggaacacaagtccatttggacagccctttagtcaagctggagggcagccaatgggagccactggagtgaacccccagttagccagcaaacagagcatggtcaacagtttgcccaccttccctacagatatcaagaatacttcagtcaccaacgtgccaaatatgtctcagatgcaaacatcagtgggaattgtacccacacaagcaattgcaacaggccccactgcagatcctgaaaaacgcaaactgatacagcagcagctggttctactgcttcatgctcataagtgtcagagacgagagcaagcaaacggagaggttcgggcctgctcgctcccgcattgtcgaaccatgaaaaacgttttgaatcacatgacgcattgtcaggctgggaaagcctgccaagttgcccattgtgcatcttcacgacaaatcatctctcattggaagaactgcacacgacatgactgtcctgtttgcctccctttgaaaaatgccagtgacaagcgaaaccaacaaaccatcctggggtctccagctagtggaattcaaaacacaattggttctgttggcacagggcaacagaatgccacttctttaagtaacccaaatcccatagaccccagctccatgcagcgagcctatgctgctctcggactcccctacatgaaccagccccagacgcagctgcagcctcaggttcctggccagcaaccagcacagcctcaaacccaccagcagatgaggactctcaaccccctgggaaataatccaatgaacattccagcaggaggaataacaacagatcagcagcccccaaacttgatttcagaatcagctcttccgacttccctgggggccacaaacccactgatgaacgatggctccaactctggtaacattggaaccctcagcactataccaacagcagctcctccttctagcaccggtgtaaggaaaggctggcacgaacatgtcactcaggacctgcggagccatctagtgcataaactcgtccaagccatcttcccaacacctgatcccgcagctctaaaggatcgccgcatggaaaacctggtagcctatgctaagaaagtggaaggggacatgtacgagtctgccaacagcagggatgaatattatcacttattagcagagaaaatctacaagatacaaaaagaactagaagaaaaacggaggtcgcgtttacataaacaaggcatcttggggaaccagccagccttaccagccccgggggctcagccccctgtgattccacaggcacaacctgtgagacctccaaatggacccctgtccctgccagtgaatcgcatgcaagtttctcaagggatgaattcatttaaccccatgtccttggggaacgtccagttgccacaagcacccatgggacctcgtgcagcctccccaatgaaccactctgtccagatgaacagcatgggctcagtgccagggatggccatttctccttcccgaatgcctcagcctccgaacatgatgggtgcacacaccaacaacatgatggcccaggcgcccgctcagagccagtttctgccacagaaccagttcccgtcatccagcggggcgatgagtgtgggcatggggcagccgccagcccaaacaggcgtgtcacaggtactgtgccccactgggaccgtggctccctaggaaataaaattcttgtgttaagttttggttttttttttctgtcttccttcgtggaaattaaaattccagaatgcacatttca

SEQ ID NO: 439539 - DNA, 2636 bp, Homo sapiens
gaggccaatgccaagattagaacccacatttgagatcgatgaagaagaggaggaagaggatgaaaatgaacttttccctagagaatacttccgtcgtttgtcttcgcaggatgtactcaggtgtcagtcctcttctaagaggaagtctaaagatgaagaagaagatgaagagtcagatgatgctgatgattttggatcattgtttgacttggaaaatgatcttcctgatgagctgatacccaatggaggagaattaggccttttaaacagtgggaaccttgttccagatgctgcttccaaacataaacaactgtcggagcttctacgaggaggcagcggctctagtatcaacccaggaataggaaatgtgagcgccagcagccccgtgcagcagggcctgggtggccaggctcaagggcagccgaacagtgctaacatggccagcctcagtgccatgggcaagagccctctgagccagggagattcttcagcccccagcctgcctaaacaggcagccagcacctctgggcccacccccgctgcctcccaagcactgaatccgcaagcacaaaagcaagtggggctggcgactagcagccctgccacgtcacagactggacctggtatctgcatgaatgctaactttaaccagacccacccaggcctcctcaatagtaactctggccatagcttaattaatcaggcttcacaagggcaggcgcaagtcatgaatggatctcttggggctgctggcagaggaaggggagctggaatgccgtaccctactccagccatgcagggcgcctcgagcagcgtgctggctgagaccctaacgcaggtttccccgcaaatgactggtcacgcgggactgaacaccgcacaggcaggaggcatggccaagatgggaataactgggaacacaagtccatttggacagccctttagtcaagctggagggcagccaatgggagccactggagtgaacccccagttagccagcaaacagagcatggtcaacagtttgcccaccttccctacagatatcaagaatacttcagtcaccaacgtgccaaatatgtctcagatgcaaacatcagtgggaattgtacccacacaagcaattgcaacaggccccactgcagatcctgaaaaacgcaaactgatacagcagcagctggttctactgcttcatgctcataagtgtcagagacgagagcaagcaaacggagaggttcgggcctgctcgctcccgcattgtcgaaccatgaaaaacgttttgaatcacatgacgcattgtcaggctgggaaagcctgccaagttgcccattgtgcatcttcacgacaaatcatctctcattggaagaactgcacacgacatgactgtcctgtttgcctccctttgaaaaatgccagtgacaagcgaaaccaacaaaccatcctggggtctccagctagtggaattcaaaacacaattggttctgttggcacagggcaacagaatgccacttctttaagtaacccaaatcccatagaccccagctccatgcagcgagcctatgctgctctcggactcccctacatgaaccagccccagacgcagctgcagcctcaggttcctggccagcaaccagcacagcctcaaacccaccagcagatgaggactctcaaccccctgggaaataatccaatgaacattccagcaggaggaataacaacagatcagcagcccccaaacttgatttcagaatcagctcttccgacttccctgggggccacaaacccactgatgaacgatggctccaactctggtaacattggaaccctcagcactataccaacagcagctcctccttctagcaccggtgtaaggaaaggctggcacgaacatgtcactcaggacctgcggagccatctagtgcataaactcgtccaagccatcttcccaacacctgatcccgcagctctaaaggatcgccgcatggaaaacctggtagcctatgctaagaaagtggaaggggacatgtacgagtctgccaacagcagggatgaatattatcacttattagcagagaaaatctacaagatacaaaaagaactagaagaaaaacggaggtcgcgtttacataaacaaggcatcttggggaaccagccagccttaccagccccgggggctcagccccctgtgattccacaggcacaacctgtgagacctccaaggatgaattcatttaaccccatgtccttggggaacgtccagttgccacaagcacccatgggacctcgtgcagcctccccaatgaaccactctgtccagatgaacagcatgggctcagtgccagggatggccatttctccttcccgaatgcctcagcctccgaacatgatgggtgcacacaccaacaacatgatggcccaggcgcccgctcagagccagtttctgccacagaaccagttcccgtcatccagcggggcgatgagtgtgggcatggggcagccgccagcccaaacaggcgtgtcacaggtactgtgccccactgggaccgtggctccctaggaaataaaattcttgtgttaagttttggttttttttttctgtcttccttcgtggaaattaaaattccagaatgcacatttca

SEQ ID NO: 439540 - DNA, 1319 bp, Homo sapiens
gaggccaatgccaagattagaacccacatttgagatcgatgaagaagaggaggaagaggatgaaaatgaacttttccctagagaatacttccgtcgtttgtcttcgcaggatgtactcaggtgtcagtcctcttctaagaggaagtctaaagatgaagaagaagatgaagagtcagatgatgctgatgattttggatcattgtttgacttggaaaatgatcttcctgatgagctgatacccaatggaggagaattaggccttttaaacagtgggaaccttgttccagatgctgcttccaaacataaacaactgtcggagcttctacgaggaggcagcggctctagtatcaacccaggaataggaaatgtgagcgccagcagccccgtgcagcagggcctgggtggccaggctcaagggcagccgaacagtgctaacatggccagcctcagtgccatgggcaagagccctctgagccagggagattcttcagcccccagcctgcctaaacaggcagccagcacctctgggcccacccccgctgcctcccaagcactgaatccgcaagcacaaaagcaagtggggctggcgactagcagccctgccacgtcacagactggacctggtatctgcatgaatgctaactttaaccagacccacccaggcctcctcaatagtaactctggccatagcttaattaatcaggcttcacaagggcaggcgcaagtcatgaatggatctcttggggctgctggcagaggaaggggagctggaatgccgtaccctactccagccatgcagggcgcctcgagcagcgtgctggctgagaccctaacgcaggtttccccgcaaatgactggtcacgcgggactgaacaccgcacaggcaggaggcatggccaagatgggaataactgggaacacaagtccatttggacagccctttagtcaagctggagggcagccaatgggagccactggagtgaacccccagttagccagcaaacagagcatggtcaacagtttgcccaccttccctacagatatcaagaatacttcagtcaccaacgtgccaaatatgtctcagatgcaaacatcagtgggaattgtacccacacaagcaattgcaacaggccccactgcagatcctgaaaaacgcaaactgatacagcagcagctggttctactgcttcatgctcataagtgtcagagacgagagccactggagtgaacccccagttagccagcaaacagagcatggtcaacagtttgcccaccttccctacagatatcaagaatacttcagtcaccaacgtgccaaa

SEQ ID NO: 439541 - DNA, 1093 bp, Homo sapiens
  misc_feature (2)..(2): n is a, c, g, or t
tncttttttttttaattgaggaatcaacagccgccatcttgtcgcggacccgaccggggcttcgagcgcgatctactcggccccgccggtcccgggccccacaaccgcccgcgcaccccgctccgcccggccggcccgctccgcccggccctcggcgcccgccccggcggccccgctcgcctctcggctcggcctcccggagcccggcggcggcggcggcggcagcggcggcggcggcggcggaacggggggtgggggggccgcggcggcggcggcgaccccgctcggcgcattgtttttcctcacggcggcggcggcggcgggccgcgggccgggagcggagcccggagccccctcgtcgtcgggccgcgagcgaattcattaagtggggcgcggggggggagcgaggcggcggcggcggcggcaccatgttctcggggactgcctgagccgcccggccgggcgccgtcgctgccagccgggcccgggggggcggccgggccgccggggcgcccccaccgcggagtgtcgcgctcgggaggcgggcaggggatgagggggccgcggccggcggcggcggcggcggccgggggcgggcggtgagcgctgcggggcgctgttgctgtggctgagatttggccgccgcctcccccacccggcctgcgccctccctctccctcggcgcccgcccgcccgctcgcggcccgcgctcgctcctctccctcgcagccggcagggcccccgacccccgtccgggccctcgccggcccggccgcccgtgcccggggctgttttcgcgagcaggtgaaaatggctgagaacttgctggacggaccgcccaaccccaaaagagccaaactcagctcgcccggtttctcggcgaatgacagcacagacaatatgaatgatgattcaagtaacttgaaagaaggcagtaaagacaatcccgaacctctaaagtgcaaacaagtgtggccaaaaggaacaaagcgcggtctatctaagtggaggcaaaacaaagagaggaagaccggatttaaactgaatttgtacaccccgccagaaacacccatggagcctgacgagcaggtaa

SEQ ID NO: 439542 - DNA, 1014 bp, Homo sapiens
  misc_feature (2)..(2): n is a, c, g, or t
tncttttttttttaattgaggaatcaacagccgccatcttgtcgcggacccgaccggggcttcgagcgcgatctactcggccccgccggtcccgggccccacaaccgcccgcgcaccccgctccgcccggccggcccgctccgcccggccctcggcgcccgccccggcggccccgctcgcctctcggctcggcctcccggagcccggcggcggcggcggcggcagcggcggcggcggcggcggaacggggggtgggggggccgcggcggcggcggcgaccccgctcggcgcattgtttttcctcacggcggcggcggcggcgggccgcgggccgggagcggagcccggagccccctcgtcgtcgggccgcgagcgaattcattaagtggggcgcggggggggagcgaggcggcggcggcggcggcaccatgttctcggggactgcctgagccgcccggccgggcgccgtcgctgccagccgggcccgggggggcggccgggccgccggggcgcccccaccgcggagtgtcgcgctcgggaggcgggcaggggatgagggggccgcggccggcggcggcggcggcggccgggggcgggcggtgagcgctgcggggcgctgttgctgtggctgagatttggccgccgcctcccccacccggcctgcgccctccctctccctcggcgcccgcccgcccgctcgcggcccgcgctcgctcctctccctcgcagccggcagggcccccgacccccgtccgggccctcgccggcccggccgcccgtgcccggggctgttttcgcgagcaggtgaaaatggctgagaacttgctggacggaccgcccaaccccaaaagagccaaactcagctcgcccggtttctcggcgaatgacagcacagacactcctatcttaaagccagtatctcttttgcgaaaacgtgatgtgaagaattctcctcttgagccagatacatccacacctttgaaaaagaaaaagggatggcccaaaggcaagagc

SEQ ID NO: 439543 - DNA, 502 bp, Homo sapiens
ccgcaggggcctcagagtccctgctcttgatggggcagctgcttttcccatcagcagctttcctgtctcctggaagctctcatgctttctcgggtgtgtagagccttcctcaaggcagacagctgctgaccacagttgtgacgtggaatcttccgcatctggttgtggcacagtggaaacagcccccactgccctcatttgttaatttctgaactcgcactctgggtctcttttcccctttagaggcagcgtggcataaagctgataatgacaccagcctggccgaggacaggccctgctctgtcccgaaggctgcagcacctacagccacctgtagccgttcacgtatggggtctgcctggtggtgacctactttggcctgagcttcctgatgcccacggcctgggagctgggcgtccgtgccaagtgtggaggggcacttgcctggtctcacagccttgcgtgttgttgcaggggcagtcagggcgacagcaagaatgcc

SEQ ID NO: 439544 - DNA, 440 bp, Homo sapiens
gtctaatatactaacagaaataatttactagtctctatagtagactagaacattataagacagtaaatggaatgtatttttatataaaagtatttctcctttatttttgcagtatgagttttccccacagactttgtgctgctatgggaagcagctgtgtaccattcctcgcgatgctgcctactacagctatcagaataggtaagcgtcaagcagcatcctgcattatgtcttagggcaaggcacgttcatctggttatagtctgtgtacattatttctttcctgaagttccaataaaaagtggcccaatttcaggccgggtgtggtggctcacgcctgtaatcccagcactttgggaggctgaggtgggagaatcacttgagcccaggagttatgttatcagccttggcgacatagagaaacccccatctctatttga

SEQ ID NO: 439545 - DNA, 439 bp, Homo sapiens
ctgtgcgttccatcttattttacttaagagtttatttagcaagttgtaattctgttttcctgtgggtgcttttcctaatgaaccgttgtgggtacatttacagggatgaattcatttaaccccatgtccttggggaacgtccagttgccacaagcacccatgggacctcgtgcagcctccccaatgaaccactctgtccagatgaacagcatgggctcagtgccaggggtaagtgttctctttcgctgtgctgcagatagccctccctctcacatggaacattatctaagcagcagaattcatgtcacttgagaatcctgtggttcttgttcctttgaatttgggttatgctttatttctttcatctctcattttaaaaaaattattactacacagaattatttgactgttagttattttattggaataacaaattcat

SEQ ID NO: 439546 - DNA, 10198 bp, Homo sapiens
  misc_feature (2)..(2): n is a, c, g, or t
tncttttttttttaattgaggaatcaacagccgccatcttgtcgcggacccgaccggggcttcgagcgcgatctactcggccccgccggtcccgggccccacaaccgcccgcgctcgctcctctccctcgcagccggcagggcccccgacccccgtccgggccctcgccggcccggccgcccgtgcccggggctgttttcgcgagcaggtgaaaatggctgagaacttgctggacggaccgcccaaccccaaaagagccaaactcagctcgcccggtttctcggcgaatgacagcacagattttggatcattgtttgacttggaaaatgatcttcctgatgagctgatacccaatggaggagaattaggccttttaaacagtgggaaccttgttccagatgctgcttccaaacataaacaactgtcggagcttctacgaggaggcagcggctctagtatcaacccaggaataggaaatgtgagcgccagcagccccgtgcagcagggcctgggtggccaggctcaagggcagccgaacagtgctaacatggccagcctcagtgccatgggcaagagccctctgagccagggagattcttcagcccccagcctgcctaaacaggcagccagcacctctgggcccacccccgctgcctcccaagcactgaatccgcaagcacaaaagcaagtggggctggcgactagcagccctgccacgtcacagactggacctggtatctgcatgaatgctaactttaaccagacccacccaggcctcctcaatagtaactctggccatagcttaattaatcaggcttcacaagggcaggcgcaagtcatgaatggatctcttggggctgctggcagaggaaggggagctggaatgccgtaccctactccagccatgcagggcgcctcgagcagcgtgctggctgagaccctaacgcaggtttccccgcaaatgactggtcacgcgggactgaacaccgcacaggcaggaggcatggccaagatgggaataactgggaacacaagtccatttggacagccctttagtcaagctggagggcagccaatgggagccactggagtgaacccccagttagccagcaaacagagcatggtcaacagtttgcccaccttccctacagatatcaagaatacttcagtcaccaacgtgccaaatatgtctcagatgcaaacatcagtgggaattgtacccacacaagcaattgcaacaggccccactgcagatcctgaaaaacgcaaactgatacagcagcagctggttctactgcttcatgctcataagtgtcagagacgagagcaagcaaacggagaggttcgggcctgctcgctcccgcattgtcgaaccatgaaaaacgttttgaatcacatgacgcattgtcaggctgggaaagcctgccaagttgcccattgtgcatcttcacgacaaatcatctctcattggaagaactgcacacgacatgactgtcctgtttgcctccctttgaaaaatgccagtgacaagcgaaaccaacaaaccatcctggggtctccagctagtggaattcaaaacacaattggttctgttggcacagggcaacagaatgccacttctttaagtaacccaaatcccatagaccccagctccatgcagcgagcctatgctgctctcggactcccctacatgaaccagccccagacgcagctgcagcctcaggttcctggccagcaaccagcacagcctcaaacccaccagcagatgaggactctcaaccccctgggaaataatccaatgaacattccagcaggaggaataacaacagatcagcagcccccaaacttgatttcagaatcagctcttccgacttccctgggggccacaaacccactgatgaacgatggctccaactctggtaacattggaaccctcagcactataccaacagcagctcctccttctagcaccggtgtaaggaaaggctggcacgaacatgtcactcaggacctgcggagccatctagtgcataaactcgtccaagccatcttcccaacacctgatcccgcagctctaaaggatcgccgcatggaaaacctggtagcctatgctaagaaagtggaaggggacatgtacgagtctgccaacagcagggatgaatattatcacttattagcagagaaaatctacaagatacaaaaagaactagaagaaaaacggaggtcgcgtttacataaacaaggcatcttggggaaccagccagccttaccagccccgggggctcagccccctgtgattccacaggcacaacctgtgagacctccaaatggacccctgtccctgccagtgaatcgcatgcaagtttctcaagggatgaattcatttaaccccatgtccttggggaacgtccagttgccacaagcacccatgggacctcgtgcagcctccccaatgaaccactctgtccagatgaacagcatgggctcagtgccagggatggccatttctccttcccgaatgcctcagcctccgaacatgatgggtgcacacaccaacaacatgatggcccaggcgcccgctcagagccagtttctgccacagaaccagttcccgtcatccagcggggcgatgagtgtgggcatggggcagccgccagcccaaacaggcgtgtcacagggacaggtgcctggtgctgctcttcctaaccctctcaacatgctggggcctcaggccagccagctaccttgccctccagtgacacagtcaccactgcacccaacaccgcctcctgcttccacggctgctggcatgccatctctccagcacacgacaccacctgggatgactcctccccagccagcagctcccactcagccatcaactcctgtgtcgtcttccgggcagactcccaccccgactcctggctcagtgcccagtgctacccaaacccagagcacccctacagtccaggcagcagcccaggcccaggtgaccccgcagcctcaaaccccagttcagcccccgtctgtggctacccctcagtcatcgcagcaacagccgacgcctgtgcacgcccagcctcctggcacaccgctttcccaggcagcagccagcattgataacagagtccctaccccctcctcggtggccagcgcagaaaccaattcccagcagccaggacctgacgtacctgtgctggaaatgaagacggagacccaagcagaggacactgagcccgatcctggtgaatccaaaggggagcccaggtctgagatgatggaggaggatttgcaaggagcttcccaagttaaagaagaaacagacatagcagagcagaaatcagaaccaatggaagtggatgaaaagaaacctgaagtgaaagtagaagttaaagaggaagaagagagtagcagtaacggcacagcctctcagtcaacatctccttcgcagccgcgcaaaaaaatctttaaaccagaggagttacgccaggccctcatgccaaccctagaagcactgtatcgacaggacccagagtcattacctttccggcagcctgtagatccccagctcctcggaattccagactattttgacatcgtaaagaatcccatggacctctccaccatcaagcggaagctggacacagggcaataccaagagccctggcagtacgtggacgacgtctggctcatgttcaacaatgcctggctctataatcgcaagacatcccgagtctataagttttgcagtaagcttgcagaggtctttgagcaggaaattgaccctgtcatgcagtcccttggatattgctgtggacgcaagtatgagttttccccacagactttgtgctgctatgggaagcagctgtgtaccattcctcgcgatgctgcctactacagctatcagaataggtatcatttctgtgagaagtgtttcacagagatccagggcgagaatgtgaccctgggtgacgacccttcacagccccagacgacaatttcaaaggatcagtttgaaaagaagaaaaatgataccttagaccccgaacctttcgttgattgcaaggagtgtggccggaagatgcatcagatttgcgttctgcactatgacatcatttggccttcaggttttgtgtgcgacaactgcttgaagaaaactggcagacctcgaaaagaaaacaaattcagtgctaagaggctgcagaccacaagactgggaaaccacttggaagaccgagtgaacaaatttttgcggcgccagaatcaccctgaagccggggaggtttttgtccgagtggtggccagctcagacaagacggtggaggtcaagcccgggatgaagtcacggtttgtggattctggggaaatgtctgaatctttcccatatcgaaccaaagctctgtttgcttttgaggaaattgacggcgtggatgtctgcttttttggaatgcacgtccaagaatacggctctgattgcccccctccaaacacgaggcgtgtgtacatttcttatctggatagtattcatttcttccggccacgttgcctccgcacagccgtttaccatgagatccttattggatatttagagtatgtgaagaaattagggtatgtgacagggcacatctgggcctgtcctccaagtgaaggagatgattacatcttccattgccacccacctgatcaaaaaatacccaagccaaaacgactgcaggagtggtacaaaaagatgctggacaaggcgtttgcagagcggatcatccatgactacaaggatattttcaaacaagcaactgaagacaggctcaccagtgccaaggaactgccctattttgaaggtgatttctggcccaatgtgttagaagagagcattaaggaactagaacaagaagaagaggagaggaaaaaggaagagagcactgcagccagtgaaaccactgagggcagtcagggcgacagcaagaatgccaagaagaagaacaacaagaaaaccaacaagaacaaaagcagcatcagccgcgccaacaagaagaagcccagcatgcccaacgtgtccaatgacctgtcccagaagctgtatgccaccatggagaagcacaaggaggtcttcttcgtgatccacctgcacgctgggcctgtcatcaacaccctgccccccatcgtcgaccccgaccccctgctcagctgtgacctcatggatgggcgcgacgccttcctcaccctcgccagagacaagcactgggagttctcctccttgcgccgctccaagtggtccacgctctgcatgctggtggagctgcacacccagggccaggaccgctttgtctacacctgcaacgagtgcaagcaccacgtggagacgcgctggcactgcactgtgtgcgaggactacgacctctgcatcaactgctataacacgaagagccatgcccataagatggtgaagtgggggctgggcctggatgacgagggcagcagccagggcgagccacagtcaaagagcccccaggagtcacgccggctgagcatccagcgctgcatccagtcgctggtgcacgcgtgccagtgccgcaacgccaactgctcgctgccatcctgccagaagatgaagcgggtggtgcagcacaccaagggctgcaaacgcaagaccaacgggggctgcccggtgtgcaagcagctcatcgccctctgctgctaccacgccaagcactgccaagaaaacaaatgccccgtgcccttctgcctcaacatcaaacacaagctccgccagcagcagatccagcaccgcctgcagcaggcccagctcatgcgccggcggatggccaccatgaacacccgcaacgtgcctcagcagagtctgccttctcctacctcagcaccgcccgggacccccacacagcagcccagcacaccccagacgccgcagccccctgcccagccccaaccctcacccgtgagcatgtcaccagctggcttccccagcgtggcccggactcagccccccaccacggtgtccacagggaagcctaccagccaggtgccggcccccccacccccggcccagccccctcctgcagcggtggaagcggctcggcagatcgagcgtgaggcccagcagcagcagcacctgtaccgggtgaacatcaacaacagcatgcccccaggacgcacgggcatggggaccccggggagccagatggcccccgtgagcctgaatgtgccccgacccaaccaggtgagcgggcccgtcatgcccagcatgcctcccgggcagtggcagcaggcgccccttccccagcagcagcccatgccaggcttgcccaggcctgtgatatccatgcaggcccaggcggccgtggctgggccccggatgcccagcgtgcagccacccaggagcatctcacccagcgctctgcaagacctgctgcggaccctgaagtcgcccagctcccctcagcagcaacagcaggtgctgaacattctcaaatcaaacccgcagctaatggcagctttcatcaaacagcgcacagccaagtacgtggccaatcagcccggcatgcagccccagcctggcctccagtcccagcccggcatgcaaccccagcctggcatgcaccagcagcccagcctgcagaacctgaatgccatgcaggctggcgtgccgcggcccggtgtgcctccacagcagcaggcgatgggaggcctgaacccccagggccaggccttgaacatcatgaacccaggacacaaccccaacatggcgagtatgaatccacagtaccgagaaatgttacggaggcagctgctgcagcagcagcagcaacagcagcagcaacaacagcagcaacagcagcagcagcaagggagtgccggcatggctgggggcatggcggggcacggccagttccagcagcctcaaggacccggaggctacccaccggccatgcagcagcagcagcgcatgcagcagcatctccccctccagggcagctccatgggccagatggcggctcagatgggacagcttggccagatggggcagccggggctgggggcagacagcacccccaacatccagcaagccctgcagcagcggattctgcagcaacagcagatgaagcagcagattgggtccccaggccagccgaaccccatgagcccccagcaacacatgctctcaggacagccacaggcctcgcatctccctggccagcagatcgccacgtcccttagtaaccaggtgcggtctccagcccctgtccagtctccacggccccagtcccagcctccacattccagcccgtcaccacggatacagccccagccttcgccacaccacgtctcaccccagactggttccccccaccccggactcgcagtcaccatggccagctccatagatcagggacacttggggaaccccgaacagagtgcaatgctcccccagctgaacacccccagcaggagtgcgctgtccagcgaactgtccctggtcggggacaccacgggggacacgctagagaagtttgtggagggcttgtagcattgtgagagcatcaccttttccctttcatgttcttggaccttttgtactgaaaatccaggcatctaggttctttttattcctagatggaactgcgacttccgagccatggaagggtggattgatgtttaaagaaacaatacaaagaatatatttttttgttaaaaaccagttgatttaaatatctggtctctctctttggtttttttttggcgggggggtggggggggttcttttttttccgttttgtttttgtttggggggaggggggttttgtttggattctttttgtcgtcattgctggtgactcatgcctttttttaacgggaaaaacaagttcattatattcatattttttatttgtattttcaagactttaaacatttatgtttaaaagtaagaagaaaaataatattcagaactgattcctgaaataatgcaagcttataatgtatcccgataactttgtgatgtttcgggaagatttttttctatagtgaactctgtgggcgtctcccagtattaccctggatgataggaattgactccggcgtgcacacacgtacacacccacacacatctatctatacataatggctgaagccaaacttgtcttgcagatgtagaaattgttgctttgtttctctgataaaactggttttagacaaaaaatagggatgatcactcttagaccatgctaatgttactagagaagaagccttcttttctttcttctatgtgaaacttgaaatgaggaaaagcaattctagtgtaaatcatgcaagcgctctaattcctataaatacgaaactcgagaagattcaatcactgtatagaatggtaaaataccaactcatttcttatatcatattgttaaataaactgtgtgcaacagacaaaaagggtggtccttcttgaattcatgtacatggtattaacacttagtgttcggggttttttgttatgaaaatgctgttttcaacattgtatttggactatgcatgtgttttttccccattgtatataaagtaccgcttaaaattgatataaattactgaggtttttaacatgtattctgttctttaagatccctgtaagaatgtttaaggtttttatttatttatatatattttttgagtctgttctttgtaagacatggttctggttgttcgctcatagcggagaggctggggctgcggttgtggttgtggcggcgtgggtggtggctgggaactgtggcccaggcttagcggccgcccggaggcttttcttcccggagactgaggtgggcggctcagcgttggccccacacattcgaggctcacaggtgattgtcgctcacacagttagggtcgtcagttggtctgaaactgcatttggcccactcctccatcctccctgtccgtcgtagctgccacccccagaggcggcgcttcttcccgtgttcaggcggctccccccccccgtacacgactcccagaatctgaggcagagagtgctccaggctcgcgaggtgctttctgacttccccccaaatcctgccgctgccgcgcagcatgtcccgtgtggcgtttgaggaaatgctgagggacagacaccttggagcaccagctccggtccctgttacagtgagaaaggtcccccacttcgggggatacttgcacttagccacatggtcctgcctcccttggagtccagttccaggctcccttactgagtgggtgagacaagttcacaaaaaccgtaaaactgagaggaggaccatgggcaggggagctgaagttcatcccctaagtctaccacccccagcacccagagaacccactttatccctagtcccccaacaaaggctggtctaggtgggggtgatggtaattttagaaatcacgccccaaatagcttccgtttgggcccttacattcacagataggttttaaatagctgaatacttggtttgggaatctgaattcgaggaacctttctaagaaattggaaaggtccgatctagttttagcacagagctttgaaccttgagttataaaatgcagaataattcaagtaaaaataagaccaccatctggcacccctgaccagcccccattcaccccatcccaggaggggaagcacaggccgggcctccgggtggagattgctgccactgctcggcctgctgggttcttaacctccagtgtcctcttcatcttttccacccgtagggaaaccttgagccatgtgttcaaacaagaagtggggctagagcccgagagcagcagctctaagcccacactcagaaagtggcgccctcctggttgtgcagccttttaatgtgggcagtggaggggcctctgtttcaggttatcctggaattcaaaacgttatgtaccaacctcatcctctttggagtctgcatcctgtgcaaccgtcttgggcaatccagatgtcgaaggatgtgaccgagagcatggtctgtggatgctaaccctaagtttgtcgtaaggaaatttctgtaagaaacctggaaagccccaacgctgtgtctcatgctgtatacttaagaggagaagaaaaagtcctatatttgtgatcaaaaagaggaaacttgaaatgtgatggtgtttataataaaagatggtaaaactacttggattcaaaaat

SEQ ID NO: 439547 - DNA, 10087 bp, Homo sapiens
gaggccaatgccaagattagaacccacatttgagatcgatgaagaagaggaggaagaggatgaaaatgaacttttccctagagaatacttccgtcgtttgtcttcgcaggatgtactcaggtgtcagtcctcttctaagaggaagtctaaagatgaagaagaagatgaagagtcagatgatgctgatgattttggatcattgtttgacttggaaaatgatcttcctgatgagctgatacccaatggaggagaattaggccttttaaacagtgggaaccttgttccagatgctgcttccaaacataaacaactgtcggagcttctacgaggaggcagcggctctagtatcaacccaggaataggaaatgtgagcgccagcagccccgtgcagcagggcctgggtggccaggctcaagggcagccgaacagtgctaacatggccagcctcagtgccatgggcaagagccctctgagccagggagattcttcagcccccagcctgcctaaacaggcagccagcacctctgggcccacccccgctgcctcccaagcactgaatccgcaagcacaaaagcaagtggggctggcgactagcagccctgccacgtcacagactggacctggtatctgcatgaatgctaactttaaccagacccacccaggcctcctcaatagtaactctggccatagcttaattaatcaggcttcacaagggcaggcgcaagtcatgaatggatctcttggggctgctggcagaggaaggggagctggaatgccgtaccctactccagccatgcagggcgcctcgagcagcgtgctggctgagaccctaacgcaggtttccccgcaaatgactggtcacgcgggactgaacaccgcacaggcaggaggcatggccaagatgggaataactgggaacacaagtccatttggacagccctttagtcaagctggagggcagccaatgggagccactggagtgaacccccagttagccagcaaacagagcatggtcaacagtttgcccaccttccctacagatatcaagaatacttcagtcaccaacgtgccaaatatgtctcagatgcaaacatcagtgggaattgtacccacacaagcaattgcaacaggccccactgcagatcctgaaaaacgcaaactgatacagcagcagctggttctactgcttcatgctcataagtgtcagagacgagagcaagcaaacggagaggttcgggcctgctcgctcccgcattgtcgaaccatgaaaaacgttttgaatcacatgacgcattgtcaggctgggaaagcctgccaagttgcccattgtgcatcttcacgacaaatcatctctcattggaagaactgcacacgacatgactgtcctgtttgcctccctttgaaaaatgccagtgacaagcgaaaccaacaaaccatcctggggtctccagctagtggaattcaaaacacaattggttctgttggcacagggcaacagaatgccacttctttaagtaacccaaatcccatagaccccagctccatgcagcgagcctatgctgctctcggactcccctacatgaaccagccccagacgcagctgcagcctcaggttcctggccagcaaccagcacagcctcaaacccaccagcagatgaggactctcaaccccctgggaaataatccaatgaacattccagcaggaggaataacaacagatcagcagcccccaaacttgatttcagaatcagctcttccgacttccctgggggccacaaacccactgatgaacgatggctccaactctggtaacattggaaccctcagcactataccaacagcagctcctccttctagcaccggtgtaaggaaaggctggcacgaacatgtcactcaggacctgcggagccatctagtgcataaactcgtccaagccatcttcccaacacctgatcccgcagctctaaaggatcgccgcatggaaaacctggtagcctatgctaagaaagtggaaggggacatgtacgagtctgccaacagcagggatgaatattatcacttattagcagagaaaatctacaagatacaaaaagaactagaagaaaaacggaggtcgcgtttacataaacaaggcatcttggggaaccagccagccttaccagccccgggggctcagccccctgtgattccacaggcacaacctgtgagacctccaaatggacccctgtccctgccagtgaatcgcatgcaagtttctcaagggatgaattcatttaaccccatgtccttggggaacgtccagttgccacaagcacccatgggacctcgtgcagcctccccaatgaaccactctgtccagatgaacagcatgggctcagtgccagggatggccatttctccttcccgaatgcctcagcctccgaacatgatgggtgcacacaccaacaacatgatggcccaggcgcccgctcagagccagtttctgccacagaaccagttcccgtcatccagcggggcgatgagtgtgggcatggggcagccgccagcccaaacaggcgtgtcacagggacaggtgcctggtgctgctcttcctaaccctctcaacatgctggggcctcaggccagccagctaccttgccctccagtgacacagtcaccactgcacccaacaccgcctcctgcttccacggctgctggcatgccatctctccagcacacgacaccacctgggatgactcctccccagccagcagctcccactcagccatcaactcctgtgtcgtcttccgggcagactcccaccccgactcctggctcagtgcccagtgctacccaaacccagagcacccctacagtccaggcagcagcccaggcccaggtgaccccgcagcctcaaaccccagttcagcccccgtctgtggctacccctcagtcatcgcagcaacagccgacgcctgtgcacgcccagcctcctggcacaccgctttcccaggcagcagccagcattgataacagagtccctaccccctcctcggtggccagcgcagaaaccaattcccagcagccaggacctgacgtacctgtgctggaaatgaagacggagacccaagcagaggacactgagcccgatcctggtgaatccaaaggggagcccaggtctgagatgatggaggaggatttgcaaggagcttcccaagttaaagaagaaacagacatagcagagcagaaatcagaaccaatggaagtggatgaaaagaaacctgaagtgaaagtagaagttaaagaggaagaagagagtagcagtaacggcacagcctctcagtcaacatctccttcgcagccgcgcaaaaaaatctttaaaccagaggagttacgccaggccctcatgccaaccctagaagcactgtatcgacaggacccagagtcattacctttccggcagcctgtagatccccagctcctcggaattccagactattttgacatcgtaaagaatcccatggacctctccaccatcaagcggaagctggacacagggcaataccaagagccctggcagtacgtggacgacgtctggctcatgttcaacaatgcctggctctataatcgcaagacatcccgagtctataagttttgcagtaagcttgcagaggtctttgagcaggaaattgaccctgtcatgcagtcccttggatattgctgtggacgcaagtatgagttttccccacagactttgtgctgctatgggaagcagctgtgtaccattcctcgcgatgctgcctactacagctatcagaataggtatcatttctgtgagaagtgtttcacagagatccagggcgagaatgtgaccctgggtgacgacccttcacagccccagacgacaatttcaaaggatcagtttgaaaagaagaaaaatgataccttagaccccgaacctttcgttgattgcaaggagtgtggccggaagatgcatcagatttgcgttctgcactatgacatcatttggccttcaggttttgtgtgcgacaactgcttgaagaaaactggcagacctcgaaaagaaaacaaattcagtgctaagaggctgcagaccacaagactgggaaaccacttggaagaccgagtgaacaaatttttgcggcgccagaatcaccctgaagccggggaggtttttgtccgagtggtggccagctcagacaagacggtggaggtcaagcccgggatgaagtcacggtttgtggattctggggaaatgtctgaatctttcccatatcgaaccaaagctctgtttgcttttgaggaaattgacggcgtggatgtctgcttttttggaatgcacgtccaagaatacggctctgattgcccccctccaaacacgaggcgtgtgtacatttcttatctggatagtattcatttcttccggccacgttgcctccgcacagccgtttaccatgagatccttattggatatttagagtatgtgaagaaattagggtatgtgacagggcacatctgggcctgtcctccaagtgaaggagatgattacatcttccattgccacccacctgatcaaaaaatacccaagccaaaacgactgcaggagtggtacaaaaagatgctggacaaggcgtttgcagagcggatcatccatgactacaaggatattttcaaacaagcaactgaagacaggctcaccagtgccaaggaactgccctattttgaaggtgatttctggcccaatgtgttagaagagagcattaaggaactagaacaagaagaagaggagaggaaaaaggaagagagcactgcagccagtgaaaccactgagggcagtcagggcgacagcaagaatgccaagaagaagaacaacaagaaaaccaacaagaacaaaagcagcatcagccgcgccaacaagaagaagcccagcatgcccaacgtgtccaatgacctgtcccagaagctgtatgccaccatggagaagcacaaggaggtcttcttcgtgatccacctgcacgctgggcctgtcatcaacaccctgccccccatcgtcgaccccgaccccctgctcagctgtgacctcatggatgggcgcgacgccttcctcaccctcgccagagacaagcactgggagttctcctccttgcgccgctccaagtggtccacgctctgcatgctggtggagctgcacacccagggccaggaccgctttgtctacacctgcaacgagtgcaagcaccacgtggagacgcgctggcactgcactgtgtgcgaggactacgacctctgcatcaactgctataacacgaagagccatgcccataagatggtgaagtgggggctgggcctggatgacgagggcagcagccagggcgagccacagtcaaagagcccccaggagtcacgccggctgagcatccagcgctgcatccagtcgctggtgcacgcgtgccagtgccgcaacgccaactgctcgctgccatcctgccagaagatgaagcgggtggtgcagcacaccaagggctgcaaacgcaagaccaacgggggctgcccggtgtgcaagcagctcatcgccctctgctgctaccacgccaagcactgccaagaaaacaaatgccccgtgcccttctgcctcaacatcaaacacaagctccgccagcagcagatccagcaccgcctgcagcaggcccagctcatgcgccggcggatggccaccatgaacacccgcaacgtgcctcagcagagtctgccttctcctacctcagcaccgcccgggacccccacacagcagcccagcacaccccagacgccgcagccccctgcccagccccaaccctcacccgtgagcatgtcaccagctggcttccccagcgtggcccggactcagccccccaccacggtgtccacagggaagcctaccagccaggtgccggcccccccacccccggcccagccccctcctgcagcggtggaagcggctcggcagatcgagcgtgaggcccagcagcagcagcacctgtaccgggtgaacatcaacaacagcatgcccccaggacgcacgggcatggggaccccggggagccagatggcccccgtgagcctgaatgtgccccgacccaaccaggtgagcgggcccgtcatgcccagcatgcctcccgggcagtggcagcaggcgccccttccccagcagcagcccatgccaggcttgcccaggcctgtgatatccatgcaggcccaggcggccgtggctgggccccggatgcccagcgtgcagccacccaggagcatctcacccagcgctctgcaagacctgctgcggaccctgaagtcgcccagctcccctcagcagcaacagcaggtgctgaacattctcaaatcaaacccgcagctaatggcagctttcatcaaacagcgcacagccaagtacgtggccaatcagcccggcatgcagccccagcctggcctccagtcccagcccggcatgcaaccccagcctggcatgcaccagcagcccagcctgcagaacctgaatgccatgcaggctggcgtgccgcggcccggtgtgcctccacagcagcaggcgatgggaggcctgaacccccagggccaggccttgaacatcatgaacccaggacacaaccccaacatggcgagtatgaatccacagtaccgagaaatgttacggaggcagctgctgcagcagcagcagcaacagcagcagcaacaacagcagcaacagcagcagcagcaagggagtgccggcatggctgggggcatggcggggcacggccagttccagcagcctcaaggacccggaggctacccaccggccatgcagcagcagcagcgcatgcagcagcatctccccctccagggcagctccatgggccagatggcggctcagatgggacagcttggccagatggggcagccggggctgggggcagacagcacccccaacatccagcaagccctgcagcagcggattctgcagcaacagcagatgaagcagcagattgggtccccaggccagccgaaccccatgagcccccagcaacacatgctctcaggacagccacaggcctcgcatctccctggccagcagatcgccacgtcccttagtaaccaggtgcggtctccagcccctgtccagtctccacggccccagtcccagcctccacattccagcccgtcaccacggatacagccccagccttcgccacaccacgtctcaccccagactggttccccccaccccggactcgcagtcaccatggccagctccatagatcagggacacttggggaaccccgaacagagtgcaatgctcccccagctgaacacccccagcaggagtgcgctgtccagcgaactgtccctggtcggggacaccacgggggacacgctagagaagtttgtggagggcttgtagcattgtgagagcatcaccttttccctttcatgttcttggaccttttgtactgaaaatccaggcatctaggttctttttattcctagatggaactgcgacttccgagccatggaagggtggattgatgtttaaagaaacaatacaaagaatatatttttttgttaaaaaccagttgatttaaatatctggtctctctctttggtttttttttggcgggggggtggggggggttcttttttttccgttttgtttttgtttggggggaggggggttttgtttggattctttttgtcgtcattgctggtgactcatgcctttttttaacgggaaaaacaagttcattatattcatattttttatttgtattttcaagactttaaacatttatgtttaaaagtaagaagaaaaataatattcagaactgattcctgaaataatgcaagcttataatgtatcccgataactttgtgatgtttcgggaagatttttttctatagtgaactctgtgggcgtctcccagtattaccctggatgataggaattgactccggcgtgcacacacgtacacacccacacacatctatctatacataatggctgaagccaaacttgtcttgcagatgtagaaattgttgctttgtttctctgataaaactggttttagacaaaaaatagggatgatcactcttagaccatgctaatgttactagagaagaagccttcttttctttcttctatgtgaaacttgaaatgaggaaaagcaattctagtgtaaatcatgcaagcgctctaattcctataaatacgaaactcgagaagattcaatcactgtatagaatggtaaaataccaactcatttcttatatcatattgttaaataaactgtgtgcaacagacaaaaagggtggtccttcttgaattcatgtacatggtattaacacttagtgttcggggttttttgttatgaaaatgctgttttcaacattgtatttggactatgcatgtgttttttccccattgtatataaagtaccgcttaaaattgatataaattactgaggtttttaacatgtattctgttctttaagatccctgtaagaatgtttaaggtttttatttatttatatatattttttgagtctgttctttgtaagacatggttctggttgttcgctcatagcggagaggctggggctgcggttgtggttgtggcggcgtgggtggtggctgggaactgtggcccaggcttagcggccgcccggaggcttttcttcccggagactgaggtgggcggctcagcgttggccccacacattcgaggctcacaggtgattgtcgctcacacagttagggtcgtcagttggtctgaaactgcatttggcccactcctccatcctccctgtccgtcgtagctgccacccccagaggcggcgcttcttcccgtgttcaggcggctccccccccccgtacacgactcccagaatctgaggcagagagtgctccaggctcgcgaggtgctttctgacttccccccaaatcctgccgctgccgcgcagcatgtcccgtgtggcgtttgaggaaatgctgagggacagacaccttggagcaccagctccggtccctgttacagtgagaaaggtcccccacttcgggggatacttgcacttagccacatggtcctgcctcccttggagtccagttccaggctcccttactgagtgggtgagacaagttcacaaaaaccgtaaaactgagaggaggaccatgggcaggggagctgaagttcatcccctaagtctaccacccccagcacccagagaacccactttatccctagtcccccaacaaaggctggtctaggtgggggtgatggtaattttagaaatcacgccccaaatagcttccgtttgggcccttacattcacagataggttttaaatagctgaatacttggtttgggaatctgaattcgaggaacctttctaagaaattggaaaggtccgatctagttttagcacagagctttgaaccttgagttataaaatgcagaataattcaagtaaaaataagaccaccatctggcacccctgaccagcccccattcaccccatcccaggaggggaagcacaggccgggcctccgggtggagattgctgccactgctcggcctgctgggttcttaacctccagtgtcctcttcatcttttccacccgtagggaaaccttgagccatgtgttcaaacaagaagtggggctagagcccgagagcagcagctctaagcccacactcagaaagtggcgccctcctggttgtgcagccttttaatgtgggcagtggaggggcctctgtttcaggttatcctggaattcaaaacgttatgtaccaacctcatcctctttggagtctgcatcctgtgcaaccgtcttgggcaatccagatgtcgaaggatgtgaccgagagcatggtctgtggatgctaaccctaagtttgtcgtaaggaaatttctgtaagaaacctggaaagccccaacgctgtgtctcatgctgtatacttaagaggagaagaaaaagtcctatatttgtgatcaaaaagaggaaacttgaaatgtgatggtgtttataataaaagatggtaaaactacttggattcaaaaat

SEQ ID NO: 439548 - DNA, 9973 bp, Homo sapiens
gaggccaatgccaagattagaacccacatttgagatcgatgaagaagaggaggaagaggatgaaaatgaacttttccctagagaatacttccgtcgtttgtcttcgcaggatgtactcaggtgtcagtcctcttctaagaggaagtctaaagatgaagaagaagatgaagagtcagatgatgctgatgattttggatcattgtttgacttggaaaatgatcttcctgatgagctgatacccaatggaggagaattaggccttttaaacagtgggaaccttgttccagatgctgcttccaaacataaacaactgtcggagcttctacgaggaggcagcggctctagtatcaacccaggaataggaaatgtgagcgccagcagccccgtgcagcagggcctgggtggccaggctcaagggcagccgaacagtgctaacatggccagcctcagtgccatgggcaagagccctctgagccagggagattcttcagcccccagcctgcctaaacaggcagccagcacctctgggcccacccccgctgcctcccaagcactgaatccgcaagcacaaaagcaagtggggctggcgactagcagccctgccacgtcacagactggacctggtatctgcatgaatgctaactttaaccagacccacccaggcctcctcaatagtaactctggccatagcttaattaatcaggcttcacaagggcaggcgcaagtcatgaatggatctcttggggctgctggcagaggaaggggagctggaatgccgtaccctactccagccatgcagggcgcctcgagcagcgtgctggctgagaccctaacgcaggtttccccgcaaatgactggtcacgcgggactgaacaccgcacaggcaggaggcatggccaagatgggaataactgggaacacaagtccatttggacagccctttagtcaagctggagggcagccaatgggagccactggagtgaacccccagttagccagcaaacagagcatggtcaacagtttgcccaccttccctacagatatcaagaatacttcagtcaccaacgtgccaaatatgtctcagatgcaaacatcagtgggaattgtacccacacaagcaattgcaacaggccccactgcagatcctgaaaaacgcaaactgatacagcagcagctggttctactgcttcatgctcataagtgtcagagacgagagcaagcaaacggagaggttcgggcctgctcgctcccgcattgtcgaaccatgaaaaacgttttgaatcacatgacgcattgtcaggctgggaaagcctgccaagccatcctggggtctccagctagtggaattcaaaacacaattggttctgttggcacagggcaacagaatgccacttctttaagtaacccaaatcccatagaccccagctccatgcagcgagcctatgctgctctcggactcccctacatgaaccagccccagacgcagctgcagcctcaggttcctggccagcaaccagcacagcctcaaacccaccagcagatgaggactctcaaccccctgggaaataatccaatgaacattccagcaggaggaataacaacagatcagcagcccccaaacttgatttcagaatcagctcttccgacttccctgggggccacaaacccactgatgaacgatggctccaactctggtaacattggaaccctcagcactataccaacagcagctcctccttctagcaccggtgtaaggaaaggctggcacgaacatgtcactcaggacctgcggagccatctagtgcataaactcgtccaagccatcttcccaacacctgatcccgcagctctaaaggatcgccgcatggaaaacctggtagcctatgctaagaaagtggaaggggacatgtacgagtctgccaacagcagggatgaatattatcacttattagcagagaaaatctacaagatacaaaaagaactagaagaaaaacggaggtcgcgtttacataaacaaggcatcttggggaaccagccagccttaccagccccgggggctcagccccctgtgattccacaggcacaacctgtgagacctccaaatggacccctgtccctgccagtgaatcgcatgcaagtttctcaagggatgaattcatttaaccccatgtccttggggaacgtccagttgccacaagcacccatgggacctcgtgcagcctccccaatgaaccactctgtccagatgaacagcatgggctcagtgccagggatggccatttctccttcccgaatgcctcagcctccgaacatgatgggtgcacacaccaacaacatgatggcccaggcgcccgctcagagccagtttctgccacagaaccagttcccgtcatccagcggggcgatgagtgtgggcatggggcagccgccagcccaaacaggcgtgtcacagggacaggtgcctggtgctgctcttcctaaccctctcaacatgctggggcctcaggccagccagctaccttgccctccagtgacacagtcaccactgcacccaacaccgcctcctgcttccacggctgctggcatgccatctctccagcacacgacaccacctgggatgactcctccccagccagcagctcccactcagccatcaactcctgtgtcgtcttccgggcagactcccaccccgactcctggctcagtgcccagtgctacccaaacccagagcacccctacagtccaggcagcagcccaggcccaggtgaccccgcagcctcaaaccccagttcagcccccgtctgtggctacccctcagtcatcgcagcaacagccgacgcctgtgcacgcccagcctcctggcacaccgctttcccaggcagcagccagcattgataacagagtccctaccccctcctcggtggccagcgcagaaaccaattcccagcagccaggacctgacgtacctgtgctggaaatgaagacggagacccaagcagaggacactgagcccgatcctggtgaatccaaaggggagcccaggtctgagatgatggaggaggatttgcaaggagcttcccaagttaaagaagaaacagacatagcagagcagaaatcagaaccaatggaagtggatgaaaagaaacctgaagtgaaagtagaagttaaagaggaagaagagagtagcagtaacggcacagcctctcagtcaacatctccttcgcagccgcgcaaaaaaatctttaaaccagaggagttacgccaggccctcatgccaaccctagaagcactgtatcgacaggacccagagtcattacctttccggcagcctgtagatccccagctcctcggaattccagactattttgacatcgtaaagaatcccatggacctctccaccatcaagcggaagctggacacagggcaataccaagagccctggcagtacgtggacgacgtctggctcatgttcaacaatgcctggctctataatcgcaagacatcccgagtctataagttttgcagtaagcttgcagaggtctttgagcaggaaattgaccctgtcatgcagtcccttggatattgctgtggacgcaagtatgagttttccccacagactttgtgctgctatgggaagcagctgtgtaccattcctcgcgatgctgcctactacagctatcagaataggtatcatttctgtgagaagtgtttcacagagatccagggcgagaatgtgaccctgggtgacgacccttcacagccccagacgacaatttcaaaggatcagtttgaaaagaagaaaaatgataccttagaccccgaacctttcgttgattgcaaggagtgtggccggaagatgcatcagatttgcgttctgcactatgacatcatttggccttcaggttttgtgtgcgacaactgcttgaagaaaactggcagacctcgaaaagaaaacaaattcagtgctaagaggctgcagaccacaagactgggaaaccacttggaagaccgagtgaacaaatttttgcggcgccagaatcaccctgaagccggggaggtttttgtccgagtggtggccagctcagacaagacggtggaggtcaagcccgggatgaagtcacggtttgtggattctggggaaatgtctgaatctttcccatatcgaaccaaagctctgtttgcttttgaggaaattgacggcgtggatgtctgcttttttggaatgcacgtccaagaatacggctctgattgcccccctccaaacacgaggcgtgtgtacatttcttatctggatagtattcatttcttccggccacgttgcctccgcacagccgtttaccatgagatccttattggatatttagagtatgtgaagaaattagggtatgtgacagggcacatctgggcctgtcctccaagtgaaggagatgattacatcttccattgccacccacctgatcaaaaaatacccaagccaaaacgactgcaggagtggtacaaaaagatgctggacaaggcgtttgcagagcggatcatccatgactacaaggatattttcaaacaagcaactgaagacaggctcaccagtgccaaggaactgccctattttgaaggtgatttctggcccaatgtgttagaagagagcattaaggaactagaacaagaagaagaggagaggaaaaaggaagagagcactgcagccagtgaaaccactgagggcagtcagggcgacagcaagaatgccaagaagaagaacaacaagaaaaccaacaagaacaaaagcagcatcagccgcgccaacaagaagaagcccagcatgcccaacgtgtccaatgacctgtcccagaagctgtatgccaccatggagaagcacaaggaggtcttcttcgtgatccacctgcacgctgggcctgtcatcaacaccctgccccccatcgtcgaccccgaccccctgctcagctgtgacctcatggatgggcgcgacgccttcctcaccctcgccagagacaagcactgggagttctcctccttgcgccgctccaagtggtccacgctctgcatgctggtggagctgcacacccagggccaggaccgctttgtctacacctgcaacgagtgcaagcaccacgtggagacgcgctggcactgcactgtgtgcgaggactacgacctctgcatcaactgctataacacgaagagccatgcccataagatggtgaagtgggggctgggcctggatgacgagggcagcagccagggcgagccacagtcaaagagcccccaggagtcacgccggctgagcatccagcgctgcatccagtcgctggtgcacgcgtgccagtgccgcaacgccaactgctcgctgccatcctgccagaagatgaagcgggtggtgcagcacaccaagggctgcaaacgcaagaccaacgggggctgcccggtgtgcaagcagctcatcgccctctgctgctaccacgccaagcactgccaagaaaacaaatgccccgtgcccttctgcctcaacatcaaacacaagctccgccagcagcagatccagcaccgcctgcagcaggcccagctcatgcgccggcggatggccaccatgaacacccgcaacgtgcctcagcagagtctgccttctcctacctcagcaccgcccgggacccccacacagcagcccagcacaccccagacgccgcagccccctgcccagccccaaccctcacccgtgagcatgtcaccagctggcttccccagcgtggcccggactcagccccccaccacggtgtccacagggaagcctaccagccaggtgccggcccccccacccccggcccagccccctcctgcagcggtggaagcggctcggcagatcgagcgtgaggcccagcagcagcagcacctgtaccgggtgaacatcaacaacagcatgcccccaggacgcacgggcatggggaccccggggagccagatggcccccgtgagcctgaatgtgccccgacccaaccaggtgagcgggcccgtcatgcccagcatgcctcccgggcagtggcagcaggcgccccttccccagcagcagcccatgccaggcttgcccaggcctgtgatatccatgcaggcccaggcggccgtggctgggccccggatgcccagcgtgcagccacccaggagcatctcacccagcgctctgcaagacctgctgcggaccctgaagtcgcccagctcccctcagcagcaacagcaggtgctgaacattctcaaatcaaacccgcagctaatggcagctttcatcaaacagcgcacagccaagtacgtggccaatcagcccggcatgcagccccagcctggcctccagtcccagcccggcatgcaaccccagcctggcatgcaccagcagcccagcctgcagaacctgaatgccatgcaggctggcgtgccgcggcccggtgtgcctccacagcagcaggcgatgggaggcctgaacccccagggccaggccttgaacatcatgaacccaggacacaaccccaacatggcgagtatgaatccacagtaccgagaaatgttacggaggcagctgctgcagcagcagcagcaacagcagcagcaacaacagcagcaacagcagcagcagcaagggagtgccggcatggctgggggcatggcggggcacggccagttccagcagcctcaaggacccggaggctacccaccggccatgcagcagcagcagcgcatgcagcagcatctccccctccagggcagctccatgggccagatggcggctcagatgggacagcttggccagatggggcagccggggctgggggcagacagcacccccaacatccagcaagccctgcagcagcggattctgcagcaacagcagatgaagcagcagattgggtccccaggccagccgaaccccatgagcccccagcaacacatgctctcaggacagccacaggcctcgcatctccctggccagcagatcgccacgtcccttagtaaccaggtgcggtctccagcccctgtccagtctccacggccccagtcccagcctccacattccagcccgtcaccacggatacagccccagccttcgccacaccacgtctcaccccagactggttccccccaccccggactcgcagtcaccatggccagctccatagatcagggacacttggggaaccccgaacagagtgcaatgctcccccagctgaacacccccagcaggagtgcgctgtccagcgaactgtccctggtcggggacaccacgggggacacgctagagaagtttgtggagggcttgtagcattgtgagagcatcaccttttccctttcatgttcttggaccttttgtactgaaaatccaggcatctaggttctttttattcctagatggaactgcgacttccgagccatggaagggtggattgatgtttaaagaaacaatacaaagaatatatttttttgttaaaaaccagttgatttaaatatctggtctctctctttggtttttttttggcgggggggtggggggggttcttttttttccgttttgtttttgtttggggggaggggggttttgtttggattctttttgtcgtcattgctggtgactcatgcctttttttaacgggaaaaacaagttcattatattcatattttttatttgtattttcaagactttaaacatttatgtttaaaagtaagaagaaaaataatattcagaactgattcctgaaataatgcaagcttataatgtatcccgataactttgtgatgtttcgggaagatttttttctatagtgaactctgtgggcgtctcccagtattaccctggatgataggaattgactccggcgtgcacacacgtacacacccacacacatctatctatacataatggctgaagccaaacttgtcttgcagatgtagaaattgttgctttgtttctctgataaaactggttttagacaaaaaatagggatgatcactcttagaccatgctaatgttactagagaagaagccttcttttctttcttctatgtgaaacttgaaatgaggaaaagcaattctagtgtaaatcatgcaagcgctctaattcctataaatacgaaactcgagaagattcaatcactgtatagaatggtaaaataccaactcatttcttatatcatattgttaaataaactgtgtgcaacagacaaaaagggtggtccttcttgaattcatgtacatggtattaacacttagtgttcggggttttttgttatgaaaatgctgttttcaacattgtatttggactatgcatgtgttttttccccattgtatataaagtaccgcttaaaattgatataaattactgaggtttttaacatgtattctgttctttaagatccctgtaagaatgtttaaggtttttatttatttatatatattttttgagtctgttctttgtaagacatggttctggttgttcgctcatagcggagaggctggggctgcggttgtggttgtggcggcgtgggtggtggctgggaactgtggcccaggcttagcggccgcccggaggcttttcttcccggagactgaggtgggcggctcagcgttggccccacacattcgaggctcacaggtgattgtcgctcacacagttagggtcgtcagttggtctgaaactgcatttggcccactcctccatcctccctgtccgtcgtagctgccacccccagaggcggcgcttcttcccgtgttcaggcggctccccccccccgtacacgactcccagaatctgaggcagagagtgctccaggctcgcgaggtgctttctgacttccccccaaatcctgccgctgccgcgcagcatgtcccgtgtggcgtttgaggaaatgctgagggacagacaccttggagcaccagctccggtccctgttacagtgagaaaggtcccccacttcgggggatacttgcacttagccacatggtcctgcctcccttggagtccagttccaggctcccttactgagtgggtgagacaagttcacaaaaaccgtaaaactgagaggaggaccatgggcaggggagctgaagttcatcccctaagtctaccacccccagcacccagagaacccactttatccctagtcccccaacaaaggctggtctaggtgggggtgatggtaattttagaaatcacgccccaaatagcttccgtttgggcccttacattcacagataggttttaaatagctgaatacttggtttgggaatctgaattcgaggaacctttctaagaaattggaaaggtccgatctagttttagcacagagctttgaaccttgagttataaaatgcagaataattcaagtaaaaataagaccaccatctggcacccctgaccagcccccattcaccccatcccaggaggggaagcacaggccgggcctccgggtggagattgctgccactgctcggcctgctgggttcttaacctccagtgtcctcttcatcttttccacccgtagggaaaccttgagccatgtgttcaaacaagaagtggggctagagcccgagagcagcagctctaagcccacactcagaaagtggcgccctcctggttgtgcagccttttaatgtgggcagtggaggggcctctgtttcaggttatcctggaattcaaaacgttatgtaccaacctcatcctctttggagtctgcatcctgtgcaaccgtcttgggcaatccagatgtcgaaggatgtgaccgagagcatggtctgtggatgctaaccctaagtttgtcgtaaggaaatttctgtaagaaacctggaaagccccaacgctgtgtctcatgctgtatacttaagaggagaagaaaaagtcctatatttgtgatcaaaaagaggaaacttgaaatgtgatggtgtttataataaaagatggtaaaactacttggattcaaaaat

SEQ ID NO: 439549 - DNA, 9036 bp, Homo sapiens
  misc_feature (2)..(2): n is a, c, g, or t
tncttttttttttaattgaggaatcaacagccgccatcttgtcgcggacccgaccggggcttcgagcgcgatctactcggccccgccggtcccgggccccacaaccgcccgcgcaccccgctccgcccggccggcccgctccgcccggccctcggcgcccgccccggcggccccgctcgcctctcggctcggcctcccggagcccggcggcggcggcggcggcagcggcggcggcggcggcggaacggggggtgggggggccgcggcggcggcggcgaccccgctcggcgcattgtttttcctcacggcggcggcggcggcgggccgcgggccgggagcggagcccggagccccctcgtcgtcgggccgcgagcgaattcattaagtggggcgcggggggggagcgaggcggcggcggcggcggcaccatgttctcggggactgcctgagccgcccggccgggcgccgtcgctgccagccgggcccgggggggcggccgggccgccggggcgcccccaccgcggagtgtcgcgctcgggaggcgggcaggggatgagggggccgcggccggcggcggcggcggcggccgggggcgggcggtgagcgctgcggggcgctgttgctgtggctgagatttggccgccgcctcccccacccggcctgcgccctccctctccctcggcgcccgcccgcccgctcgcggcccgcgctcgctcctctccctcgcagccggcagggcccccgacccccgtccgggccctcgccggcccggccgcccgtgcccggggctgttttcgcgagcaggtgaaaatggctgagaacttgctggacggaccgcccaaccccaaaagagccaaactcagctcgcccggtttctcggcgaatgacagcacagattttggatcattgtttgacttggaaaatgatcttcctgatgagctgatacccaatggaggagaattaggccttttaaacagtgggaaccttgttccagatgctgcttccaaacataaacaactgtcggagcttctacgaggaggcagcggctctagtatcaacccaggaataggaaatgtgagcgccagcagccccgtgcagcagggcctgggtggccaggctcaagggcagccgaacagtgctaacatggccagcctcagtgccatgggcaagagccctctgagccagggagattcttcagcccccagcctgcctaaacaggcagccagcacctctgggcccacccccgctgcctcccaagcactgaatccgcaagcacaaaagcaagtggggctggcgactagcagccctgccacgtcacagactggacctggtatctgcatgaatgctaactttaaccagacccacccaggcctcctcaatagtaactctggccatagcttaattaatcaggcttcacaagggcaggcgcaagtcatgaatggatctcttggggctgctggcagaggaaggggagctggaatgccgtaccctactccagccatgcagggcgcctcgagcagcgtgctggctgagaccctaacgcaggtttccccgcaaatgactggtcacgcgggactgaacaccgcacaggcaggaggcatggccaagatgggaataactgggaacacaagtccatttggacagccctttagtcaagctggagggcagccaatgggagccactggagtgaacccccagttagccagcaaacagagcatggtcaacagtttgcccaccttccctacagatatcaagaatacttcagtcaccaacgtgccaaatatgtctcagatgcaaacatcagtgggaattgtacccacacaagcaattgcaacaggccccactgcagatcctgaaaaacgcaaactgatacagcagcagctggttctactgcttcatgctcataagtgtcagagacgagagcaagcaaacggagaggttcgggcctgctcgctcccgcattgtcgaaccatgaaaaacgttttgaatcacatgacgcattgtcaggctgggaaagcctgccaagttgcccattgtgcatcttcacgacaaatcatctctcattggaagaactgcacacgacatgactgtcctgtttgcctccctttgaaaaatgccagtgacaagcgaaaccaacaaaccatcctggggtctccagctagtggaattcaaaacacaattggttctgttggcacagggcaacagaatgccacttctttaagtaacccaaatcccatagaccccagctccatgcagcgagcctatgctgctctcggactcccctacatgaaccagccccagacgcagctgcagcctcaggttcctggccagcaaccagcacagcctcaaacccaccagcagatgaggactctcaaccccctgggaaataatccaatgaacattccagcaggaggaataacaacagatcagcagcccccaaacttgatttcagaatcagctcttccgacttccctgggggccacaaacccactgatgaacgatggctccaactctggtaacattggaaccctcagcactataccaacagcagctcctccttctagcaccggtgtaaggaaaggctggcacgaacatgtcactcaggacctgcggagccatctagtgcataaactcgtccaagccatcttcccaacacctgatcccgcagctctaaaggatcgccgcatggaaaacctggtagcctatgctaagaaagtggaaggggacatgtacgagtctgccaacagcagggatgaatattatcacttattagcagagaaaatctacaagatacaaaaagaactagaagaaaaacggaggtcgcgtttacataaacaaggcatcttggggaaccagccagccttaccagccccgggggctcagccccctgtgattccacaggcacaacctgtgagacctccaaatggacccctgtccctgccagtgaatcgcatgcaagtttctcaagggatgaattcatttaaccccatgtccttggggaacgtccagttgccacaagcacccatgggacctcgtgcagcctccccaatgaaccactctgtccagatgaacagcatgggctcagtgccagggatggccatttctccttcccgaatgcctcagcctccgaacatgatgggtgcacacaccaacaacatgatggcccaggcgcccgctcagagccagtttctgccacagaaccagttcccgtcatccagcggggcgatgagtgtgggcatggggcagccgccagcccaaacaggcgtgtcacagggacaggtgcctggtgctgctcttcctaaccctctcaacatgctggggcctcaggccagccagctaccttgccctccagtgacacagtcaccactgcacccaacaccgcctcctgcttccacggctgctggcatgccatctctccagcacacgacaccacctgggatgactcctccccagccagcagctcccactcagccatcaactcctgtgtcgtcttccgggcagactcccaccccgactcctggctcagtgcccagtgctacccaaacccagagcacccctacagtccaggcagcagcccaggcccaggtgaccccgcagcctcaaaccccagttcagcccccgtctgtggctacccctcagtcatcgcagcaacagccgacgcctgtgcacgcccagcctcctggcacaccgctttcccaggcagcagccagcattgataacagagtccctaccccctcctcggtggccagcgcagaaaccaattcccagcagccaggacctgacgtacctgtgctggaaatgaagacggagacccaagcagaggacactgagcccgatcctggtgaatccaaaggggagcccaggtctgagatgatggaggaggatttgcaaggagcttcccaagttaaagaagaaacagacatagcagagcagaaatcagaaccaatggaagtggatgaaaagaaacctgaagtgaaagtagaagttaaagaggaagaagagagtagcagtaacggcacagcctctcagtcaacatctccttcgcagccgcgcaaaaaaatctttaaaccagaggagttacgccaggccctcatgccaaccctagaagcactgtatcgacaggacccagagtcattacctttccggcagcctgtagatccccagctcctcggaattccagactattttgacatcgtaaagaatcccatggacctctccaccatcaagcggaagctggacacagggcaataccaagagccctggcagtacgtggacgacgtctggctcatgttcaacaatgcctggctctataatcgcaagacatcccgagtctataagttttgcagtaagcttgcagaggtctttgagcaggaaattgaccctgtcatgcagtcccttggatattgctgtggacgcaagtatgagttttccccacagactttgtgctgctatgggaagcagctgtgtaccattcctcgcgatgctgcctactacagctatcagaataggtatcatttctgtgagaagtgtttcacagagatccagggcgagaatgtgaccctgggtgacgacccttcacagccccagacgacaatttcaaaggatcagtttgaaaagaagaaaaatgataccttagaccccgaacctttcgttgattgcaaggagtgtggccggaagatgcatcagatttgcgttctgcactatgacatcatttggccttcaggttttgtgtgcgacaactgcttgaagaaaactggcagacctcgaaaagaaaacaaattcagtgctaagaggctgcagaccacaagactgggaaaccacttggaagaccgagtgaacaaatttttgcggcgccagaatcaccctgaagccggggaggtttttgtccgagtggtggccagctcagacaagacggtggaggtcaagcccgggatgaagtcacggtttgtggattctggggaaatgtctgaatctttcccatatcgaaccaaagctctgtttgcttttgaggaaattgacggcgtggatgtctgcttttttggaatgcacgtccaagaatacggctctgattgcccccctccaaacacgaggcgtgtgtacatttcttatctggatagtattcatttcttccggccacgttgcctccgcacagccgtttaccatgagatccttattggatatttagagtatgtgaagaaattagggtatgtgacagggcacatctgggcctgtcctccaagtgaaggagatgattacatcttccattgccacccacctgatcaaaaaatacccaagccaaaacgactgcaggagtggtacaaaaagatgctggacaaggcgtttgcagagcggatcatccatgactacaaggatattttcaaacaagcaactgaagacaggctcaccagtgccaaggaactgccctattttgaaggtgatttctggcccaatgtgttagaagagagcattaaggaactagaacaagaagaagaggagaggaaaaaggaagagagcactgcagccagtgaaaccactgagggcagtcagggcgacagcaagaatgccaagaagaagaacaacaagaaaaccaacaagaacaaaagcagcatcagccgcgccaacaagaagaagcccagcatgcccaacgtgtccaatgacctgtcccagaagctgtatgccaccatggagaagcacaaggaggtcttcttcgtgatccacctgcacgctgggcctgtcatcaacaccctgccccccatcgtcgaccccgaccccctgctcagctgtgacctcatggatgggcgcgacgccttcctcaccctcgccagagacaagcactgggagttctcctccttgcgccgctccaagtggtccacgctctgcatgctggtggagctgcacacccagggccaggaccgctttgtctacacctgcaacgagtgcaagcaccacgtggagacgcgctggcactgcactgtgtgcgaggactacgacctctgcatcaactgctataacacgaagagccatgcccataagatggtgaagtgggggctgggcctggatgacgagggcagcagccagggcgagccacagtcaaagagcccccaggagtcacgccggctgagcatccagcgctgcatccagtcgctggtgcacgcgtgccagtgccgcaacgccaactgctcgctgccatcctgccagaagatgaagcgggtggtgcagcacaccaagggctgcaaacgcaagaccaacgggggctgcccggtgtgcaagcagctcatcgccctctgctgctaccacgccaagcactgccaagaaaacaaatgccccgtgcccttctgcctcaacatcaaacacaagctccgccagcagcagatccagcaccgcctgcagcaggcccagctcatgcgccggcggatggccaccatgaacacccgcaacgtgcctcagcagagtctgccttctcctacctcagcaccgcccgggacccccacacagcagcccagcacaccccagacgccgcagccccctgcccagccccaaccctcacccgtgagcatgtcaccagctggcttccccagcgtggcccggactcagccccccaccacggtgtccacagggaagcctaccagccaggtgccggcccccccacccccggcccagccccctcctgcagcggtggaagcggctcggcagatcgagcgtgaggcccagcagcagcagcacctgtaccgggtgaacatcaacaacagcatgcccccaggacgcacgggcatggggaccccggggagccagatggcccccgtgagcctgaatgtgccccgacccaaccaggtgagcgggcccgtcatgcccagcatgcctcccgggcagtggcagcaggcgccccttccccagcagcagcccatgccaggcttgcccaggcctgtgatatccatgcaggcccaggcggccgtggctgggccccggatgcccagcgtgcagccacccaggagcatctcacccagcgctctgcaagacctgctgcggaccctgaagtcgcccagctcccctcagcagcaacagcaggtgctgaacattctcaaatcaaacccgcagctaatggcagctttcatcaaacagcgcacagccaagtacgtggccaatcagcccggcatgcagccccagcctggcctccagtcccagcccggcatgcaaccccagcctggcatgcaccagcagcccagcctgcagaacctgaatgccatgcaggctggcgtgccgcggcccggtgtgcctccacagcagcaggcgatgggaggcctgaacccccagggccaggccttgaacatcatgaacccaggacacaaccccaacatggcgagtatgaatccacagtaccgagaaatgttacggaggcagctgctgcagcagcagcagcaacagcagcagcaacaacagcagcaacagcagcagcagcaagggagtgccggcatggctgggggcatggcggggcacggccagttccagcagcctcaaggacccggaggctacccaccggccatgcagcagcagcagcgcatgcagcagcatctccccctccagggcagctccatgggccagatggcggctcagatgggacagcttggccagatggggcagccggggctgggggcagacagcacccccaacatccagcaagccctgcagcagcggattctgcagcaacagcagatgaagcagcagattgggtccccaggccagccgaaccccatgagcccccagcaacacatgctctcaggacagccacaggcctcgcatctccctggccagcagatcgccacgtcccttagtaaccaggtgcggtctccagcccctgtccagtctccacggccccagtcccagcctccacattccagcccgtcaccacggatacagccccagccttcgccacaccacgtctcaccccagactggttccccccaccccggactcgcagtcaccatggccagctccatagatcagggacacttggggaaccccgaacagagtgcaatgctcccccagctgaacacccccagcaggagtgcgctgtccagcgaactgtccctggtcggggacaccacgggggacacgctagagaagtttgtggagggcttgtagcattgtgagagcatcaccttttccctttcatgttcttggaccttttgtactgaaaatccaggcatctaggttctttttattcctagatggaactgcgacttccgagccatggaagggtggattgatgtttaaagaaacaatacaaagaatatatttttttgttaaaaaccagttgatttaaatatctggtctctctctttggtttttttttggcgggggggtggggggggttcttttttttccgttttgtttttgtttggggggaggggggttttgtttggattctttttgtcgtcattgctggtgactcatgcctttttttaacgggaaaaacaagttcattatattcatattttttatttgtattttcaagactttaaacatttatgtttaaaagtaagaagaaaaataatattcagaactgattcctgaaataatgcaagcttataatgtatcccgataactttgtgatgtttcgggaagatttttttctatagtgaactctgtgggcgtctcccagtattaccctggatgataggaattgactccggcgtgcacacacgtacacacccacacacatctatctatacataatggctgaagccaaacttgtcttgcagatgtagaaattgttgctttgtttctctgataaaactggttttagacaaaaaatagggatgatcactcttagaccatgctaatgttactagagaagaagccttcttttctttcttctatgtgaaacttgaaatgaggaaaagcaattctagtgtaaatcatgcaagcgctctaattcctataaatacgaaactcgagaagattcaatcactgtatagaatggtaaaataccaactcatttcttatatcatattgttaaataaactgtgtgcaacagac

SEQ ID NO: 439550 - DNA, 7879 bp, Homo sapiens
tctgttttcctgtgggtgcttttcctaatgaaccgttgtgggtacatttacagggatgaattcatttaaccccatgtccttggggaacgtccagttgccacaagcacccatgggacctcgtgcagcctccccaatgaaccactctgtccagatgaacagcatgggctcagtgccagggatggccatttctccttcccgaatgcctcagcctccgaacatgatgggtgcacacaccaacaacatgatggcccaggcgcccgctcagagccagtttctgccacagaaccagttcccgtcatccagcggggcgatgagtgtgggcatggggcagccgccagcccaaacaggcgtgtcacagggacaggtgcctggtgctgctcttcctaaccctctcaacatgctggggcctcaggccagccagctaccttgccctccagtgacacagtcaccactgcacccaacaccgcctcctgcttccacggctgctggcatgccatctctccagcacacgacaccacctgggatgactcctccccagccagcagctcccactcagccatcaactcctgtgtcgtcttccgggcagactcccaccccgactcctggctcagtgcccagtgctacccaaacccagagcacccctacagtccaggcagcagcccaggcccaggtgaccccgcagcctcaaaccccagttcagcccccgtctgtggctacccctcagtcatcgcagcaacagccgacgcctgtgcacgcccagcctcctggcacaccgctttcccaggcagcagccagcattgataacagagtccctaccccctcctcggtggccagcgcagaaaccaattcccagcagccaggacctgacgtacctgtgctggaaatgaagacggagacccaagcagaggacactgagcccgatcctggtgaatccaaaggggagcccaggtctgagatgatggaggaggatttgcaaggagcttcccaagttaaagaagaaacagacatagcagagcagaaatcagaaccaatggaagtggatgaaaagaaacctgaagtgaaagtagaagttaaagaggaagaagagagtagcagtaacggcacagcctctcagtcaacatctccttcgcagccgcgcaaaaaaatctttaaaccagaggagttacgccaggccctcatgccaaccctagaagcactgtatcgacaggacccagagtcattacctttccggcagcctgtagatccccagctcctcggaattccagactattttgacatcgtaaagaatcccatggacctctccaccatcaagcggaagctggacacagggcaataccaagagccctggcagtacgtggacgacgtctggctcatgttcaacaatgcctggctctataatcgcaagacatcccgagtctataagttttgcagtaagcttgcagaggtctttgagcaggaaattgaccctgtcatgcagtcccttggatattgctgtggacgcaagtatgagttttccccacagactttgtgctgctatgggaagcagctgtgtaccattcctcgcgatgctgcctactacagctatcagaataggtatcatttctgtgagaagtgtttcacagagatccagggcgagaatgtgaccctgggtgacgacccttcacagccccagacgacaatttcaaaggatcagtttgaaaagaagaaaaatgataccttagaccccgaacctttcgttgattgcaaggagtgtggccggaagatgcatcagatttgcgttctgcactatgacatcatttggccttcaggttttgtgtgcgacaactgcttgaagaaaactggcagacctcgaaaagaaaacaaattcagtgctaagaggctgcagaccacaagactgggaaaccacttggaagaccgagtgaacaaatttttgcggcgccagaatcaccctgaagccggggaggtttttgtccgagtggtggccagctcagacaagacggtggaggtcaagcccgggatgaagtcacggtttgtggattctggggaaatgtctgaatctttcccatatcgaaccaaagctctgtttgcttttgaggaaattgacggcgtggatgtctgcttttttggaatgcacgtccaagaatacggctctgattgcccccctccaaacacgaggcgtgtgtacatttcttatctggatagtattcatttcttccggccacgttgcctccgcacagccgtttaccatgagatccttattggatatttagagtatgtgaagaaattagggtatgtgacagggcacatctgggcctgtcctccaagtgaaggagatgattacatcttccattgccacccacctgatcaaaaaatacccaagccaaaacgactgcaggagtggtacaaaaagatgctggacaaggcgtttgcagagcggatcatccatgactacaaggatattttcaaacaagcaactgaagacaggctcaccagtgccaaggaactgccctattttgaaggtgatttctggcccaatgtgttagaagagagcattaaggaactagaacaagaagaagaggagaggaaaaaggaagagagcactgcagccagtgaaaccactgagggcagtcagggcgacagcaagaatgccaagaagaagaacaacaagaaaaccaacaagaacaaaagcagcatcagccgcgccaacaagaagaagcccagcatgcccaacgtgtccaatgacctgtcccagaagctgtatgccaccatggagaagcacaaggaggtcttcttcgtgatccacctgcacgctgggcctgtcatcaacaccctgccccccatcgtcgaccccgaccccctgctcagctgtgacctcatggatgggcgcgacgccttcctcaccctcgccagagacaagcactgggagttctcctccttgcgccgctccaagtggtccacgctctgcatgctggtggagctgcacacccagggccaggaccgctttgtctacacctgcaacgagtgcaagcaccacgtggagacgcgctggcactgcactgtgtgcgaggactacgacctctgcatcaactgctataacacgaagagccatgcccataagatggtgaagtgggggctgggcctggatgacgagggcagcagccagggcgagccacagtcaaagagcccccaggagtcacgccggctgagcatccagcgctgcatccagtcgctggtgcacgcgtgccagtgccgcaacgccaactgctcgctgccatcctgccagaagatgaagcgggtggtgcagcacaccaagggctgcaaacgcaagaccaacgggggctgcccggtgtgcaagcagctcatcgccctctgctgctaccacgccaagcactgccaagaaaacaaatgccccgtgcccttctgcctcaacatcaaacacaagctccgccagcagcagatccagcaccgcctgcagcaggcccagctcatgcgccggcggatggccaccatgaacacccgcaacgtgcctcagcagagtctgccttctcctacctcagcaccgcccgggacccccacacagcagcccagcacaccccagacgccgcagccccctgcccagccccaaccctcacccgtgagcatgtcaccagctggcttccccagcgtggcccggactcagccccccaccacggtgtccacagggaagcctaccagccaggtgccggcccccccacccccggcccagccccctcctgcagcggtggaagcggctcggcagatcgagcgtgaggcccagcagcagcagcacctgtaccgggtgaacatcaacaacagcatgcccccaggacgcacgggcatggggaccccggggagccagatggcccccgtgagcctgaatgtgccccgacccaaccaggtgagcgggcccgtcatgcccagcatgcctcccgggcagtggcagcaggcgccccttccccagcagcagcccatgccaggcttgcccaggcctgtgatatccatgcaggcccaggcggccgtggctgggccccggatgcccagcgtgcagccacccaggagcatctcacccagcgctctgcaagacctgctgcggaccctgaagtcgcccagctcccctcagcagcaacagcaggtgctgaacattctcaaatcaaacccgcagctaatggcagctttcatcaaacagcgcacagccaagtacgtggccaatcagcccggcatgcagccccagcctggcctccagtcccagcccggcatgcaaccccagcctggcatgcaccagcagcccagcctgcagaacctgaatgccatgcaggctggcgtgccgcggcccggtgtgcctccacagcagcaggcgatgggaggcctgaacccccagggccaggccttgaacatcatgaacccaggacacaaccccaacatggcgagtatgaatccacagtaccgagaaatgttacggaggcagctgctgcagcagcagcagcaacagcagcagcaacaacagcagcaacagcagcagcagcaagggagtgccggcatggctgggggcatggcggggcacggccagttccagcagcctcaaggacccggaggctacccaccggccatgcagcagcagcagcgcatgcagcagcatctccccctccagggcagctccatgggccagatggcggctcagatgggacagcttggccagatggggcagccggggctgggggcagacagcacccccaacatccagcaagccctgcagcagcggattctgcagcaacagcagatgaagcagcagattgggtccccaggccagccgaaccccatgagcccccagcaacacatgctctcaggacagccacaggcctcgcatctccctggccagcagatcgccacgtcccttagtaaccaggtgcggtctccagcccctgtccagtctccacggccccagtcccagcctccacattccagcccgtcaccacggatacagccccagccttcgccacaccacgtctcaccccagactggttccccccaccccggactcgcagtcaccatggccagctccatagatcagggacacttggggaaccccgaacagagtgcaatgctcccccagctgaacacccccagcaggagtgcgctgtccagcgaactgtccctggtcggggacaccacgggggacacgctagagaagtttgtggagggcttgtagcattgtgagagcatcaccttttccctttcatgttcttggaccttttgtactgaaaatccaggcatctaggttctttttattcctagatggaactgcgacttccgagccatggaagggtggattgatgtttaaagaaacaatacaaagaatatatttttttgttaaaaaccagttgatttaaatatctggtctctctctttggtttttttttggcgggggggtggggggggttcttttttttccgttttgtttttgtttggggggaggggggttttgtttggattctttttgtcgtcattgctggtgactcatgcctttttttaacgggaaaaacaagttcattatattcatattttttatttgtattttcaagactttaaacatttatgtttaaaagtaagaagaaaaataatattcagaactgattcctgaaataatgcaagcttataatgtatcccgataactttgtgatgtttcgggaagatttttttctatagtgaactctgtgggcgtctcccagtattaccctggatgataggaattgactccggcgtgcacacacgtacacacccacacacatctatctatacataatggctgaagccaaacttgtcttgcagatgtagaaattgttgctttgtttctctgataaaactggttttagacaaaaaatagggatgatcactcttagaccatgctaatgttactagagaagaagccttcttttctttcttctatgtgaaacttgaaatgaggaaaagcaattctagtgtaaatcatgcaagcgctctaattcctataaatacgaaactcgagaagattcaatcactgtatagaatggtaaaataccaactcatttcttatatcatattgttaaataaactgtgtgcaacagacaaaaagggtggtccttcttgaattcatgtacatggtattaacacttagtgttcggggttttttgttatgaaaatgctgttttcaacattgtatttggactatgcatgtgttttttccccattgtatataaagtaccgcttaaaattgatataaattactgaggtttttaacatgtattctgttctttaagatccctgtaagaatgtttaaggtttttatttatttatatatattttttgagtctgttctttgtaagacatggttctggttgttcgctcatagcggagaggctggggctgcggttgtggttgtggcggcgtgggtggtggctgggaactgtggcccaggcttagcggccgcccggaggcttttcttcccggagactgaggtgggcggctcagcgttggccccacacattcgaggctcacaggtgattgtcgctcacacagttagggtcgtcagttggtctgaaactgcatttggcccactcctccatcctccctgtccgtcgtagctgccacccccagaggcggcgcttcttcccgtgttcaggcggctccccccccccgtacacgactcccagaatctgaggcagagagtgctccaggctcgcgaggtgctttctgacttccccccaaatcctgccgctgccgcgcagcatgtcccgtgtggcgtttgaggaaatgctgagggacagacaccttggagcaccagctccggtccctgttacagtgagaaaggtcccccacttcgggggatacttgcacttagccacatggtcctgcctcccttggagtccagttccaggctcccttactgagtgggtgagacaagttcacaaaaaccgtaaaactgagaggaggaccatgggcaggggagctgaagttcatcccctaagtctaccacccccagcacccagagaacccactttatccctagtcccccaacaaaggctggtctaggtgggggtgatggtaattttagaaatcacgccccaaatagcttccgtttgggcccttacattcacagataggttttaaatagctgaatacttggtttgggaatctgaattcgaggaacctttctaagaaattggaaaggtccgatctagttttagcacagagctttgaaccttgagttataaaatgcagaataattcaagtaaaaataagaccaccatctggcacccctgaccagcccccattcaccccatcccaggaggggaagcacaggccgggcctccgggtggagattgctgccactgctcggcctgctgggttcttaacctccagtgtcctcttcatcttttccacccgtagggaaaccttgagccatgtgttcaaacaagaagtggggctagagcccgagagcagcagctctaagcccacactcagaaagtggcgccctcctggttgtgcagccttttaatgtgggcagtggaggggcctctgtttcaggttatcctggaattcaaaacgttatgtaccaacctcatcctctttggagtctgcatcctgtgcaaccgtcttgggcaatccagatgtcgaaggatgtgaccgagagcatggtctgtggatgctaaccctaagtttgtcgtaaggaaatttctgtaagaaacctggaaagccccaacgctgtgtctcatgctgtatacttaagaggagaagaaaaagtcctatatttgtgatcaaaaagaggaaacttgaaatgtgatggtgtttataataaaagatggtaaaactacttggattcaaaaat

SEQ ID NO: 439551 - DNA, 8904 bp, Homo sapiens
  misc_feature (2)..(2): n is a, c, g, or t
tncttttttttttaattgaggaatcaacagccgccatcttgtcgcggacccgaccggggcttcgagcgcgatctactcggccccgccggtcccgggccccacaaccgcccgcgcaccccgctccgcccggccggcccgctccgcccggccctcggcgcccgccccggcggccccgctcgcctctcggctcggcctcccggagcccggcggcggcggcggcggcagcggcggcggcggcggcggaacggggggtgggggggccgcggcggcggcggcgaccccgctcggcgcattgtttttcctcacggcggcggcggcggcgggccgcgggccgggagcggagcccggagccccctcgtcgtcgggccgcgagcgaattcattaagtggggcgcggggggggagcgaggcggcggcggcggcggcaccatgttctcggggactgcctgagccgcccggccgggcgccgtcgctgccagccgggcccgggggggcggccgggccgccggggcgcccccaccgcggagtgtcgcgctcgggaggcgggcaggggatgagggggccgcggccggcggcggcggcggcggccgggggcgggcggtgagcgctgcggggcgctgttgctgtggctgagatttggccgccgcctcccccacccggcctgcgccctccctctccctcggcgcccgcccgcccgctcgcggcccgcgctcgctcctctccctcgcagccggcagggcccccgacccccgtccgggccctcgccggcccggccgcccgtgcccggggctgttttcgcgagcaggtgaaaatggctgagaacttgctggacggaccgcccaaccccaaaagagccaaactcagctcgcccggtttctcggcgaatgacagcacagattttggatcattgtttgacttggaaaatgatcttcctgatgagctgatacccaatggaggagaattaggccttttaaacagtgggaaccttgttccagatgctgcttccaaacataaacaactgtcggagcttctacgaggaggcagcggctctagtatcaacccaggaataggaaatgtgagcgccagcagccccgtgcagcagggcctgggtggccaggctcaagggcagccgaacagtgctaacatggccagcctcagtgccatgggcaagagccctctgagccagggagattcttcagcccccagcctgcctaaacaggcagccagcacctctgggcccacccccgctgcctcccaagcactgaatccgcaagcacaaaagcaagtggggctggcgactagcagccctgccacgtcacagactggacctggtatctgcatgaatgctaactttaaccagacccacccaggcctcctcaatagtaactctggccatagcttaattaatcaggcttcacaagggcaggcgcaagtcatgaatggatctcttggggctgctggcagaggaaggggagctggaatgccgtaccctactccagccatgcagggcgcctcgagcagcgtgctggctgagaccctaacgcaggtttccccgcaaatgactggtcacgcgggactgaacaccgcacaggcaggaggcatggccaagatgggaataactgggaacacaagtccatttggacagccctttagtcaagctggagggcagccaatgggagccactggagtgaacccccagttagccagcaaacagagcatggtcaacagtttgcccaccttccctacagatatcaagaatacttcagtcaccaacgtgccaaatatgtctcagatgcaaacatcagtgggaattgtacccacacaagcaattgcaacaggccccactgcagatcctgaaaaacgcaaactgatacagcagcagctggttctactgcttcatgctcataagtgtcagagacgagagcaagcaaacggagaggttcgggcctgctcgctcccgcattgtcgaaccatgaaaaacgttttgaatcacatgacgcattgtcaggctgggaaagcctgccaagttgcccattgtgcatcttcacgacaaatcatctctcattggaagaactgcacacgacatgactgtcctgtttgcctccctttgaaaaatgccagtgacaagcgaaaccaacaaaccatcctggggtctccagctagtggaattcaaaacacaattggttctgttggcacagggcaacagaatgccacttctttaagtaacccaaatcccatagaccccagctccatgcagcgagcctatgctgctctcggactcccctacatgaaccagccccagacgcagctgcagcctcaggttcctggccagcaaccagcacagcctcaaacccaccagcagatgaggactctcaaccccctgggaaataatccaatgaacattccagcaggaggaataacaacagatcagcagcccccaaacttgatttcagaatcagctcttccgacttccctgggggccacaaacccactgatgaacgatggctccaactctggtaacattggaaccctcagcactataccaacagcagctcctccttctagcaccggtgtaaggaaaggctggcacgaacatgtcactcaggacctgcggagccatctagtgcataaactcgtccaagccatcttcccaacacctgatcccgcagctctaaaggatcgccgcatggaaaacctggtagcctatgctaagaaagtggaaggggacatgtacgagtctgccaacagcagggatgaatattatcacttattagcagagaaaatctacaagatacaaaaagaactagaagaaaaacggaggtcgcgtttacataaacaaggcatcttggggaaccagccagccttaccagccccgggggctcagccccctgtgattccacaggcacaacctgtgagacctccaaatggacccctgtccctgccagtgaatcgcatgcaagtttctcaagggatgaattcatttaaccccatgtccttggggaacgtccagttgccacaagcacccatgggacctcgtgcagcctccccaatgaaccactctgtccagatgaacagcatgggctcagtgccagggatggccatttctccttcccgaatgcctcagcctccgaacatgatgggtgcacacaccaacaacatgatggcccaggcgcccgctcagagccagtttctgccacagaaccagttcccgtcatccagcggggcgatgagtgtgggcatggggcagccgccagcccaaacaggcgtgtcacagggacaggtgcctggtgctgctcttcctaaccctctcaacatgctggggcctcaggccagccagctaccttgccctccagtgacacagtcaccactgcacccaacaccgcctcctgcttccacggctgctggcatgccatctctccagcacacgacaccacctgggatgactcctccccagccagcagctcccactcagccatcaactcctgtgtcgtcttccgggcagactcccaccccgactcctggctcagtgcccagtgctacccaaacccagagcacccctacagtccaggcagcagcccaggcccaggtgaccccgcagcctcaaaccccagttcagcccccgtctgtggctacccctcagtcatcgcagcaacagccgacgcctgtgcacgcccagcctcctggcacaccgctttcccaggcagcagccagcattgataacagagtccctaccccctcctcggtggccagcgcagaaaccaattcccagcagccaggacctgacgtacctgtgctggaaatgaagacggagacccaagcagaggacactgagcccgatcctggtgaatccaaaggggagcccaggtctgagatgatggaggaggatttgcaaggagcttcccaagttaaagaagaaacagacatagcagagcagaaatcagaaccaatggaagtggatgaaaagaaacctgaagtgaaagtagaagttaaagaggaagaagagagtagcagtaacggcacagcctctcagtcaacatctccttcgcagccgcgcaaaaaaatctttaaaccagaggagttacgccaggccctcatgccaaccctagaagcactgtatcgacaggacccagagtcattacctttccggcagcctgtagatccccagctcctcggaattccagactattttgacatcgtaaagaatcccatggacctctccaccatcaagcggaagctggacacagggcaataccaagagccctggcagtacgtggacgacgtctggctcatgttcaacaatgcctggctctataatcgcaagacatcccgagtctataagttttgcagtaagcttgcagaggtctttgagcaggaaattgaccctgtcatgcagtcccttggatattgctgtggacgcaagtatgagttttccccacagactttgtgctgctatgggaagcagctgtgtaccattcctcgcgatgctgcctactacagctatcagaataggtatcatttctgtgagaagtgtttcacagagatccagggcgagaatgtgaccctgggtgacgacccttcacagccccagacgacaatttcaaaggatcagtttgaaaagaagaaaaatgataccttagaccccgaacctttcgttgattgcaaggagtgtggccggaagatgcatcagatttgcgttctgcactatgacatcatttggccttcaggttttgtgtgcgacaactgcttgaagaaaactggcagacctcgaaaagaaaacaaattcagtgctaagaggctgcagaccacaagactgggaaaccacttggaagaccgagtgaacaaatttttgcggcgccagaatcaccctgaagccggggaggtttttgtccgagtggtggccagctcagacaagacggtggaggtcaagcccgggatgaagtcacggtttgtggattctggggaaatgtctgaatctttcccatatcgaaccaaagctctgtttgcttttgaggaaattgacggcgtggatgtctgcttttttggaatgcacgtccaagaatacggctctgattgcccccctccaaacacgaggcgtgtgtacatttcttatctggatagtattcatttcttccggccacgttgcctccgcacagccgtttaccatgagatccttattggatatttagagtatgtgaagaaattagggtatgtgacagggcacatctgggcctgtcctccaagtgaaggagatgattacatcttccattgccacccacctgatcaaaaaatacccaagccaaaacgactgcaggagtggtacaaaaagatgctggacaaggcgtttgcagagcggatcatccatgactacaaggatattttcaaacaagcaactgaagacaggctcaccagtgccaaggaactgccctattttgaaggtgatttctggcccaatgtgttagaagagagcattaaggaactagaacaagaagaagaggagaggaaaaaggaagagagcactgcagccagtgaaaccactgagggcagtcagggcgacagcaagaatgccaagaagaagaacaacaagaaaaccaacaagaacaaaagcagcatcagccgcgccaacaagaagaagcccagcatgcccaacgtgtccaatgacctgtcccagaagctgtatgccaccatggagaagcacaaggaggtcttcttcgtgatccacctgcacgctgggcctgtcatcaacaccctgccccccatcgtcgaccccgaccccctgctcagctgtgacctcatggatgggcgcgacgccttcctcaccctcgccagagacaagcactgggagttctcctccttgcgccgctccaagtggtccacgctctgcatgctggtggagctgcacacccagggccaggaccgctttgtctacacctgcaacgagtgcaagcaccacgtggagacgcgctggcactgcactgtgtgcgaggactacgacctctgcatcaactgctataacacgaagagccatgcccataagatggtgaagtgggggctgggcctggatgacgagggcagcagccagggcgagccacagtcaaagagcccccaggagtcacgccggctgagcatccagcgctgcatccagtcgctggtgcacgcgtgccagtgccgcaacgccaactgctcgctgccatcctgccagaagatgaagcgggtggtgcagcacaccaagggctgcaaacgcaagaccaacgggggctgcccggtgtgcaagcagctcatcgccctctgctgctaccacgccaagcactgccaagaaaacaaatgccccgtgcccttctgcctcaacatcaaacacaagctccgccagcagcagatccagcaccgcctgcagcaggcccagctcatgcgccggcggatggccaccatgaacacccgcaacgtgcctcagcagagtctgccttctcctacctcagcaccgcccgggacccccacacagcagcccagcacaccccagacgccgcagccccctgcccagccccaaccctcacccgtgagcatgtcaccagctggcttccccagcgtggcccggactcagccccccaccacggtgtccacagggaagcctaccagccaggtgccggcccccccacccccggcccagccccctcctgcagcggtggaagcggctcggcagatcgagcgtgaggcccagcagcagcagcacctgtaccgggtgaacatcaacaacagcatgcccccaggacgcacgggcatggggaccccggggagccagatggcccccgtgagcctgaatgtgccccgacccaaccaggtgagcgggcccgtcatgcccagcatgcctcccgggcagtggcagcaggcgccccttccccagcagcagcccatgccaggcttgcccaggcctgtgatatccatgcaggcccaggcggccgtggctgggccccggatgcccagcgtgcagccacccaggagcatctcacccagcgctctgcaagacctgctgcggaccctgaagtcgcccagctcccctcagcagcaacagcaggtgctgaacattctcaaatcaaacccgcagctaatggcagctttcatcaaacagcgcacagccaagtacgtggccaatcagcccggcatgcagccccagcctggcctccagtcccagcccggcatgcaaccccagcctggcatgcaccagcagcccagcctgcagaacctgaatgccatgcaggctggcgtgccgcggcccggtgtgcctccacagcagcaggcgatgggaggcctgaacccccagggccaggccttgaacatcatgaacccaggacacaaccccaacatggcgagtatgaatccacagtaccgagaaatgttacggaggcagctgctgcagcagcagcagcaacagcagcagcaacaacagcagcaacagcagcagcagcaagggagtgccggcatggctgggggcatggcggggcacggccagttccagcagcctcaaggacccggaggctacccaccggccatgcagcagcagcagcgcatgcagcagcatctccccctccagggcagctccatgggccagatggcggctcagatgggacagcttggccagatggggcagccggggctgggggcagacagcacccccaacatccagcaagccctgcagcagcggattctgcagcaacagcagatgaagcagcagattgggtccccaggccagccgaaccccatgagcccccagcaacacatgctctcaggacagccacaggcctcgcatctccctggccagcagatcgccacgtcccttagtaaccaggtgcggtctccagcccctgtccagtctccacggccccagtcccagcctccacattccagcccgtcaccacggatacagccccagccttcgccacaccacgtctcaccccagactggttccccccaccccggactcgcagtcaccatggccagctccatagatcagggacacttggggaaccccgaacagagtgcaatgctcccccagctgaacacccccagcaggagtgcgctgtccagcgaactgtccctggtcggggacaccacgggggacacgctagagaagtttgtggagggcttgtagcattgtgagagcatcaccttttccctttcatgttcttggaccttttgtactgaaaatccaggcatctaggttctttttattcctagatggaactgcgacttccgagccatggaagggtggattgatgtttaaagaaacaatacaaagaatatatttttttgttaaaaaccagttgatttaaatatctggtctctctctttggtttttttttggcgggggggtggggggggttcttttttttccgttttgtttttgtttggggggaggggggttttgtttggattctttttgtcgtcattgctggtgactcatgcctttttttaacgggaaaaacaagttcattatattcatattttttatttgtattttcaagactttaaacatttatgtttaaaagtaagaagaaaaataatattcagaactgattcctgaaataatgcaagcttataatgtatcccgataactttgtgatgtttcgggaagatttttttctatagtgaactctgtgggcgtctcccagtattaccctggatgataggaattgactccggcgtgcacacacgtacacacccacacacatctatctatacataatggctgaagccaaacttgtcttgcagatgtagaaattgttgctttgtttctctgataaaactggttttagacaaaaagaaggcttcttctctagtaacattagcatggtctaagagtgatcaccctattttttgtctaaaaccagtttatacaggtaccgagctcgattgt

SEQ ID NO: 439552 - DNA, 7085 bp, Homo sapiens
ctttatttcttcttccggaagagaagaggaatcataaatgcaactctgactagaggaaggttttaacaaacctgttttaggcttgtaagagtcttcccgtgaggttgcggtaacataaaggtgtttgatattcatatgttatctgtaatgtttttctcaagatgatggaggaggatttgcaaggagcttcccaagttaaagaagaaacagacatagcagagcagaaatcagaaccaatggaagtggatgaaaagaaacctgaagtgaaagtagaagttaaagaggaagaagagagtagcagtaacggcacagcctctcagtcaacatctccttcgcagccgcgcaaaaaaatctttaaaccagaggagttacgccaggccctcatgccaaccctagaagcactgtatcgacaggacccagagtcattacctttccggcagcctgtagatccccagctcctcggaattccagactattttgacatcgtaaagaatcccatggacctctccaccatcaagcggaagctggacacagggcaataccaagagccctggcagtacgtggacgacgtctggctcatgttcaacaatgcctggctctataatcgcaagacatcccgagtctataagttttgcagtaagcttgcagaggtctttgagcaggaaattgaccctgtcatgcagtcccttggatattgctgtggacgcaagtatgagttttccccacagactttgtgctgctatgggaagcagctgtgtaccattcctcgcgatgctgcctactacagctatcagaataggtatcatttctgtgagaagtgtttcacagagatccagggcgagaatgtgaccctgggtgacgacccttcacagccccagacgacaatttcaaaggatcagtttgaaaagaagaaaaatgataccttagaccccgaacctttcgttgattgcaaggagtgtggccggaagatgcatcagatttgcgttctgcactatgacatcatttggccttcaggttttgtgtgcgacaactgcttgaagaaaactggcagacctcgaaaagaaaacaaattcagtgctaagaggctgcagaccacaagactgggaaaccacttggaagaccgagtgaacaaatttttgcggcgccagaatcaccctgaagccggggaggtttttgtccgagtggtggccagctcagacaagacggtggaggtcaagcccgggatgaagtcacggtttgtggattctggggaaatgtctgaatctttcccatatcgaaccaaagctctgtttgcttttgaggaaattgacggcgtggatgtctgcttttttggaatgcacgtccaagaatacggctctgattgcccccctccaaacacgaggcgtgtgtacatttcttatctggatagtattcatttcttccggccacgttgcctccgcacagccgtttaccatgagatccttattggatatttagagtatgtgaagaaattagggtatgtgacagggcacatctgggcctgtcctccaagtgaaggagatgattacatcttccattgccacccacctgatcaaaaaatacccaagccaaaacgactgcaggagtggtacaaaaagatgctggacaaggcgtttgcagagcggatcatccatgactacaaggatattttcaaacaagcaactgaagacaggctcaccagtgccaaggaactgccctattttgaaggtgatttctggcccaatgtgttagaagagagcattaaggaactagaacaagaagaagaggagaggaaaaaggaagagagcactgcagccagtgaaaccactgagggcagtcagggcgacagcaagaatgccaagaagaagaacaacaagaaaaccaacaagaacaaaagcagcatcagccgcgccaacaagaagaagcccagcatgcccaacgtgtccaatgacctgtcccagaagctgtatgccaccatggagaagcacaaggaggtcttcttcgtgatccacctgcacgctgggcctgtcatcaacaccctgccccccatcgtcgaccccgaccccctgctcagctgtgacctcatggatgggcgcgacgccttcctcaccctcgccagagacaagcactgggagttctcctccttgcgccgctccaagtggtccacgctctgcatgctggtggagctgcacacccagggccaggaccgctttgtctacacctgcaacgagtgcaagcaccacgtggagacgcgctggcactgcactgtgtgcgaggactacgacctctgcatcaactgctataacacgaagagccatgcccataagatggtgaagtgggggctgggcctggatgacgagggcagcagccagggcgagccacagtcaaagagcccccaggagtcacgccggctgagcatccagcgctgcatccagtcgctggtgcacgcgtgccagtgccgcaacgccaactgctcgctgccatcctgccagaagatgaagcgggtggtgcagcacaccaagggctgcaaacgcaagaccaacgggggctgcccggtgtgcaagcagctcatcgccctctgctgctaccacgccaagcactgccaagaaaacaaatgccccgtgcccttctgcctcaacatcaaacacaagctccgccagcagcagatccagcaccgcctgcagcaggcccagctcatgcgccggcggatggccaccatgaacacccgcaacgtgcctcagcagagtctgccttctcctacctcagcaccgcccgggacccccacacagcagcccagcacaccccagacgccgcagccccctgcccagccccaaccctcacccgtgagcatgtcaccagctggcttccccagcgtggcccggactcagccccccaccacggtgtccacagggaagcctaccagccaggtgccggcccccccacccccggcccagccccctcctgcagcggtggaagcggctcggcagatcgagcgtgaggcccagcagcagcagcacctgtaccgggtgaacatcaacaacagcatgcccccaggacgcacgggcatggggaccccggggagccagatggcccccgtgagcctgaatgtgccccgacccaaccaggtgagcgggcccgtcatgcccagcatgcctcccgggcagtggcagcaggcgccccttccccagcagcagcccatgccaggcttgcccaggcctgtgatatccatgcaggcccaggcggccgtggctgggccccggatgcccagcgtgcagccacccaggagcatctcacccagcgctctgcaagacctgctgcggaccctgaagtcgcccagctcccctcagcagcaacagcaggtgctgaacattctcaaatcaaacccgcagctaatggcagctttcatcaaacagcgcacagccaagtacgtggccaatcagcccggcatgcagccccagcctggcctccagtcccagcccggcatgcaaccccagcctggcatgcaccagcagcccagcctgcagaacctgaatgccatgcaggctggcgtgccgcggcccggtgtgcctccacagcagcaggcgatgggaggcctgaacccccagggccaggccttgaacatcatgaacccaggacacaaccccaacatggcgagtatgaatccacagtaccgagaaatgttacggaggcagctgctgcagcagcagcagcaacagcagcagcaacaacagcagcaacagcagcagcagcaagggagtgccggcatggctgggggcatggcggggcacggccagttccagcagcctcaaggacccggaggctacccaccggccatgcagcagcagcagcgcatgcagcagcatctccccctccagggcagctccatgggccagatggcggctcagatgggacagcttggccagatggggcagccggggctgggggcagacagcacccccaacatccagcaagccctgcagcagcggattctgcagcaacagcagatgaagcagcagattgggtccccaggccagccgaaccccatgagcccccagcaacacatgctctcaggacagccacaggcctcgcatctccctggccagcagatcgccacgtcccttagtaaccaggtgcggtctccagcccctgtccagtctccacggccccagtcccagcctccacattccagcccgtcaccacggatacagccccagccttcgccacaccacgtctcaccccagactggttccccccaccccggactcgcagtcaccatggccagctccatagatcagggacacttggggaaccccgaacagagtgcaatgctcccccagctgaacacccccagcaggagtgcgctgtccagcgaactgtccctggtcggggacaccacgggggacacgctagagaagtttgtggagggcttgtagcattgtgagagcatcaccttttccctttcatgttcttggaccttttgtactgaaaatccaggcatctaggttctttttattcctagatggaactgcgacttccgagccatggaagggtggattgatgtttaaagaaacaatacaaagaatatatttttttgttaaaaaccagttgatttaaatatctggtctctctctttggtttttttttggcgggggggtggggggggttcttttttttccgttttgtttttgtttggggggaggggggttttgtttggattctttttgtcgtcattgctggtgactcatgcctttttttaacgggaaaaacaagttcattatattcatattttttatttgtattttcaagactttaaacatttatgtttaaaagtaagaagaaaaataatattcagaactgattcctgaaataatgcaagcttataatgtatcccgataactttgtgatgtttcgggaagatttttttctatagtgaactctgtgggcgtctcccagtattaccctggatgataggaattgactccggcgtgcacacacgtacacacccacacacatctatctatacataatggctgaagccaaacttgtcttgcagatgtagaaattgttgctttgtttctctgataaaactggttttagacaaaaaatagggatgatcactcttagaccatgctaatgttactagagaagaagccttcttttctttcttctatgtgaaacttgaaatgaggaaaagcaattctagtgtaaatcatgcaagcgctctaattcctataaatacgaaactcgagaagattcaatcactgtatagaatggtaaaataccaactcatttcttatatcatattgttaaataaactgtgtgcaacagacaaaaagggtggtccttcttgaattcatgtacatggtattaacacttagtgttcggggttttttgttatgaaaatgctgttttcaacattgtatttggactatgcatgtgttttttccccattgtatataaagtaccgcttaaaattgatataaattactgaggtttttaacatgtattctgttctttaagatccctgtaagaatgtttaaggtttttatttatttatatatattttttgagtctgttctttgtaagacatggttctggttgttcgctcatagcggagaggctggggctgcggttgtggttgtggcggcgtgggtggtggctgggaactgtggcccaggcttagcggccgcccggaggcttttcttcccggagactgaggtgggcggctcagcgttggccccacacattcgaggctcacaggtgattgtcgctcacacagttagggtcgtcagttggtctgaaactgcatttggcccactcctccatcctccctgtccgtcgtagctgccacccccagaggcggcgcttcttcccgtgttcaggcggctccccccccccgtacacgactcccagaatctgaggcagagagtgctccaggctcgcgaggtgctttctgacttccccccaaatcctgccgctgccgcgcagcatgtcccgtgtggcgtttgaggaaatgctgagggacagacaccttggagcaccagctccggtccctgttacagtgagaaaggtcccccacttcgggggatacttgcacttagccacatggtcctgcctcccttggagtccagttccaggctcccttactgagtgggtgagacaagttcacaaaaaccgtaaaactgagaggaggaccatgggcaggggagctgaagttcatcccctaagtctaccacccccagcacccagagaacccactttatccctagtcccccaacaaaggctggtctaggtgggggtgatggtaattttagaaatcacgccccaaatagcttccgtttgggcccttacattcacagataggttttaaatagctgaatacttggtttgggaatctgaattcgaggaacctttctaagaaattggaaaggtccgatctagttttagcacagagctttgaaccttgagttataaaatgcagaataattcaagtaaaaataagaccaccatctggcacccctgaccagcccccattcaccccatcccaggaggggaagcacaggccgggcctccgggtggagattgctgccactgctcggcctgctgggttcttaacctccagtgtcctcttcatcttttccacccgtagggaaaccttgagccatgtgttcaaacaagaagtggggctagagcccgagagcagcagctctaagcccacactcagaaagtggcgccctcctggttgtgcagccttttaatgtgggcagtggaggggcctctgtttcaggttatcctggaattcaaaacgttatgtaccaacctcatcctctttggagtctgcatcctgtgcaaccgtcttgggcaatccagatgtcgaaggatgtgaccgagagcatggtctgtggatgctaaccctaagtttgtcgtaaggaaatttctgtaagaaacctggaaagccccaacgctgtgtctcatgctgtatacttaagaggagaagaaaaagtcctatatttgtgatcaaaaagaggaaacttgaaatgtgatggtgtttataataaaagatggtaaaactacttggattcaaaaat

SEQ ID NO: 439553 - DNA, 6045 bp, Homo sapiens
ctgccccattcccttctgaaacttgaaaaggataggggcatttgatcaaagtgtcttgaacagaatgaatgaggtttatgttgacattgacccttggagaaaaatagtcaaccgaactgcctttacagtgcacaggaggaaggggatggcattgccttgatgagccatcatattccctggttctttaatgaggcctcaggtttcttttgcagcctcggccctgccctgtgtgtgcaccccaagggagaagtgttgcagggctaatttgcaggcttgcatttgctcaggataaagttcgagccttgcccccaccacacccagctttgtgggcattcattctctctctctggttacttctgtcctggctttagtccttgctcctctgctataactccttaaaggcagggccgatttcactggcacgttcatctgacgtgtgtgcgtgggtcctgcaggtatgtgacagggcacatctgggcctgtcctccaagtgaaggagatgattacatcttccattgccacccacctgatcaaaaaatacccaagccaaaacgactgcaggagtggtacaaaaagatgctggacaaggcgtttgcagagcggatcatccatgactacaaggatattttcaaacaagcaactgaagacaggctcaccagtgccaaggaactgccctattttgaaggtgatttctggcccaatgtgttagaagagagcattaaggaactagaacaagaagaagaggagaggaaaaaggaagagagcactgcagccagtgaaaccactgagggcagtcagggcgacagcaagaatgccaagaagaagaacaacaagaaaaccaacaagaacaaaagcagcatcagccgcgccaacaagaagaagcccagcatgcccaacgtgtccaatgacctgtcccagaagctgtatgccaccatggagaagcacaaggaggtcttcttcgtgatccacctgcacgctgggcctgtcatcaacaccctgccccccatcgtcgaccccgaccccctgctcagctgtgacctcatggatgggcgcgacgccttcctcaccctcgccagagacaagcactgggagttctcctccttgcgccgctccaagtggtccacgctctgcatgctggtggagctgcacacccagggccaggaccgctttgtctacacctgcaacgagtgcaagcaccacgtggagacgcgctggcactgcactgtgtgcgaggactacgacctctgcatcaactgctataacacgaagagccatgcccataagatggtgaagtgggggctgggcctggatgacgagggcagcagccagggcgagccacagtcaaagagcccccaggagtcacgccggctgagcatccagcgctgcatccagtcgctggtgcacgcgtgccagtgccgcaacgccaactgctcgctgccatcctgccagaagatgaagcgggtggtgcagcacaccaagggctgcaaacgcaagaccaacgggggctgcccggtgtgcaagcagctcatcgccctctgctgctaccacgccaagcactgccaagaaaacaaatgccccgtgcccttctgcctcaacatcaaacacaagctccgccagcagcagatccagcaccgcctgcagcaggcccagctcatgcgccggcggatggccaccatgaacacccgcaacgtgcctcagcagagtctgccttctcctacctcagcaccgcccgggacccccacacagcagcccagcacaccccagacgccgcagccccctgcccagccccaaccctcacccgtgagcatgtcaccagctggcttccccagcgtggcccggactcagccccccaccacggtgtccacagggaagcctaccagccaggtgccggcccccccacccccggcccagccccctcctgcagcggtggaagcggctcggcagatcgagcgtgaggcccagcagcagcagcacctgtaccgggtgaacatcaacaacagcatgcccccaggacgcacgggcatggggaccccggggagccagatggcccccgtgagcctgaatgtgccccgacccaaccaggtgagcgggcccgtcatgcccagcatgcctcccgggcagtggcagcaggcgccccttccccagcagcagcccatgccaggcttgcccaggcctgtgatatccatgcaggcccaggcggccgtggctgggccccggatgcccagcgtgcagccacccaggagcatctcacccagcgctctgcaagacctgctgcggaccctgaagtcgcccagctcccctcagcagcaacagcaggtgctgaacattctcaaatcaaacccgcagctaatggcagctttcatcaaacagcgcacagccaagtacgtggccaatcagcccggcatgcagccccagcctggcctccagtcccagcccggcatgcaaccccagcctggcatgcaccagcagcccagcctgcagaacctgaatgccatgcaggctggcgtgccgcggcccggtgtgcctccacagcagcaggcgatgggaggcctgaacccccagggccaggccttgaacatcatgaacccaggacacaaccccaacatggcgagtatgaatccacagtaccgagaaatgttacggaggcagctgctgcagcagcagcagcaacagcagcagcaacaacagcagcaacagcagcagcagcaagggagtgccggcatggctgggggcatggcggggcacggccagttccagcagcctcaaggacccggaggctacccaccggccatgcagcagcagcagcgcatgcagcagcatctccccctccagggcagctccatgggccagatggcggctcagatgggacagcttggccagatggggcagccggggctgggggcagacagcacccccaacatccagcaagccctgcagcagcggattctgcagcaacagcagatgaagcagcagattgggtccccaggccagccgaaccccatgagcccccagcaacacatgctctcaggacagccacaggcctcgcatctccctggccagcagatcgccacgtcccttagtaaccaggtgcggtctccagcccctgtccagtctccacggccccagtcccagcctccacattccagcccgtcaccacggatacagccccagccttcgccacaccacgtctcaccccagactggttccccccaccccggactcgcagtcaccatggccagctccatagatcagggacacttggggaaccccgaacagagtgcaatgctcccccagctgaacacccccagcaggagtgcgctgtccagcgaactgtccctggtcggggacaccacgggggacacgctagagaagtttgtggagggcttgtagcattgtgagagcatcaccttttccctttcatgttcttggaccttttgtactgaaaatccaggcatctaggttctttttattcctagatggaactgcgacttccgagccatggaagggtggattgatgtttaaagaaacaatacaaagaatatatttttttgttaaaaaccagttgatttaaatatctggtctctctctttggtttttttttggcgggggggtggggggggttcttttttttccgttttgtttttgtttggggggaggggggttttgtttggattctttttgtcgtcattgctggtgactcatgcctttttttaacgggaaaaacaagttcattatattcatattttttatttgtattttcaagactttaaacatttatgtttaaaagtaagaagaaaaataatattcagaactgattcctgaaataatgcaagcttataatgtatcccgataactttgtgatgtttcgggaagatttttttctatagtgaactctgtgggcgtctcccagtattaccctggatgataggaattgactccggcgtgcacacacgtacacacccacacacatctatctatacataatggctgaagccaaacttgtcttgcagatgtagaaattgttgctttgtttctctgataaaactggttttagacaaaaaatagggatgatcactcttagaccatgctaatgttactagagaagaagccttcttttctttcttctatgtgaaacttgaaatgaggaaaagcaattctagtgtaaatcatgcaagcgctctaattcctataaatacgaaactcgagaagattcaatcactgtatagaatggtaaaataccaactcatttcttatatcatattgttaaataaactgtgtgcaacagacaaaaagggtggtccttcttgaattcatgtacatggtattaacacttagtgttcggggttttttgttatgaaaatgctgttttcaacattgtatttggactatgcatgtgttttttccccattgtatataaagtaccgcttaaaattgatataaattactgaggtttttaacatgtattctgttctttaagatccctgtaagaatgtttaaggtttttatttatttatatatattttttgagtctgttctttgtaagacatggttctggttgttcgctcatagcggagaggctggggctgcggttgtggttgtggcggcgtgggtggtggctgggaactgtggcccaggcttagcggccgcccggaggcttttcttcccggagactgaggtgggcggctcagcgttggccccacacattcgaggctcacaggtgattgtcgctcacacagttagggtcgtcagttggtctgaaactgcatttggcccactcctccatcctccctgtccgtcgtagctgccacccccagaggcggcgcttcttcccgtgttcaggcggctccccccccccgtacacgactcccagaatctgaggcagagagtgctccaggctcgcgaggtgctttctgacttccccccaaatcctgccgctgccgcgcagcatgtcccgtgtggcgtttgaggaaatgctgagggacagacaccttggagcaccagctccggtccctgttacagtgagaaaggtcccccacttcgggggatacttgcacttagccacatggtcctgcctcccttggagtccagttccaggctcccttactgagtgggtgagacaagttcacaaaaaccgtaaaactgagaggaggaccatgggcaggggagctgaagttcatcccctaagtctaccacccccagcacccagagaacccactttatccctagtcccccaacaaaggctggtctaggtgggggtgatggtaattttagaaatcacgccccaaatagcttccgtttgggcccttacattcacagataggttttaaatagctgaatacttggtttgggaatctgaattcgaggaacctttctaagaaattggaaaggtccgatctagttttagcacagagctttgaaccttgagttataaaatgcagaataattcaagtaaaaataagaccaccatctggcacccctgaccagcccccattcaccccatcccaggaggggaagcacaggccgggcctccgggtggagattgctgccactgctcggcctgctgggttcttaacctccagtgtcctcttcatcttttccacccgtagggaaaccttgagccatgtgttcaaacaagaagtggggctagagcccgagagcagcagctctaagcccacactcagaaagtggcgccctcctggttgtgcagccttttaatgtgggcagtggaggggcctctgtttcaggttatcctggaattcaaaacgttatgtaccaacctcatcctctttggagtctgcatcctgtgcaaccgtcttgggcaatccagatgtcgaaggatgtgaccgagagcatggtctgtggatgctaaccctaagtttgtcgtaaggaaatttctgtaagaaacctggaaagccccaacgctgtgtctcatgctgtatacttaagaggagaagaaaaagtcctatatttgtgatcaaaaagaggaaacttgaaatgtgatggtgtttataataaaagatggtaaaactacttggattcaaaaat

SEQ ID NO: 439554 - DNA, 4685 bp, Homo sapiens
cttggggaagagggagaactggctgtctgagtggtggctcaagaccgcctacctgccgcaacgccaactgctcgctgccatcctgccagaagatgaagcgggtggtgcagcacaccaagggctgcaaacgcaagaccaacgggggctgcccggtgtgcaagcagctcatcgccctctgctgctaccacgccaagcactgccaagaaaacaaatgccccgtgcccttctgcctcaacatcaaacacaagctccgccagcagcagatccagcaccgcctgcagcaggcccagctcatgcgccggcggatggccaccatgaacacccgcaacgtgcctcagcagagtctgccttctcctacctcagcaccgcccgggacccccacacagcagcccagcacaccccagacgccgcagccccctgcccagccccaaccctcacccgtgagcatgtcaccagctggcttccccagcgtggcccggactcagccccccaccacggtgtccacagggaagcctaccagccaggtgccggcccccccacccccggcccagccccctcctgcagcggtggaagcggctcggcagatcgagcgtgaggcccagcagcagcagcacctgtaccgggtgaacatcaacaacagcatgcccccaggacgcacgggcatggggaccccggggagccagatggcccccgtgagcctgaatgtgccccgacccaaccaggtgagcgggcccgtcatgcccagcatgcctcccgggcagtggcagcaggcgccccttccccagcagcagcccatgccaggcttgcccaggcctgtgatatccatgcaggcccaggcggccgtggctgggccccggatgcccagcgtgcagccacccaggagcatctcacccagcgctctgcaagacctgctgcggaccctgaagtcgcccagctcccctcagcagcaacagcaggtgctgaacattctcaaatcaaacccgcagctaatggcagctttcatcaaacagcgcacagccaagtacgtggccaatcagcccggcatgcagccccagcctggcctccagtcccagcccggcatgcaaccccagcctggcatgcaccagcagcccagcctgcagaacctgaatgccatgcaggctggcgtgccgcggcccggtgtgcctccacagcagcaggcgatgggaggcctgaacccccagggccaggccttgaacatcatgaacccaggacacaaccccaacatggcgagtatgaatccacagtaccgagaaatgttacggaggcagctgctgcagcagcagcagcaacagcagcagcaacaacagcagcaacagcagcagcagcaagggagtgccggcatggctgggggcatggcggggcacggccagttccagcagcctcaaggacccggaggctacccaccggccatgcagcagcagcagcgcatgcagcagcatctccccctccagggcagctccatgggccagatggcggctcagatgggacagcttggccagatggggcagccggggctgggggcagacagcacccccaacatccagcaagccctgcagcagcggattctgcagcaacagcagatgaagcagcagattgggtccccaggccagccgaaccccatgagcccccagcaacacatgctctcaggacagccacaggcctcgcatctccctggccagcagatcgccacgtcccttagtaaccaggtgcggtctccagcccctgtccagtctccacggccccagtcccagcctccacattccagcccgtcaccacggatacagccccagccttcgccacaccacgtctcaccccagactggttccccccaccccggactcgcagtcaccatggccagctccatagatcagggacacttggggaaccccgaacagagtgcaatgctcccccagctgaacacccccagcaggagtgcgctgtccagcgaactgtccctggtcggggacaccacgggggacacgctagagaagtttgtggagggcttgtagcattgtgagagcatcaccttttccctttcatgttcttggaccttttgtactgaaaatccaggcatctaggttctttttattcctagatggaactgcgacttccgagccatggaagggtggattgatgtttaaagaaacaatacaaagaatatatttttttgttaaaaaccagttgatttaaatatctggtctctctctttggtttttttttggcgggggggtggggggggttcttttttttccgttttgtttttgtttggggggaggggggttttgtttggattctttttgtcgtcattgctggtgactcatgcctttttttaacgggaaaaacaagttcattatattcatattttttatttgtattttcaagactttaaacatttatgtttaaaagtaagaagaaaaataatattcagaactgattcctgaaataatgcaagcttataatgtatcccgataactttgtgatgtttcgggaagatttttttctatagtgaactctgtgggcgtctcccagtattaccctggatgataggaattgactccggcgtgcacacacgtacacacccacacacatctatctatacataatggctgaagccaaacttgtcttgcagatgtagaaattgttgctttgtttctctgataaaactggttttagacaaaaaatagggatgatcactcttagaccatgctaatgttactagagaagaagccttcttttctttcttctatgtgaaacttgaaatgaggaaaagcaattctagtgtaaatcatgcaagcgctctaattcctataaatacgaaactcgagaagattcaatcactgtatagaatggtaaaataccaactcatttcttatatcatattgttaaataaactgtgtgcaacagacaaaaagggtggtccttcttgaattcatgtacatggtattaacacttagtgttcggggttttttgttatgaaaatgctgttttcaacattgtatttggactatgcatgtgttttttccccattgtatataaagtaccgcttaaaattgatataaattactgaggtttttaacatgtattctgttctttaagatccctgtaagaatgtttaaggtttttatttatttatatatattttttgagtctgttctttgtaagacatggttctggttgttcgctcatagcggagaggctggggctgcggttgtggttgtggcggcgtgggtggtggctgggaactgtggcccaggcttagcggccgcccggaggcttttcttcccggagactgaggtgggcggctcagcgttggccccacacattcgaggctcacaggtgattgtcgctcacacagttagggtcgtcagttggtctgaaactgcatttggcccactcctccatcctccctgtccgtcgtagctgccacccccagaggcggcgcttcttcccgtgttcaggcggctccccccccccgtacacgactcccagaatctgaggcagagagtgctccaggctcgcgaggtgctttctgacttccccccaaatcctgccgctgccgcgcagcatgtcccgtgtggcgtttgaggaaatgctgagggacagacaccttggagcaccagctccggtccctgttacagtgagaaaggtcccccacttcgggggatacttgcacttagccacatggtcctgcctcccttggagtccagttccaggctcccttactgagtgggtgagacaagttcacaaaaaccgtaaaactgagaggaggaccatgggcaggggagctgaagttcatcccctaagtctaccacccccagcacccagagaacccactttatccctagtcccccaacaaaggctggtctaggtgggggtgatggtaattttagaaatcacgccccaaatagcttccgtttgggcccttacattcacagataggttttaaatagctgaatacttggtttgggaatctgaattcgaggaacctttctaagaaattggaaaggtccgatctagttttagcacagagctttgaaccttgagttataaaatgcagaataattcaagtaaaaataagaccaccatctggcacccctgaccagcccccattcaccccatcccaggaggggaagcacaggccgggcctccgggtggagattgctgccactgctcggcctgctgggttcttaacctccagtgtcctcttcatcttttccacccgtagggaaaccttgagccatgtgttcaaacaagaagtggggctagagcccgagagcagcagctctaagcccacactcagaaagtggcgccctcctggttgtgcagccttttaatgtgggcagtggaggggcctctgtttcaggttatcctggaattcaaaacgttatgtaccaacctcatcctctttggagtctgcatcctgtgcaaccgtcttgggcaatccagatgtcgaaggatgtgaccgagagcatggtctgtggatgctaaccctaagtttgtcgtaaggaaatttctgtaagaaacctggaaagccccaacgctgtgtctcatgctgtatacttaagaggagaagaaaaagtcctatatttgtgatcaaaaagaggaaacttgaaatgtgatggtgtttataataaaagatggtaaaactacttggattcaaaaat

SEQ ID NO: 439555 - DNA, 4544 bp, Homo sapiens
gaggccaatgccaagattagaacccacatttgagatcgatgaagaagaggaggaagaggatgaaaatgaacttttccctagagaatacttccgtcgtttgtcttcgcaggatgtactcaggtgtcagtcctcttctaagaggaagtctaaagatgaagaagaagatgaagagtcagatgatgctgatgattttggatcattgtttgacttggaaaatgatcttcctgatgagctgatacccaatggaggagaattaggccttttaaacagtgggaaccttgttccagatgctgcttccaaacataaacaactgtcggagcttctacgaggaggcagcggctctagtatcaacccaggaataggaaatgtgagcgccagcagccccgtgcagcagggcctgggtggccaggctcaagggcagccgaacagtgctaacatggccagcctcagtgccatgggcaagagccctctgagccagggagattcttcagcccccagcctgcctaaacaggcagccagcacctctgggcccacccccgctgcctcccaagcactgaatccgcaagcacaaaagcaagtggggctggcgactagcagccctgccacgtcacagactggacctggtatctgcatgaatgctaactttaaccagacccacccaggcctcctcaatagtaactctggccatagcttaattaatcaggcttcacaagggcaggcgcaagtcatgaatggatctcttggggctgctggcagaggaaggggagctggaatgccgtaccctactccagccatgcagggcgcctcgagcagcgtgctggctgagaccctaacgcaggtttccccgcaaatgactggtcacgcgggactgaacaccgcacaggcaggaggcatggccaagatgggaataactgggaacacaagtccatttggacagccctttagtcaagctggagggcagccaatgggagccactggagtgaacccccagttagccagcaaacagagcatggtcaacagtttgcccaccttccctacagatatcaagaatacttcagtcaccaacgtgccaaatatgtctcagatgcaaacatcagtgggaattgtacccacacaagcaattgcaacaggccccactgcagatcctgaaaaacgcaaactgatacagcagcagctggttctactgcttcatgctcataagtgtcagagacgagagcaagcaaacggagaggttcgggcctgctcgctcccgcattgtcgaaccatgaaaaacgttttgaatcacatgacgcattgtcaggctgggaaagcctgccaagttgcccattgtgcatcttcacgacaaatcatctctcattggaagaactgcacacgacatgactgtcctgtttgcctccctttgaaaaatgccagtgacaagcgaaaccaacaaaccatcctggggtctccagctagtggaattcaaaacacaattggttctgttggcacagggcaacagaatgccacttctttaagtaacccaaatcccatagaccccagctccatgcagcgagcctatgctgctctcggactcccctacatgaaccagccccagacgcagctgcagcctcaggttcctggccagcaaccagcacagcctcaaacccaccagcagatgaggactctcaaccccctgggaaataatccaatgaacattccagcaggaggaataacaacagatcagcagcccccaaacttgatttcagaatcagctcttccgacttccctgggggccacaaacccactgatgaacgatggctccaactctggtaacattggaaccctcagcactataccaacagcagctcctccttctagcaccggtgtaaggaaaggctggcacgaacatgtcactcaggacctgcggagccatctagtgcataaactcgtccaagccatcttcccaacacctgatcccgcagctctaaaggatcgccgcatggaaaacctggtagcctatgctaagaaagtggaaggggacatgtacgagtctgccaacagcagggatgaatattatcacttattagcagagaaaatctacaagatacaaaaagaactagaagaaaaacggaggtcgcgtttacataaacaaggcatcttggggaaccagccagccttaccagccccgggggctcagccccctgtgattccacaggcacaacctgtgagacctccaaatggacccctgtccctgccagtgaatcgcatgcaagtttctcaagggatgaattcatttaaccccatgtccttggggaacgtccagttgccacaagcacccatgggacctcgtgcagcctccccaatgaaccactctgtccagatgaacagcatgggctcagtgccagggatggccatttctccttcccgaatgcctcagcctccgaacatgatgggtgcacacaccaacaacatgatggcccaggcgcccgctcagagccagtttctgccacagaaccagttcccgtcatccagcggggcgatgagtgtgggcatggggcagccgccagcccaaacaggcgtgtcacagggacaggtgcctggtgctgctcttcctaaccctctcaacatgctggggcctcaggccagccagctaccttgccctccagtgacacagtcaccactgcacccaacaccgcctcctgcttccacggctgctggcatgccatctctccagcacacgacaccacctgggatgactcctccccagccagcagctcccactcagccatcaactcctgtgtcgtcttccgggcagactcccaccccgactcctggctcagtgcccagtgctacccaaacccagagcacccctacagtccaggcagcagcccaggcccaggtgaccccgcagcctcaaaccccagttcagcccccgtctgtggctacccctcagtcatcgcagcaacagccgacgcctgtgcacgcccagcctcctggcacaccgctttcccaggcagcagccagcattgataacagagtccctaccccctcctcggtggccagcgcagaaaccaattcccagcagccaggacctgacgtacctgtgctggaaatgaagacggagacccaagcagaggacactgagcccgatcctggtgaatccaaaggggagcccaggtctgagatgatggaggaggatttgcaaggagcttcccaagttaaagaagaaacagacatagcagagcagaaatcagaaccaatggaagtggatgaaaagaaacctgaagtgaaagtagaagttaaagaggaagaagagagtagcagtaacggcacagcctctcagtcaacatctccttcgcagccgcgcaaaaaaatctttaaaccagaggagttacgccaggccctcatgccaaccctagaagcactgtatcgacaggacccagagtcattacctttccggcagcctgtagatccccagctcctcggaattccagactattttgacatcgtaaagaatcccatggacctctccaccatcaagcggaagctggacacagggcaataccaagagccctggcagtacgtggacgacgtctggctcatgttcaacaatgcctggctctataatcgcaagacatcccgagtctataagttttgcagtaagcttgcagaggtctttgagcaggaaattgaccctgtcatgcagtcccttggatattgctgtggacgcaagtatgagttttccccacagactttgtgctgctatgggaagcagctgtgtaccattcctcgcgatgctgcctactacagctatcagaataggtatcatttctgtgagaagtgtttcacagagatccagggcgagaatgtgaccctgggtgacgacccttcacagccccagacgacaatttcaaaggatcagtttgaaaagaagaaaaatgataccttagaccccgaacctttcgttgattgcaaggagtgtggccggaagatgcatcagatttgcgttctgcactatgacatcatttggccttcaggttttgtgtgcgacaactgcttgaagaaaactggcagacctcgaaaagaaaacaaattcagtgctaagaggctgcagaccacaagactgggaaaccacttggaagaccgagtgaacaaatttttgcggcgccagaatcaccctgaagccggggaggtttttgtccgagtggtggccagctcagacaagacggtggaggtcaagcccgggatgaagtcacggtatgtgacagggcacatctgggcctgtcctccaagtgaaggagatgattacatcttccattgccacccacctgatcaaaaaatacccaagccaaaacgactgcaggagtggtacaaaaagatgctggacaaggcgtttgcagagcggatcatccatgactacaaggtacccggcgctgaaggaaggtggtggcttttgtcacaactgaggggaggatatttgtgtgcctttttcttgcattcgcatacttgttaattaccttcacttatgaggattagaaagcagaaaaataaaagcctaaagtgag

SEQ ID NO: 439556 - DNA, 3715 bp, Homo sapiens
gaggccaatgccaagattagaacccacatttgagatcgatgaagaagaggaggaagaggatgaaaatgaacttttccctagagaatacttccgtcgtttgtcttcgcaggatgtactcaggtgtcagtcctcttctaagaggaagtctaaagatgaagaagaagatgaagagtcagatgatgctgatgattttggatcattgtttgacttggaaaatgatcttcctgatgagctgatacccaatggaggagaattaggccttttaaacagtgggaaccttgttccagatgctgcttccaaacataaacaactgtcggagcttctacgaggaggcagcggctctagtatcaacccaggaataggaaatgtgagcgccagcagccccgtgcagcagggcctgggtggccaggctcaagggcagccgaacagtgctaacatggccagcctcagtgccatgggcaagagccctctgagccagggagattcttcagcccccagcctgcctaaacaggcagccagcacctctgggcccacccccgctgcctcccaagcactgaatccgcaagcacaaaagcaagtggggctggcgactagcagccctgccacgtcacagactggacctggtatctgcatgaatgctaactttaaccagacccacccaggcctcctcaatagtaactctggccatagcttaattaatcaggcttcacaagggcaggcgcaagtcatgaatggatctcttggggctgctggcagaggaaggggagctggaatgccgtaccctactccagccatgcagggcgcctcgagcagcgtgctggctgagaccctaacgcaggtttccccgcaaatgactggtcacgcgggactgaacaccgcacaggcaggaggcatggccaagatgggaataactgggaacacaagtccatttggacagccctttagtcaagctggagggcagccaatgggagccactggagtgaacccccagttagccagcaaacagagcatggtcaacagtttgcccaccttccctacagatatcaagaatacttcagtcaccaacgtgccaaatatgtctcagatgcaaacatcagtgggaattgtacccacacaagcaattgcaacaggccccactgcagatcctgaaaaacgcaaactgatacagcagcagctggttctactgcttcatgctcataagtgtcagagacgagagcaagcaaacggagaggttcgggcctgctcgctcccgcattgtcgaaccatgaaaaacgttttgaatcacatgacgcattgtcaggctgggaaagcctgccaagttgcccattgtgcatcttcacgacaaatcatctctcattggaagaactgcacacgacatgactgtcctgtttgcctccctttgaaaaatgccagtgacaagcgaaaccaacaaaccatcctggggtctccagctagtggaattcaaaacacaattggttctgttggcacagggcaacagaatgccacttctttaagtaacccaaatcccatagaccccagctccatgcagcgagcctatgctgctctcggactcccctacatgaaccagccccagacgcagctgcagcctcaggttcctggccagcaaccagcacagcctcaaacccaccagcagatgaggactctcaaccccctgggaaataatccaatgaacattccagcaggaggaataacaacagatcagcagcccccaaacttgatttcagaatcagctcttccgacttccctgggggccacaaacccactgatgaacgatggctccaactctggtaacattggaaccctcagcactataccaacagcagctcctccttctagcaccggtgtaaggaaaggctggcacgaacatgtcactcaggacctgcggagccatctagtgcataaactcgtccaagccatcttcccaacacctgatcccgcagctctaaaggatcgccgcatggaaaacctggtagcctatgctaagaaagtggaaggggacatgtacgagtctgccaacagcagggatgaatattatcacttattagcagagaaaatctacaagatacaaaaagaactagaagaaaaacggaggtcgcgtttacataaacaaggcatcttggggaaccagccagccttaccagccccgggggctcagccccctgtgattccacaggcacaacctgtgagacctccaaatggacccctgtccctgccagtgaatcgcatgcaagtttctcaagggatgaattcatttaaccccatgtccttggggaacgtccagttgccacaagcacccatgggacctcgtgcagcctccccaatgaaccactctgtccagatgaacagcatgggctcagtgccagggatggccatttctccttcccgaatgcctcagcctccgaacatgatgggtgcacacaccaacaacatgatggcccaggcgcccgctcagagccagtttctgccacagaaccagttcccgtcatccagcggggcgatgagtgtgggcatggggcagccgccagcccaaacaggcgtgtcacagggacaggtgcctggtgctgctcttcctaaccctctcaacatgctggggcctcaggccagccagctaccttgccctccagtgacacagtcaccactgcacccaacaccgcctcctgcttccacggctgctggcatgccatctctccagcacacgacaccacctgggatgactcctccccagccagcagctcccactcagccatcaactcctgtgtcgtcttccgggcagactcccaccccgactcctggctcagtgcccagtgctacccaaacccagagcacccctacagtccaggcagcagcccaggcccaggtgaccccgcagcctcaaaccccagttcagcccccgtctgtggctacccctcagtcatcgcagcaacagccgacgcctgtgcacgcccagcctcctggcacaccgctttcccaggcagcagccagcattgataacagagtccctaccccctcctcggtggccagcgcagaaaccaattcccagcagccaggacctgacgtacctgtgctggaaatgaagacggagacccaagcagaggacactgagcccgatcctggtgaatccaaaggggagcccaggtctgagatgatggaggaggatttgcaaggagcttcccaagttaaagaagaaacagacatagcagagcagaaatcagaaccaatggaagtggatgaaaagaaacctgaagtgaaagtagaagttaaagaggaagaagagagtagcagtaacggcacagcctctcagtcaacatctccttcgcagccgcgcaaaaaaatctttaaaccagaggagttacgccaggccctcatgccaaccctagaagcactgtatcgacaggacccagagtcattacctttccggcagcctgtagatccccagctcctcggaattccagactattttgacatcgtaaagaatcccatggacctctccaccatcaagcggaagctggacacagggcaataccaagagccctggcagtacgtggacgacgtctggctcatgttcaacaatgcctggctctataatcgcaagacatcccgagtctataagttttgcagtaagctcaatatccaagggactgcatgacagggtcaatttcctgctcaaagacctctgcaagcttactggtcgacg

SEQ ID NO: 439557 - DNA, 3177 bp, Homo sapiens
gaggccaatgccaagattagaacccacatttgagatcgatgaagaagaggaggaagaggatgaaaatgaacttttccctagagaatacttccgtcgtttgtcttcgcaggatgtactcaggtgtcagtcctcttctaagaggaagtctaaagatgaagaagaagatgaagagtcagatgatgctgatgattttggatcattgtttgacttggaaaatgatcttcctgatgagctgatacccaatggaggagaattaggccttttaaacagtgggaaccttgttccagatgctgcttccaaacataaacaactgtcggagcttctacgaggaggcagcggctctagtatcaacccaggaataggaaatgtgagcgccagcagccccgtgcagcagggcctgggtggccaggctcaagggcagccgaacagtgctaacatggccagcctcagtgccatgggcaagagccctctgagccagggagattcttcagcccccagcctgcctaaacaggcagccagcacctctgggcccacccccgctgcctcccaagcactgaatccgcaagcacaaaagcaagtggggctggcgactagcagccctgccacgtcacagactggacctggtatctgcatgaatgctaactttaaccagacccacccaggcctcctcaatagtaactctggccatagcttaattaatcaggcttcacaagggcaggcgcaagtcatgaatggatctcttggggctgctggcagaggaaggggagctggaatgccgtaccctactccagccatgcagggcgcctcgagcagcgtgctggctgagaccctaacgcaggtttccccgcaaatgactggtcacgcgggactgaacaccgcacaggcaggaggcatggccaagatgggaataactgggaacacaagtccatttggacagccctttagtcaagctggagggcagccaatgggagccactggagtgaacccccagttagccagcaaacagagcatggtcaacagtttgcccaccttccctacagatatcaagaatacttcagtcaccaacgtgccaaatatgtctcagatgcaaacatcagtgggaattgtacccacacaagcaattgcaacaggccccactgcagatcctgaaaaacgcaaactgatacagcagcagctggttctactgcttcatgctcataagtgtcagagacgagagcaagcaaacggagaggttcgggcctgctcgctcccgcattgtcgaaccatgaaaaacgttttgaatcacatgacgcattgtcaggctgggaaagcctgccaagttgcccattgtgcatcttcacgacaaatcatctctcattggaagaactgcacacgacatgactgtcctgtttgcctccctttgaaaaatgccagtgacaagcgaaaccaacaaaccatcctggggtctccagctagtggaattcaaaacacaattggttctgttggcacagggcaacagaatgccacttctttaagtaacccaaatcccatagaccccagctccatgcagcgagcctatgctgctctcggactcccctacatgaaccagccccagacgcagctgcagcctcaggttcctggccagcaaccagcacagcctcaaacccaccagcagatgaggactctcaaccccctgggaaataatccaatgaacattccagcaggaggaataacaacagatcagcagcccccaaacttgatttcagaatcagctcttccgacttccctgggggccacaaacccactgatgaacgatggctccaactctggtaacattggaaccctcagcactataccaacagcagctcctccttctagcaccggtgtaaggaaaggctggcacgaacatgtcactcaggacctgcggagccatctagtgcataaactcgtccaagccatcttcccaacacctgatcccgcagctctaaaggatcgccgcatggaaaacctggtagcctatgctaagaaagtggaaggggacatgtacgagtctgccaacagcagggatgaatattatcacttattagcagagaaaatctacaagatacaaaaagaactagaagaaaaacggaggtcgcgtttacataaacaaggcatcttggggaaccagccagccttaccagccccgggggctcagccccctgtgattccacaggcacaacctgtgagacctccaaatggacccctgtccctgccagtgaatcgcatgcaagtttctcaagggatgaattcatttaaccccatgtccttggggaacgtccagttgccacaagcacccatgggacctcgtgcagcctccccaatgaaccactctgtccagatgaacagcatgggctcagtgccagggatggccatttctccttcccgaatgcctcagcctccgaacatgatgggtgcacacaccaacaacatgatggcccaggcgcccgctcagagccagtttctgccacagaaccagttcccgtcatccagcggggcgatgagtgtgggcatggggcagccgccagcccaaacaggcgtgtcacagggacaggtgcctggtgctgctcttcctaaccctctcaacatgctggggcctcaggccagccagctaccttgccctccagtgacacagtcaccactgcacccaacaccgcctcctgcttccacggctgctggcatgccatctctccagcacacgacaccacctgggatgactcctccccagccagcagctcccactcagccatcaactcctgtgtcgtcttccgggcagactcccaccccgactcctggctcagtgcccagtgctacccaaacccagagcacccctacagtccaggcagcagcccaggcccaggtgaccccgcagcctcaaaccccagttcagcccccgtctgtggctacccctcagtcatcgcagcaacagccgacgcctgtgcacgcccagcctcctggcacaccggtaagcctctctgtctctgctgtttttgggccaagactcttagaagataattttcccataaaaattgtgtgtcaggccaggcgcggtggttcacacctataatttcagcaccttgggaggccaaggtgggagaatcacttgagcccatgagttcaagaccatcctgggcaacatagtgagacctcgtctccagc

SEQ ID NO: 439558 - DNA, 2297 bp, Homo sapiens
gaggccaatgccaagattagaacccacatttgagatcgatgaagaagaggaggaagaggatgaaaatgaacttttccctagagaatacttccgtcgtttgtcttcgcaggatgtactcaggtgtcagtcctcttctaagaggaagtctaaagatgaagaagaagatgaagagtcagatgatgctgatgattttggatcattgtttgacttggaaaatgatcttcctgatgagctgatacccaatggaggagaattaggccttttaaacagtgggaaccttgttccagatgctgcttccaaacataaacaactgtcggagcttctacgaggaggcagcggctctagtatcaacccaggaataggaaatgtgagcgccagcagccccgtgcagcagggcctgggtggccaggctcaagggcagccgaacagtgctaacatggccagcctcagtgccatgggcaagagccctctgagccagggagattcttcagcccccagcctgcctaaacaggcagccagcacctctgggcccacccccgctgcctcccaagcactgaatccgcaagcacaaaagcaagtggggctggcgactagcagccctgccacgtcacagactggacctggtatctgcatgaatgctaactttaaccagacccacccaggcctcctcaatagtaactctggccatagcttaattaatcaggcttcacaagggcaggcgcaagtcatgaatggatctcttggggctgctggcagaggaaggggagctggaatgccgtaccctactccagccatgcagggcgcctcgagcagcgtgctggctgagaccctaacgcaggtttccccgcaaatgactggtcacgcgggactgaacaccgcacaggcaggaggcatggccaagatgggaataactgggaacacaagtccatttggacagccctttagtcaagctggagggcagccaatgggagccactggagtgaacccccagttagccagcaaacagagcatggtcaacagtttgcccaccttccctacagatatcaagaatacttcagtcaccaacgtgccaaatatgtctcagatgcaaacatcagtgggaattgtacccacacaagcaattgcaacaggccccactgcagatcctgaaaaacgcaaactgatacagcagcagctggttctactgcttcatgctcataagtgtcagagacgagagcaagcaaacggagaggttcgggcctgctcgctcccgcattgtcgaaccatgaaaaacgttttgaatcacatgacgcattgtcaggctgggaaagcctgccaagttgcccattgtgcatcttcacgacaaatcatctctcattggaagaactgcacacgacatgactgtcctgtttgcctccctttgaaaaatgccagtgacaagcgaaaccaacaaaccatcctggggtctccagctagtggaattcaaaacacaattggttctgttggcacagggcaacagaatgccacttctttaagtaacccaaatcccatagaccccagctccatgcagcgagcctatgctgctctcggactcccctacatgaaccagccccagacgcagctgcagcctcaggttcctggccagcaaccagcacagcctcaaacccaccagcagatgaggactctcaaccccctgggaaataatccaatgaacattccagcaggaggaataacaacagatcagcagcccccaaacttgatttcagaatcagctcttccgacttccctgggggccacaaacccactgatgaacgatggctccaactctggtaacattggaaccctcagcactataccaacagcagctcctccttctagcaccggtgtaaggaaaggctggcacgaacatgtcactcaggacctgcggagccatctagtgcataaactcgtccaagccatcttcccaacacctgatcccgcagctctaaaggatcgccgcatggaaaacctggtagcctatgctaagaaagtggaaggggacatgtacgagtctgccaacagcagggatgaatattatcacttattagcagagaaaatctacaagatacaaaaagaactagaagaaaaacggaggtcgcgtttacataaacaaggcatcttggggaaccagccagccttaccagccccgggggctcagccccctgtgattccacaggcacaacctgtgagacctccaagtaaggattttatttcctactgccatcccttagcctgtttccttggttttccttcgtgttggggtgtatttctaagaacag

SEQ ID NO: 439559 - DNA, 935 bp, Homo sapiens
gaggccaatgccaagattagaacccacatttgagatcgatgaagaagaggaggaagaggatgaaaatgaacttttccctagagaatacttccgtcgtttgtcttcgcaggatgtactcaggtgtcagtcctcttctaagaggaagtctaaagatgaagaagaagatgaagagtcagatgatgctgatgattttggatcattgtttgacttggaaaatgatcttcctgatgagctgatacccaatggaggagaattaggccttttaaacagtgggaaccttgttccagatgctgcttccaaacataaacaactgtcggagcttctacgaggaggcagcggctctagtatcaacccaggaataggaaatgtgagcgccagcagccccgtgcagcagggcctgggtggccaggctcaagggcagccgaacagtgctaacatggccagcctcagtgccatgggcaagagccctctgagccagggagattcttcagcccccagcctgcctaaacaggcagccagcacctctgggcccacccccgctgcctcccaagcactgaatccacaagcacccatgggacctcgtgcagcctccccaatgaaccactctgtccagatgaacagcatgggctcagtgccagggatggccatttctccttcccgaatgcctcagcctccgaacatgatgggtgcacacaccaacaacatgatggcccaggcgcccgctcagagccagtttctgccacagaaccagttcccgtcatccagcggggcgatgagtgtgggcatggggcagccgccagcccaaacaggcgtgtcacaggtactgtgccccactgggaccgtggctccctaggaaataaaattcttgtgttaagttttggttttttttttctgtcttccttcgtggaaattaaaattccagaatgcacatttca

SEQ ID NO: 439560 - DNA, 1659 bp, Homo sapiens
gaggccaatgccaagattagaacccacatttgagatcgatgaagaagaggaggaagaggatgaaaatgaacttttccctagagaatacttccgtcgtttgtcttcgcaggatgtactcaggtgtcagtcctcttctaagaggaagtctaaagatgaagaagaagatgaagagtcagatgatgctgatgattttggatcattgtttgacttggaaaatgatcttcctgatgagctgatacccaatggaggagaattaggccttttaaacagtgggaaccttgttccagatgctgcttccaaacataaacaactgtcggagcttctacgaggaggcagcggctctagtatcaacccaggaataggaaatgtgagcgccagcagccccgtgcagcagggcctgggtggccaggctcaagggcagccgaacagtgctaacatggccagcctcagtgccatgggcaagagccctctgagccagggagattcttcagcccccagcctgcctaaacaggcagccagcacctctgggcccacccccgctgcctcccaagcactgaatccgcaagcacaaaagcaagtggggctggcgactagcagccctgccacgtcacagactggacctggtatctgcatgaatgctaactttaaccagacccacccaggcctcctcaatagtaactctggccatagcttaattaatcaggcttcacaagggcaggcgcaagtcatgaatggatctcttggggctgctggcagaggaaggggagctggaatgccgtaccctactccagccatgcagggcgcctcgagcagcgtgctggctgagaccctaacgcaggtttccccgcaaatgactggtcacgcgggactgaacaccgcacaggcaggaggcatggccaaggtaagtgaactgaagcactttcaatacttcctacctaaccgcgggctttccctccgagtaatgcgtaaaatgggaccacgtggcccactcctgtttttcctcttgggctctccacgtgccactcatgcttggaagagacagatttctttctaggataaagatctctgccccatttctgtctttaaaatgagaattcttaaagaagtagggacagcttgcaggtcaggcagttggaaagtacagggcctaatgtgtccgtgaacctggtagaggttgctttctgcctgtgtactgcccactgaggaggtgatcactggtctgtatgctcctctgtggccatccagtgaagtatctgttggcacagtatccatttcactgaatgagaaagctgtgttccagggttgtcagctcactccctgctatgttaacaaggaagaggtggcagagccggggagaagcacaggcattcgggtcccagaggaaacaccagtgcagtggttcttcaagtggggtcccctggaccagcagcagcagcagcatcccctagaagcttgttagaaatgcagacttctttattgactcagaagctcggcgtggggcctgggctttaagaagcctccagatgggtgctggacacagtgactcacgcctgtgatcccagcactttgggaggccaaggtgggtggatagctcaactctaggagtttgagaccagcctgggcaatgtggcgaaaccctgtctcttggaaaaaaaaaaa

SEQ ID NO: 439561 - DNA, 657 bp, Homo sapiens
ctaacttcattttttgtttttatattgtttgtctgtctcccatgctagcatgtagggtattgatttttgtctctttggttcattgctacattattggcacctagaatagtatctgagatgtatgtactcaaatatctaaattaaggtaaaataatatgaaaacttttcatatagtaacaatatcaaaatggtctaaattgtgatgataatttacttccttctattataataaacgtaccctaactaggaatttgaaggagaaataaggatcttctacatggaatcaaaattaacttcatctattcccattttaaacaatgggaaaagatagttaaaaaaaaacaaggaagatctttaaaaacatgaatttattttgatacaacactaaaattttaattttgatgtgtctttattcctaggtttactgtttatgcaaagatagataagtacattcttaaaattattaaaatggaactctaataagttcattcctttttttacatggttgcctggtttgaaaaatccaaggacattattcagagtcaaggaaattcaaaagatgaagctgttctaaatatgatagaagacttagttgatcttctgctggtaaaaatcacattgattacactgatatttataaagcatgtgtttatttaa

SEQ ID NO: 439562 - DNA, 800 bp, Homo sapiens
  misc_feature (702)..(702): n is a, c, g, or t
  misc_feature (705)..(705): n is a, c, g, or t
  misc_feature (715)..(715): n is a, c, g, or t
  misc_feature (717)..(717): n is a, c, g, or t
  misc_feature (730)..(730): n is a, c, g, or t
  misc_feature (732)..(732): n is a, c, g, or t
  misc_feature (736)..(736): n is a, c, g, or t
  misc_feature (739)..(739): n is a, c, g, or t
agcggtgcagagttcgcggcgagggtggctcgcgcaggcgcgaggctccccatcagcacctgcctggccagcctcggcctcggggatgggaaatgggcgctcggagccgcccccgcgcgtgggcgactcggtcaagatacacaatcatcatcttactagttctctgtgttgctcgctaaccagtcccccagttcagtagactggagcccagagcctgcttacttgtcaggtgtttattttgtcttgctttttttttttttttaaatgaagtcaaaatgccaataagaccagatctccagcagttggaaaaatgcattgatgatgctttaagaaaaaatgatttcaaacctttgaaaacacttttgcaaattgatatttgtgaagatgtgaagattaaatgcagcaaacagtttttccacaaggtggacaaccttatatgcagggaacttaataaagaggatatccacaatgtttcagccattttggtttctgttggaagatgtggcaaaaatatcagtgtattggggcaagctggacttctaacgatgataaaacaaggactaatacaaaagatggttgcctggtttgaaaaatccaaggacattattcagagtcaaggaaattcaaaagatgaagctgttctaaatatgatagaagacttagttgatcttctgctgggtcatacatgatgtcagggatganggntacaaaccantnttgggaaagtttngnaccncgncattggttcccgtggttattggactccaggagtgacattttggtattacagcagaaatttc

SEQ ID NO: 439563 - DNA, 5552 bp, Homo sapiens
  misc_feature (4546)..(4546): n is a, c, g, or t
ctaacttcattttttgtttttatattgtttgtctgtctcccatgctagcatgtagggtattgatttttgtctctttggttcattgctacattattggcacctagaatagtatctgagatgtatgtactcaaatatctaaattaaggtaaaataatatgaaaacttttcatatagtaacaatatcaaaatggtctaaattgtgatgataatttacttccttctattataataaacgtaccctaactaggaatttgaaggagaaataaggatcttctacatggaatcaaaattaacttcatctattcccattttaaacaatgggaaaagatagttaaaaaaaaacaaggaagatctttaaaaacatgaatttattttgatacaacactaaaattttaattttgatgtgtctttattcctaggtttactgtttatgcaaagatagataagtacattcttaaaattattaaaatggaactctaataagttcattcctttttttacatggttgcctggtttgaaaaatccaaggacattattcagagtcaaggaaattcaaaagatgaagctgttctaaatatgatagaagacttagttgatcttctgctggtcatacatgatgtcagtgatgaaggtaaaaaacaagtagtggaaagtttcgtacctcgcatttgttccctggttattgactcaagagtgaatatttgtattcagcaagagattataaaaaaaatgaatgctatgcttgacaaaatgcctcaagatgcccggaaaatactctctaaccaagaaatgttaattctcatgagtagtatgggagaaaggattttagatgctggagattatgacttacaggtagccattgtagaagctttgtgtagaatgaccacagaaaaacaaagacaagaactggcacatcagtggttttcaatggattttattgctaaggcatttaaaagaattaaggactctgaatttgaaacagattgcaggatatttctcaaccttgtaaatggcatgcttggagacaaaagaagggtctttacatttccttgtttatcagcatttcttgataaatatgagctgcaaataccatcagatgaaaaacttgaggaattttggattgattttaatcttgggagtcagactctctcattctacattgctggagataatgatgatcatcaatgggaagcagttactgtgccagaggaaaaagtacaaatatacagcattgaagtgtgagaatcaaagaagctactgacaataattctgaaaaatacagtaaaaattagcaaaagagaagggaaagaattgcttttgtattttgacgcatcactagaaatcactaatgtaactcaaaaaatttttggtgcaactaaacatagggaatctatcagaaaacaaggtatttcagttgccaaaacgtcgctgcatatactttttgacgcaagtggatcacagattctagtgccagaaagtcaaatctcaccagtcggagaagagctcgttagtttaaaggaaaaatcaaagtccccaaaggaatttgctaaaccttcaaaatatatcaaaaacagtgacaaagggaatagaaataatagtcagcttgagaaaactactcctagcaaaagaaaaatgtctgaagcatcaatgattgtttctggtgcagatagatacactatgagaagtccagtgcttttcagcaacacatcaataccaccacgaagaagaagaattaaaccaccactgcaaatgacgagctctgcagagaaacctagtgtttctcaaacatcagaaaatagagtggataatgctgcatcactgaaatctagatcatcagaaggaagacatagaagagataatatagacaaacatatcaaaactgctaagtgtgtagaaaacacagaaaataagaatgttgaattcccaaaccaaaattttagtgaactccaggatgttataccagattcacaggcagcggaaaaaagagatcatactatattacctggtgttttagacaacatctgtggaaataaaatacacagcaaatgggcatgttggacacctgtaacaaacattgaactatgtaataaccaaagagcaagtacttcgtcaggagacacattgaatcaagatattgttataaataaaaaacttactaaacaaaaatcatcctcttcaatatctgatcataattctgaaggaacaggaaaagtgaaatataagaaagaacaaaccgaccatatcaaaatagataaagcagaagtagaagtttgcaagaaacacaatcagcaacaaaatcatcctaaatattcagggcagaaaaatactgaaaatgccaagcagagtgattggcctgttgaatctgaaactacttttaaatcggttctcctaaataagacaattgaagaatcgctgatatataggaagaaatacatattgtcaaaagatgtgaatactgctacttgcgataaaaatccatctgctagcaaaaatgtgcaaagtcatagaaaagcagagaaagaattgacttctgagcttaattcctgggattcgaaacaaaaaaaaatgagagaaaagtcaaaagggaaagaatttaccaatgtagcagaatccttgataagccaaatcaataaaagatacaaaacaaaagatgacatcaagtctacaagaaaattaaaggagtctttgattaacagtggtttttcaaacaaacctgttgtacaactcagtaaggaaaaagttcagaaaaaaagctacagaaaactgaagactacctttgttaatgttacttctgaatgcccagtgaatgatgtttacaattttaatttgaatggagctgatgaccctatcataaaacttggaatccaagagtttcaagctacagctaaagaagcttgtgcggataggtcaattagattggtaggtccaaggaatcatgatgaacttaaatcttctgtcaaaacaaaagataaaaaaattataacaaatcatcaaaagaaaaatctgtttagtgatactgaaacagagtacagatgtgatgacagcaagactgatattagctggctaagagaaccgaaatcaaaaccacagctaatagactatagcagaaataaaaatgtgaagaatcataaaagtggaaaatcaagatcatccttggaaaagggacagccaagctctaaaatgacacccagtaaaaatatcacaaaaaagatggacaagacaattccggaaggaagaatcagacttccacgaaaagcaaccaaaacaaaaaaaaactataaagatctctcaaattcagaatcagagtgtgaacaagaattttcacattcatttaaagagaacataccagtaaaggaggagaatatccattccagaatgaaaacggtaaagctaccaaagaaacaacagaaagtcttctgtgctgaaacagaaaaggaactatcaaaacaatggaaaaactcatctctactaaaagatgctatacgagataattgccttgacttatctcccagatctttatctggcagtccatcatctatagaagtaacgagatgtatagagaaaataacagaaaaggattttactcaggattatgactgcataacaaaatctatatcaccttatccaaaaacttcatcacttgaatccttaaatagtaacagtggagttggaggtacaataaagtcacccaaaaacaatgagaaaaacttcctgtgtgcaagtgaaagttgttcaccaactccacgaccactgtttttggccagacatactccaactaagagtaatactattgtaaatagaaaaaaaataagttctctggtacttacacaagaaacacaaaacagtaacagctattcagatgtaagcagatatagttcagaagaacggtttatggaaattgaatctccacatatcaatgaaaattatatacaaagcaaaagagaggaaagtcatttagcatcttcattatccaagtctagtgaaggaagagagaaaacgtggtttgacatgccctgtgatgctactcatgtatcaggccccacccaacatcttagtcgcaaaagaatatatatagaagataatctaagtaattccaatgaagtagaaatggaagagaaaggagaaaggagagcaaacttgcttcccaaaaaactgtgtaaaattgaagatgcagatcatcatatccacaaaatgtctgaaagtgtatcttcattatcaacaaatgacttttctattccttgggagacctggcaaaatgaatttgcagggatagagatgacttatgagacttacgagaggctcaattcagaatttaagagaaggaataatatccgacataaaatgttgagttattttactacgcagtcttggaaaacagctcagcaacatctgagaacaatgaatcatcaaagtcaggactctaggattaaaaaacttgataaattccaattcattatcatagaggagctggagaattttgaaaaagattcacagtctttaaaagatttggaaaaggaatttgtggacttttgggaaaagatatttncagaaagttcagtgcattatcaaaaaagcgaacaacagaggcttcatcttttgaaaacttcattggctaaaagtgtcttctgtaatactgatagtgaagaaactgtttttacatccgagatgtgtttgatgaaagaagatatgaaagtgctgcaagacaggcttcttaaggacatgctagaagaggagcttcttaatgtacgcagagaactgatgtcagtattcatgtctcatgaaagaaatgctaatgtgtgaaatctagtttttatcaccatactttatctaattattattctctgtatataactgaggaaataagaatagtcctacaaagagaaaaatatacatgtcaccgaagcaagtgtaccctttataggaaccctcaaattaaaaaaaaatgtcttttaatggatgagagggaaccactataacatgagtccaagcccagaagacttctgtctatacaatatttttttttaattttggagataaaagctttaagaaactttttgagttaattatactcataaaatgagtttctttaataaattaaattttattgtgtaaaatgtattattacataaaatgtgtttttgaatcaatgcagtttggggatgaatataattaaaatatgtttaataacttagaattcaactaataaaaatttagccacacttacaagggggaggaagtccctagtttaaaatgtataactgagtggtagatcagtactttcagcacactgttggaaacatttattcagatatggctctaatgtattaggaagcactaaatggcctaaaaaagctactacattgcctaaatatgttaattcaatatagaagtcctatttcataaccaggctgtttgacaaatacttttaatctagtagtcattgtaatatcttgctagattaatttataaaaatgagtatacatttgatttgcttttaatgaagttgaaataaatgcttatgtcacttgaataaatataaatcattatattcc

SEQ ID NO: 439564 - DNA, 4847 bp, Homo sapiens
  misc_feature (3841)..(3841): n is a, c, g, or t
ctctgtttactggattggtaagttcattgaggccaagtgctagatccttctcacctcacaatctcctgacacttaatttttgtcaaatgttgtttattgtcagcatgttataacaactgtggatttaatagaaatgtttatatgtgtatgtctagaaatatggtaattatatggaattaaagttattgtttttgtttgcctttttttaaattaagaaaatagtattctcagatgtgttcaaggaatattttattaagaatttgttagagtccagaatgtatttaggattctatcttattagttatagccatatcctgtattttatagataagaacactgagactaggaaagctaaattgacttgattgatttacataggtaagtagtgccagaattgattaatttaaacactgttcaatattgagaatttgaattttgattcaattaatctgctacatccatgtcttatttatagtatacttgcagagtagtatcatagaaacgtaaactaatcagtgttgtttctatacagtgtgagaatcaaagaagctactgacaataattctgaaaaatacagtaaaaattagcaaaagagaagggaaagaattgcttttgtattttgacgcatcactagaaatcactaatgtaactcaaaaaatttttggtgcaactaaacatagggaatctatcagaaaacaaggtatttcagttgccaaaacgtcgctgcatatactttttgacgcaagtggatcacagattctagtgccagaaagtcaaatctcaccagtcggagaagagctcgttagtttaaaggaaaaatcaaagtccccaaaggaatttgctaaaccttcaaaatatatcaaaaacagtgacaaagggaatagaaataatagtcagcttgagaaaactactcctagcaaaagaaaaatgtctgaagcatcaatgattgtttctggtgcagatagatacactatgagaagtccagtgcttttcagcaacacatcaataccaccacgaagaagaagaattaaaccaccactgcaaatgacgagctctgcagagaaacctagtgtttctcaaacatcagaaaatagagtggataatgctgcatcactgaaatctagatcatcagaaggaagacatagaagagataatatagacaaacatatcaaaactgctaagtgtgtagaaaacacagaaaataagaatgttgaattcccaaaccaaaattttagtgaactccaggatgttataccagattcacaggcagcggaaaaaagagatcatactatattacctggtgttttagacaacatctgtggaaataaaatacacagcaaatgggcatgttggacacctgtaacaaacattgaactatgtaataaccaaagagcaagtacttcgtcaggagacacattgaatcaagatattgttataaataaaaaacttactaaacaaaaatcatcctcttcaatatctgatcataattctgaaggaacaggaaaagtgaaatataagaaagaacaaaccgaccatatcaaaatagataaagcagaagtagaagtttgcaagaaacacaatcagcaacaaaatcatcctaaatattcagggcagaaaaatactgaaaatgccaagcagagtgattggcctgttgaatctgaaactacttttaaatcggttctcctaaataagacaattgaagaatcgctgatatataggaagaaatacatattgtcaaaagatgtgaatactgctacttgcgataaaaatccatctgctagcaaaaatgtgcaaagtcatagaaaagcagagaaagaattgacttctgagcttaattcctgggattcgaaacaaaaaaaaatgagagaaaagtcaaaagggaaagaatttaccaatgtagcagaatccttgataagccaaatcaataaaagatacaaaacaaaagatgacatcaagtctacaagaaaattaaaggagtctttgattaacagtggtttttcaaacaaacctgttgtacaactcagtaaggaaaaagttcagaaaaaaagctacagaaaactgaagactacctttgttaatgttacttctgaatgcccagtgaatgatgtttacaattttaatttgaatggagctgatgaccctatcataaaacttggaatccaagagtttcaagctacagctaaagaagcttgtgcggataggtcaattagattggtaggtccaaggaatcatgatgaacttaaatcttctgtcaaaacaaaagataaaaaaattataacaaatcatcaaaagaaaaatctgtttagtgatactgaaacagagtacagatgtgatgacagcaagactgatattagctggctaagagaaccgaaatcaaaaccacagctaatagactatagcagaaataaaaatgtgaagaatcataaaagtggaaaatcaagatcatccttggaaaagggacagccaagctctaaaatgacacccagtaaaaatatcacaaaaaagatggacaagacaattccggaaggaagaatcagacttccacgaaaagcaaccaaaacaaaaaaaaactataaagatctctcaaattcagaatcagagtgtgaacaagaattttcacattcatttaaagagaacataccagtaaaggaggagaatatccattccagaatgaaaacggtaaagctaccaaagaaacaacagaaagtcttctgtgctgaaacagaaaaggaactatcaaaacaatggaaaaactcatctctactaaaagatgctatacgagataattgccttgacttatctcccagatctttatctggcagtccatcatctatagaagtaacgagatgtatagagaaaataacagaaaaggattttactcaggattatgactgcataacaaaatctatatcaccttatccaaaaacttcatcacttgaatccttaaatagtaacagtggagttggaggtacaataaagtcacccaaaaacaatgagaaaaacttcctgtgtgcaagtgaaagttgttcaccaactccacgaccactgtttttggccagacatactccaactaagagtaatactattgtaaatagaaaaaaaataagttctctggtacttacacaagaaacacaaaacagtaacagctattcagatgtaagcagatatagttcagaagaacggtttatggaaattgaatctccacatatcaatgaaaattatatacaaagcaaaagagaggaaagtcatttagcatcttcattatccaagtctagtgaaggaagagagaaaacgtggtttgacatgccctgtgatgctactcatgtatcaggccccacccaacatcttagtcgcaaaagaatatatatagaagataatctaagtaattccaatgaagtagaaatggaagagaaaggagaaaggagagcaaacttgcttcccaaaaaactgtgtaaaattgaagatgcagatcatcatatccacaaaatgtctgaaagtgtatcttcattatcaacaaatgacttttctattccttgggagacctggcaaaatgaatttgcagggatagagatgacttatgagacttacgagaggctcaattcagaatttaagagaaggaataatatccgacataaaatgttgagttattttactacgcagtcttggaaaacagctcagcaacatctgagaacaatgaatcatcaaagtcaggactctaggattaaaaaacttgataaattccaattcattatcatagaggagctggagaattttgaaaaagattcacagtctttaaaagatttggaaaaggaatttgtggacttttgggaaaagatatttncagaaagttcagtgcattatcaaaaaagcgaacaacagaggcttcatcttttgaaaacttcattggctaaaagtgtcttctgtaatactgatagtgaagaaactgtttttacatccgagatgtgtttgatgaaagaagatatgaaagtgctgcaagacaggcttcttaaggacatgctagaagaggagcttcttaatgtacgcagagaactgatgtcagtattcatgtctcatgaaagaaatgctaatgtgtgaaatctagtttttatcaccatactttatctaattattattctctgtatataactgaggaaataagaatagtcctacaaagagaaaaatatacatgtcaccgaagcaagtgtaccctttataggaaccctcaaattaaaaaaaaatgtcttttaatggatgagagggaaccactataacatgagtccaagcccagaagacttctgtctatacaatatttttttttaattttggagataaaagctttaagaaactttttgagttaattatactcataaaatgagtttctttaataaattaaattttattgtgtaaaatgtattattacataaaatgtgtttttgaatcaatgcagtttggggatgaatataattaaaatatgtttaataacttagaattcaactaataaaaatttagccacacttacaagggggaggaagtccctagtttaaaatgtataactgagtggtagatcagtactttcagcacactgttggaaacatttattcagatatggctctaatgtattaggaagcactaaatggcctaaaaaagctactacattgcctaaatatgttaattcaatatagaagtcctatttcataaccaggctgtttgacaaatacttttaatctagtagtcattgtaatatcttgctagattaatttataaaaatgagtatacatttgatttgcttttaatgaagttgaaataaatgcttatgtcacttgaataaatataaatcattatattcc

SEQ ID NO: 439565 - DNA, 293 bp, Homo sapiens
tattatgaccactgcctgatttccttttgattctaggcatgatttctattactggacaagattatgctgtgaaagcttatttatttttttcttaaactactttttatttcagggtctttacatttccttgtttatcagcatttcttgataaatatgaggtaaaattttaatttaacacattattttagttattgcatgaattttgatagtcaagtgaattatgagttaaaaatgaataagaacactaaaaatagttgtaattagatcatgaatgtagctggtctagtattctg

SEQ ID NO: 439566 - DNA, 5584 bp, Homo sapiens
  misc_feature (4578)..(4578): n is a, c, g, or t
aggcgctgcggcggtccctgaggcgcagagttgcgacgctcggcggcatagggggcggctccaccgacactacgcggacgcctcctgccgcaggcagatacacaatcatcatcttactagttctctgtgttgctcgctaaccagtcccccagttcagtagactggagcccagagcctgcttacttgtcaggtgtttattttgtcttgctttttttttttttttaaatgaagtcaaaatgccaataagaccagatctccagcagttggaaaaatgcattgatgatgctttaagaaaaaatgatttcaaacctttgaaaacacttttgcaaattgatatttgtgaagatgtgaagattaaatgcagcaaacagtttttccacaaggtggacaaccttatatgcagggaacttaataaagaggatatccacaatgtttcagccattttggtttctgttggaagatgtggcaaaaatatcagtgtattggggcaagctggacttctaacgatgataaaacaaggactaatacaaaagatggttgcctggtttgaaaaatccaaggacattattcagagtcaaggaaattcaaaagatgaagctgttctaaatatgatagaagacttagttgatcttctgctggtcatacatgatgtcagtgatgaaggtaaaaaacaagtagtggaaagtttcgtacctcgcatttgttccctggttattgactcaagagtgaatatttgtattcagcaagagattataaaaaaaatgaatgctatgcttgacaaaatgcctcaagatgcccggaaaatactctctaaccaagaaatgttaattctcatgagtagtatgggagaaaggattttagatgctggagattatgacttacaggtagccattgtagaagctttgtgtagaatgaccacagaaaaacaaagacaagaactggcacatcagtggttttcaatggattttattgctaaggcatttaaaagaattaaggactctgaatttgaaacagattgcaggatatttctcaaccttgtaaatggcatgcttggagacaaaagaagggtctttacatttccttgtttatcagcatttcttgataaatatgagctgcaaataccatcagatgaaaaacttgaggaattttggattgattttaatcttgggagtcagactctctcattctacattgctggagataatgatgatcatcaatgggaagcagttactgtgccagaggaaaaagtacaaatatacagcattgaagtgtgagaatcaaagaagctactgacaataattctgaaaaatacagtaaaaattagcaaaagagaagggaaagaattgcttttgtattttgacgcatcactagaaatcactaatgtaactcaaaaaatttttggtgcaactaaacatagggaatctatcagaaaacaaggtatttcagttgccaaaacgtcgctgcatatactttttgacgcaagtggatcacagattctagtgccagaaagtcaaatctcaccagtcggagaagagctcgttagtttaaaggaaaaatcaaagtccccaaaggaatttgctaaaccttcaaaatatatcaaaaacagtgacaaagggaatagaaataatagtcagcttgagaaaactactcctagcaaaagaaaaatgtctgaagcatcaatgattgtttctggtgcagatagatacactatgagaagtccagtgcttttcagcaacacatcaataccaccacgaagaagaagaattaaaccaccactgcaaatgacgagctctgcagagaaacctagtgtttctcaaacatcagaaaatagagtggataatgctgcatcactgaaatctagatcatcagaaggaagacatagaagagataatatagacaaacatatcaaaactgctaagtgtgtagaaaacacagaaaataagaatgttgaattcccaaaccaaaattttagtgaactccaggatgttataccagattcacaggcagcggaaaaaagagatcatactatattacctggtgttttagacaacatctgtggaaataaaatacacagcaaatgggcatgttggacacctgtaacaaacattgaactatgtaataaccaaagagcaagtacttcgtcaggagacacattgaatcaagatattgttataaataaaaaacttactaaacaaaaatcatcctcttcaatatctgatcataattctgaaggaacaggaaaagtgaaatataagaaagaacaaaccgaccatatcaaaatagataaagcagaagtagaagtttgcaagaaacacaatcagcaacaaaatcatcctaaatattcagggcagaaaaatactgaaaatgccaagcagagtgattggcctgttgaatctgaaactacttttaaatcggttctcctaaataagacaattgaagaatcgctgatatataggaagaaatacatattgtcaaaagatgtgaatactgctacttgcgataaaaatccatctgctagcaaaaatgtgcaaagtcatagaaaagcagagaaagaattgacttctgagcttaattcctgggattcgaaacaaaaaaaaatgagagaaaagtcaaaagggaaagaatttaccaatgtagcagaatccttgataagccaaatcaataaaagatacaaaacaaaagatgacatcaagtctacaagaaaattaaaggagtctttgattaacagtggtttttcaaacaaacctgttgtacaactcagtaaggaaaaagttcagaaaaaaagctacagaaaactgaagactacctttgttaatgttacttctgaatgcccagtgaatgatgtttacaattttaatttgaatggagctgatgaccctatcataaaacttggaatccaagagtttcaagctacagctaaagaagcttgtgcggataggtcaattagattggtaggtccaaggaatcatgatgaacttaaatcttctgtcaaaacaaaagataaaaaaattataacaaatcatcaaaagaaaaatctgtttagtgatactgaaacagagtacagatgtgatgacagcaagactgatattagctggctaagagaaccgaaatcaaaaccacagctaatagactatagcagaaataaaaatgtgaagaatcataaaagtggaaaatcaagatcatccttggaaaagggacagccaagctctaaaatgacacccagtaaaaatatcacaaaaaagatggacaagacaattccggaaggaagaatcagacttccacgaaaagcaaccaaaacaaaaaaaaactataaagatctctcaaattcagaatcagagtgtgaacaagaattttcacattcatttaaagagaacataccagtaaaggaggagaatatccattccagaatgaaaacggtaaagctaccaaagaaacaacagaaagtcttctgtgctgaaacagaaaaggaactatcaaaacaatggaaaaactcatctctactaaaagatgctatacgagataattgccttgacttatctcccagatctttatctggcagtccatcatctatagaagtaacgagatgtatagagaaaataacagaaaaggattttactcaggattatgactgcataacaaaatctatatcaccttatccaaaaacttcatcacttgaatccttaaatagtaacagtggagttggaggtacaataaagtcacccaaaaacaatgagaaaaacttcctgtgtgcaagtgaaagttgttcaccaactccacgaccactgtttttggccagacatactccaactaagagtaatactattgtaaatagaaaaaaaataagttctctggtacttacacaagaaacacaaaacagtaacagctattcagatgtaagcagatatagttcagaagaacggtttatggaaattgaatctccacatatcaatgaaaattatatacaaagcaaaagagaggaaagtcatttagcatcttcattatccaagtctagtgaaggaagagagaaaacgtggtttgacatgccctgtgatgctactcatgtatcaggccccacccaacatcttagtcgcaaaagaatatatatagaagataatctaagtaattccaatgaagtagaaatggaagagaaaggagaaaggagagcaaacttgcttcccaaaaaactgtgtaaaattgaagatgcagatcatcatatccacaaaatgtctgaaagtgtatcttcattatcaacaaatgacttttctattccttgggagacctggcaaaatgaatttgcagggatagagatgacttatgagacttacgagaggctcaattcagaatttaagagaaggaataatatccgacataaaatgttgagttattttactacgcagtcttggaaaacagctcagcaacatctgagaacaatgaatcatcaaagtcaggactctaggattaaaaaacttgataaattccaattcattatcatagaggagctggagaattttgaaaaagattcacagtctttaaaagatttggaaaaggaatttgtggacttttgggaaaagatatttncagaaagttcagtgcattatcaaaaaagcgaacaacagaggcttcatcttttgaaaacttcattggctaaaagtgtcttctgtaatactgatagtgaagaaactgtttttacatccgagatgtgtttgatgaaagaagatatgaaagtgctgcaagacaggcttcttaaggacatgctagaagaggagcttcttaatgtacgcagagaactgatgtcagtattcatgtctcatgaaagaaatgctaatgtgtgaaatctagtttttatcaccatactttatctaattattattctctgtatataactgaggaaataagaatagtcctacaaagagaaaaatatacatgtcaccgaagcaagtgtaccctttataggaaccctcaaattaaaaaaaaatgtcttttaatggatgagagggaaccactataacatgagtccaagcccagaagacttctgtctatacaatatttttttttaattttggagataaaagctttaagaaactttttgagttaattatactcataaaatgagtttctttaataaattaaattttattgtgtaaaatgtattattacataaaatgtgtttttgaatcaatgcagtttggggatgaatataattaaaatatgtttaataacttagaattcaactaataaaaatttagccacacttacaagggggaggaagtccctagtttaaaatgtataactgagtggtagatcagtactttcagcacactgttggaaacatttattcagatatggctctaatgtattaggaagcactaaatggcctaaaaaagctactacattgcctaaatatgttaattcaatatagaagtcctatttcataaccaggctgtttgacaaatacttttaatctagtagtcattgtaatatcttgctagattaatttataaaaatgagtatacatttgatttgcttttaatgaagttgaaataaatgcttatgtcacttgaataaatataaatcattatattcc

SEQ ID NO: 439567 - DNA, 5142 bp, Homo sapiens
  misc_feature (4578)..(4578): n is a, c, g, or t
aggcgctgcggcggtccctgaggcgcagagttgcgacgctcggcggcatagggggcggctccaccgacactacgcggacgcctcctgccgcaggcagatacacaatcatcatcttactagttctctgtgttgctcgctaaccagtcccccagttcagtagactggagcccagagcctgcttacttgtcaggtgtttattttgtcttgctttttttttttttttaaatgaagtcaaaatgccaataagaccagatctccagcagttggaaaaatgcattgatgatgctttaagaaaaaatgatttcaaacctttgaaaacacttttgcaaattgatatttgtgaagatgtgaagattaaatgcagcaaacagtttttccacaaggtggacaaccttatatgcagggaacttaataaagaggatatccacaatgtttcagccattttggtttctgttggaagatgtggcaaaaatatcagtgtattggggcaagctggacttctaacgatgataaaacaaggactaatacaaaagatggttgcctggtttgaaaaatccaaggacattattcagagtcaaggaaattcaaaagatgaagctgttctaaatatgatagaagacttagttgatcttctgctggtcatacatgatgtcagtgatgaaggtaaaaaacaagtagtggaaagtttcgtacctcgcatttgttccctggttattgactcaagagtgaatatttgtattcagcaagagattataaaaaaaatgaatgctatgcttgacaaaatgcctcaagatgcccggaaaatactctctaaccaagaaatgttaattctcatgagtagtatgggagaaaggattttagatgctggagattatgacttacaggtagccattgtagaagctttgtgtagaatgaccacagaaaaacaaagacaagaactggcacatcagtggttttcaatggattttattgctaaggcatttaaaagaattaaggactctgaatttgaaacagattgcaggatatttctcaaccttgtaaatggcatgcttggagacaaaagaagggtctttacatttccttgtttatcagcatttcttgataaatatgagctgcaaataccatcagatgaaaaacttgaggaattttggattgattttaatcttgggagtcagactctctcattctacattgctggagataatgatgatcatcaatgggaagcagttactgtgccagaggaaaaagtacaaatatacagcattgaagtgtgagaatcaaagaagctactgacaataattctgaaaaatacagtaaaaattagcaaaagagaagggaaagaattgcttttgtattttgacgcatcactagaaatcactaatgtaactcaaaaaatttttggtgcaactaaacatagggaatctatcagaaaacaaggtatttcagttgccaaaacgtcgctgcatatactttttgacgcaagtggatcacagattctagtgccagaaagtcaaatctcaccagtcggagaagagctcgttagtttaaaggaaaaatcaaagtccccaaaggaatttgctaaaccttcaaaatatatcaaaaacagtgacaaagggaatagaaataatagtcagcttgagaaaactactcctagcaaaagaaaaatgtctgaagcatcaatgattgtttctggtgcagatagatacactatgagaagtccagtgcttttcagcaacacatcaataccaccacgaagaagaagaattaaaccaccactgcaaatgacgagctctgcagagaaacctagtgtttctcaaacatcagaaaatagagtggataatgctgcatcactgaaatctagatcatcagaaggaagacatagaagagataatatagacaaacatatcaaaactgctaagtgtgtagaaaacacagaaaataagaatgttgaattcccaaaccaaaattttagtgaactccaggatgttataccagattcacaggcagcggaaaaaagagatcatactatattacctggtgttttagacaacatctgtggaaataaaatacacagcaaatgggcatgttggacacctgtaacaaacattgaactatgtaataaccaaagagcaagtacttcgtcaggagacacattgaatcaagatattgttataaataaaaaacttactaaacaaaaatcatcctcttcaatatctgatcataattctgaaggaacaggaaaagtgaaatataagaaagaacaaaccgaccatatcaaaatagataaagcagaagtagaagtttgcaagaaacacaatcagcaacaaaatcatcctaaatattcagggcagaaaaatactgaaaatgccaagcagagtgattggcctgttgaatctgaaactacttttaaatcggttctcctaaataagacaattgaagaatcgctgatatataggaagaaatacatattgtcaaaagatgtgaatactgctacttgcgataaaaatccatctgctagcaaaaatgtgcaaagtcatagaaaagcagagaaagaattgacttctgagcttaattcctgggattcgaaacaaaaaaaaatgagagaaaagtcaaaagggaaagaatttaccaatgtagcagaatccttgataagccaaatcaataaaagatacaaaacaaaagatgacatcaagtctacaagaaaattaaaggagtctttgattaacagtggtttttcaaacaaacctgttgtacaactcagtaaggaaaaagttcagaaaaaaagctacagaaaactgaagactacctttgttaatgttacttctgaatgcccagtgaatgatgtttacaattttaatttgaatggagctgatgaccctatcataaaacttggaatccaagagtttcaagctacagctaaagaagcttgtgcggataggtcaattagattggtaggtccaaggaatcatgatgaacttaaatcttctgtcaaaacaaaagataaaaaaattataacaaatcatcaaaagaaaaatctgtttagtgatactgaaacagagtacagatgtgatgacagcaagactgatattagctggctaagagaaccgaaatcaaaaccacagctaatagactatagcagaaataaaaatgtgaagaatcataaaagtggaaaatcaagatcatccttggaaaagggacagccaagctctaaaatgacacccagtaaaaatatcacaaaaaagatggacaagacaattccggaaggaagaatcagacttccacgaaaagcaaccaaaacaaaaaaaaactataaagatctctcaaattcagaatcagagtgtgaacaagaattttcacattcatttaaagagaacataccagtaaaggaggagaatatccattccagaatgaaaacggtaaagctaccaaagaaacaacagaaagtcttctgtgctgaaacagaaaaggaactatcaaaacaatggaaaaactcatctctactaaaagatgctatacgagataattgccttgacttatctcccagatctttatctggcagtccatcatctatagaagtaacgagatgtatagagaaaataacagaaaaggattttactcaggattatgactgcataacaaaatctatatcaccttatccaaaaacttcatcacttgaatccttaaatagtaacagtggagttggaggtacaataaagtcacccaaaaacaatgagaaaaacttcctgtgtgcaagtgaaagttgttcaccaactccacgaccactgtttttggccagacatactccaactaagagtaatactattgtaaatagaaaaaaaataagttctctggtacttacacaagaaacacaaaacagtaacagctattcagatgtaagcagatatagttcagaagaacggtttatggaaattgaatctccacatatcaatgaaaattatatacaaagcaaaagagaggaaagtcatttagcatcttcattatccaagtctagtgaaggaagagagaaaacgtggtttgacatgccctgtgatgctactcatgtatcaggccccacccaacatcttagtcgcaaaagaatatatatagaagataatctaagtaattccaatgaagtagaaatggaagagaaaggagaaaggagagcaaacttgcttcccaaaaaactgtgtaaaattgaagatgcagatcatcatatccacaaaatgtctgaaagtgtatcttcattatcaacaaatgacttttctattccttgggagacctggcaaaatgaatttgcagggatagagatgacttatgagacttacgagaggctcaattcagaatttaagagaaggaataatatccgacataaaatgttgagttattttactacgcagtcttggaaaacagctcagcaacatctgagaacaatgaatcatcaaagtcaggactctaggattaaaaaacttgataaattccaattcattatcatagaggagctggagaattttgaaaaagattcacagtctttaaaagatttggaaaaggaatttgtggacttttgggaaaagatatttncagaaagttcagtgcattatcaaaaaagcgaacaacagaggcttcatcttttgaaaacttcattggctaaaagtgtcttctgtaatactgatagtgaagaaactgtttttacatccgagatgtgtttgatgaaagaagatatgaaagtgctgcaagacaggcttcttaaggacatgctagaagaggagcttcttaatgtacgcagagaactgatgtcagtattcatgtctcatgaaagaaatgctaatgtgtgaaatctagtttttatcaccatactttatctaattattattctctgtatataactgaggaaataagaatagtcctacaaagagaaaaatatacatgtcaccgaagcaagtgtaccctttataggaaccctcaaattaaaaaaaaatgtcttttaatggatgagagggaaccactataacatgagtccaagcccagaagacttctgtctatacaatatttttttttaattttggagataaaagctttaagaaactttttgagttaattatactcataaaatgagtttctttaataaattaaattttattgtgt

SEQ ID NO: 439568 - DNA, 954 bp, Homo sapiens
aggcgctgcggcggtccctgaggcgcagagttgcgacgctcggcggcatagggggcggctccaccgacactacgcggacgcctcctgccgcaggcagatacacaatcatcatcttactagttctctgtgttgctcgctaaccagtcccccagttcagtagactggagcccagagcctgcttacttgtcaggtgtttattttgtcttgctttttttttttttttaaatgaagtcaaaatgccaataagaccagatctccagcagttggaaaaatgcattgatgatgctttaagaaaaaatgatttcaaacctttgaaaacacttttgcaaattgatatttgtgaagatgtgaagattaaatgcagcaaacagtttttccacaaggtggacaaccttatatgcagggaacttaataaagaggatatccacaatgtttcagccattttggtttctgttggaagatgtggcaaaaatatcagtgtattggggcaagctggacttctaacgatgataaaacaaggactaatacaaaagatggttgcctggtttgaaaaatccaaggacattattcagagtcaaggaaattcaaaagatgaagctgttctaaatatgatagaagacttagttgatcttctgctggtcatacatgatgtcagtgatgaaggtaaaaaacaagtagtggaaagtttcgtacctcgcatttgttccctggttattgactcaagagtgaatatttgtattcagcaagagattataaaaaaaatgaatgctatgcttgacaaaatgcctcaagatgcccggaaaatactctctaaccaagaaatgttaattctcatgtaataatctgtacttatatggtttttattcttaaaatccataagaatgttttataagacagacaactatgagtttgcattaataatgaaactgataaactgttgcagctttttaatat

SEQ ID NO: 439569 - DNA, 1263 bp, Homo sapiens
gaagtgtggaagagagcgctggactggctgaagactgaactagagagaaagcattagcaggaatgagacaaggcagagctgcagtgccccctgaggcttccacacatctttctgaatattatttttcaagtaacaagggcagggacagcggaaacagctgcccaccccccccatcccagcagctcagctaagccctgatgagaatgaagccacaggagttgtctgaggtgaacccagccgctcagccacacatggaagccattgcctttgcacatagttcttgggttctttttcctaaaaaggtaaggagctgaggtgtgtggttttttaatattaagaatatataatggaaaacacacgactgacgctcaggcatcttcccctactccccaacagatccccagaagacagcgtggaaggcagtgtagacagtaaatcgggcttcagttctatagccaagaagagatcagctgctgaaaccaccagtgggtaccccaggccacctgcctttgaacttggggatttgccatgtttgatcttgtcacatacttgcttttttacaagatgaactctttgtatttatgatttggggggcaatgaaaggtgcaatgcaggaactgctgctgccgagctcgctggtcacatgggggtgccaggcgggattctggaaaaccagtgcacttaaactgatcctgaagagagctgtcccagcactctggccaccaggagggccagattccccagaaactaccttttgcccaaagaacatgctcagtatttggggcatttcctcccacaaaccctgactgcttctgttacctcagggccttggtacctggatactgccacagaattggggcgggtgggggaggggcctatttttaaataaaataactgttcaaagttgggggttttttaaaaaattaagaaaaaggaaagctattctgtattgcaccttttcacaatttaatacattttcttacattttcctgtgattttcgaaactaaaccattgtgtgtcctgtagtgtcctggttgagctgccgctcagcagcttcctcggggggatttggaacacctgtgtctgtcgccgcactgcctgtgggaggggcccagagggctgctgggactggcgtctgtacacacttgtttggccttttctgtagttgatgctgtaaactctatggctttttaaaaacgatttcatgtttttatttagtattggaaatccaatacacttttttaatccaatcaaaaaaaaat

SEQ ID NO: 439570 - DNA, 376 bp, Homo sapiens
  misc_feature (22)..(22): n is a, c, g, or t
  misc_feature (33)..(33): n is a, c, g, or t
  misc_feature (36)..(37): n is a, c, g, or t
  misc_feature (39)..(39): n is a, c, g, or t
  misc_feature (41)..(41): n is a, c, g, or t
  misc_feature (46)..(46): n is a, c, g, or t
  misc_feature (185)..(185): n is a, c, g, or t
  misc_feature (203)..(203): n is a, c, g, or t
attcgcggccgggtcgactgcncaagctggagnccnncngntaatncttgaacatgatgttgccatcccaacattacctcccacttcactgaccagtgccactactgaccatctagcaccagccacaacgggaccaatgactctgactaagggagaaggctgtttcaaaaataccaagtctgatntcacctcaggatctggangaaccttcaattcaacttcatcactatactttggtggcccaccactttccactacgcagcgataaagcccgccatctccttcagttgcattgctgataaccagcattccacttggaagtttgataactctagtcgacgcggccgccaatttagtagtagaagtcgacccggga

SEQ ID NO: 439571 - DNA, 404 bp, Homo sapiens
caaacaccgcaatctcccgcaatccttcaggacttcctactccaaccattaaatggatgaaaaatgaggaggcacttgacacagaaagctctgaaagattggtattgctggcaggtggtagcctggagatcagtgatgttactgaggatgatgctgggacttatttttgtatagctgataatggaaatgagacaattgaagctcaagcagagcttacagtgcaagctcaacctgaattcctgaagcagcctactaatatatatgctcacgaatctatggatattgtatttgaatgtgaagtgactggaaaaccaactccaactgtgaagtgggtcaaaaatggggatatggttatcccaagtgattattttaagattgtagtgtttggagatcctctagatcag

SEQ ID NO: 439572 - DNA, 6962 bp, Homo sapiens
gggccgggccgggctgggctggagcagcggcgccgcgggagccgagcttgcagcgagggaccggctgaggcgcgcgggagggaaggaggcaagggctccgcggcgctgtcgccgccgctgccgctcactctcggggaagagatggcggcggagcggggagcccggcgactcctcagcaccccctccttctggctctactgcctgctgctgctcgggcgccgggcgccgggcgccgcggccgccaggagcggctccgcgccgcagtccccaggagccagcattcgaacgttcactccattttattttctggtggagccggtggatacactctcagttagaggctcttctgttatattaaactgttcagcatattctgagccttctccaaaaattgaatggaaaaaagatggaacttttttaaacttagtatcagatgatcgacgccagcttctcccggatggatctttatttatcagcaatgtggtgcattccaaacacaataaacctgatgaaggttattatcagtgtgtggccactgttgagagtcttggaactattatcagtagaacagcgaagctcatagtagcaggtcttccaagatttaccagccaaccagaaccttcctcagtttatgctgggaacaatgcaattctgaattgtgaagttaatgcagatttggtcccatttgtgaggtgggaacagaacagacaaccccttcttctggatgatagagttatcaaacttccaagtggaatgctggttatcagcaatgcaactgaaggagatggcgggctttatcgctgcgtagtggaaagtggtgggccaccaaagtatagtgatgaagttgaattgaaggttcttccagatcctgaggtgatatcagacttggtatttttgaaacagccttctcccttagtcagagtcattggtcaggatgtagtgttgccatgtgttgcttcaggacttcctactccaaccattaaatggatgaaaaatgaggaggcacttgacacagaaagctctgaaagattggtattgctggcaggtggtagcctggagatcagtgatgttactgaggatgatgctgggacttatttttgtatagctgataatggaaatgagacaattgaagctcaagcagagcttacagtgcaagctcaacctgaattcctgaagcagcctactaatatatatgctcacgaatctatggatattgtatttgaatgtgaagtgactggaaaaccaactccaactgtgaagtgggtcaaaaatggggatatggttatcccaagtgattattttaagattgtaaaggaacataatcttcaagttttgggtctggtgaaatcagatgaagggttctatcagtgcattgctgaaaatgatgttggaaatgcacaagctggagcccaactgataatccttgaacatgcaccagccacaacgggaccactgccttcagctcctcgggatgtcgtggcctccctggtctctacccgcttcatcaaattgacgtggcggacacctgcatcagatcctcacggagacaaccttacctactctgtgttctacaccaaggaagggattgctagggaacgtgttgagaataccagtcacccaggagagatgcaagtaaccattcaaaacctaatgccagcgaccgtgtacatctttagagttatggctcaaaataagcatggctcaggagagagttcagctccactgcgagtagaaacacaacctgaggttcagctccctggcccagcacctaaccttcgtgcatatgcagcttcgcctacctccatcactgttacgtgggaaacaccagtgtctggcaatggggaaattcagaattataagttgtactacatggaaaaggggactgataaagaacaggatgttgatgtttcaagtcactcttacaccattaatgggttgaaaaaatatacagagtatagtttccgagtggtggcctacaataaacatggtcctggagtttccacaccagatgttgctgttcgaacattgtcagatgttcccagtgctgctcctcagaatctgtccttggaagtgagaaattcaaagagtattatgattcactggcagccacctgctccagccacacaaaatgggcagattactggctacaagattcgctaccgaaaggcctcccgaaagagtgatgtcactgagaccttggtaagcgggacacagctgtctcagctgattgaaggtcttgatcgggggactgagtataatttccgagtggctgctctaacaatcaatggtacaggcccggcaactgactggctgtctgctgaaacttttgaaagtgacctagatgaaactcgtgttcctgaagtgcctagctctcttcacgtacgcccgctcgttactagcatcgtagtgagctggactcctccagagaatcagaacattgtggtcagaggttacgccattggttatggcattggcagccctcatgcccagaccatcaaagtggactataaacagcgctattacaccattgaaaatctggatcccagctctcactatgtgattaccctgaaagcatttaataacgtgggtgaaggcatccccctgtatgagagtgctgtgaccaggcctcacacagtgccagatcccactcccatgatgccaccagtgggagttcaggcttccattctgagtcatgacaccatcaggattacgtgggcagacaactcgctgcccaagcaccagaagattacagactcccgatactacaccgtccgatggaaaaccaacatcccagcaaacaccaagtacaagaatgcaaatgcaaccactttgagttatttggtgactggtttaaagccgaatacactctatgaattctctgtgatggtgaccaaaggtcgaagatcaagtacatggagtatgacagcccatgggaccacctttgaattagttccgacttctccacccaaggatgtgactgttgtgagtaaagaggggaaacctaagaccataattgtgaattggcagcctccctctgaagccaatggcaaaattacaggttacatcatatattacagtacagatgtgaatgcagagatacatgactgggttattgagcctgttgtgggaaacagactgactcaccagatacaagagttaactcttgacacaccatactacttcaaaatccaggcacggaactcaaagggcatgggacccatgtctgaagctgtccaattcagaacacctaaagcctcagggtctggagggaaaggaagccggctgccagacctaggatccgactacaaacctccaatgagcggcagtaacagccctcatgggagccccacctctcctctggacagtaatatgctgctggtcataattgtttctgttggcgtcatcaccatcgtggtggttgtgattatcgctgtcttttgtacccgtcgtaccacctctcaccagaaaaagaaacgagctgcctgcaaatcagtgaatggctctcataagtacaaagggaattccaaagatgtgaaacctccagatctctggatccatcatgagagactggagctgaaacccattgataagtctccagacccaaaccccatcatgactgatactccaattcctcgcaactctcaagatatcacaccagttgacaactccatggacagcaatatccatcaaaggcgaaattcatacagagggcatgagtcagaggacagcatgtctacactggctggaaggcgaggaatgagaccaaaaatgatgatgccctttgactcccagccaccccagcctgtgattagtgcccatcccatccattccctcgataaccctcaccatcatttccactccagcagcctcgcttctccagctcgcagtcatctctaccacccgggcagcccatggcccattggcacatccatgtccctttcagacagggccaattccacagaatccgttcgaaatacccccagcactgacaccatgccagcctcttcgtctcaaacatgctgcactgatcaccaggaccctgaaggtgctaccagctcctcttacttggccagctcccaagaggaagattcaggccagagtcttcccactgcccatgttcgcccttcccacccattgaagagcttcgccgtgccagcaatcccgcctccaggacctcccacctatgatcctgcattgccaagcacaccattactgtcccagcaagctctgaaccatcacattcactcagtgaagacagcctccatcgggactctaggaaggagccggcctcctatgccagtggttgttcccagtgcccctgaagtgcaggagaccacaaggatgttggaagactccgagagtagctatgaaccagatgagctgaccaaagagatggcccacctggaaggactaatgaaggacctaaacgctatcacaacagcatgacgaccttcaccaggacctgacttcaaacctgagtctggaagtcttggaacttacccttgaaaacaaggaattgtacagagtacgagaggacagcacttgagaacacagaatgagccagcagactggccagcgcctctgtgtagggctggctccaggcatggccacctgccttcccctggtcagcctggaagaagcctgtgtcgaggcagcttccctttgcctgctgatattctgcaggactgggcaccatgggccaaaattttgtgtccagggaagaggcgagaagtgcaacctgcatttcactttgtggtcaggccgtgtctttgtgctgtgactgcatcacctttatggagtgtagacattggcatttatgtacaattttatttgtgtcttattttattttaccttcaaaaacaaaaacgccatccaaaaccaaggaagtccttggtgttctccacaagtggttgacatttgactgcttgttccaattatgtatggaaagtctttgacagtgtgggtcgttcctggggttggcttgttttttggtttcatttttattttttaattctgagtcattgcatcctctaccagctgttaatccatcactctgagggggaggaaatgttgcattgctgtttgtaagctttttttattatttttttattataattattaaaggcctgactctttcctctcatcactgtgagattacagatctatttgaattgaatgaaatgtaacattgaaaagacttgtttgttgctttctgtgcagtttcagtattggggcgggtggggggctgggggttggtaataggaaatggaggggctgctgaggtcctgtgaatgtttctgtcattgtactttcttccagaagcctgcagagaatggaagcatcttctttattgtcctttcctggcatgtccatccttattgtcactacgttgcaactggagtttgatttggatctggttttaaaattcttctgtgcaatagatgggtttgaggatttagcggccctgatgtcttggtcatagcctggtaagaatgtccatgctgaggagccagatgttgtatttctaactgcctgagtcacacagaatagggtaagagcctgaccccattctgtaaatcagaaagcaaggatggagaccctttcctgctgctattattggctctctttgaggaagttggaggttaaggaaggaacttgtttgtttccgtatacgactccttcttctctctagttcagtcttcagccagtccagcgctctcttccacacttcagagccccttcagagaaagcattagcaggaatgagacaaggcagagctgcagtgccccctgaggcttccacacatctttctgaatattatttttcaagtaacaagggcagggacagcggaaacagctgcccaccccccccatcccagcagctcagctaagccctgatgagaatgaagccacaggagttgtctgaggtgaacccagccgctcagccacacatggaagccattgcctttgcacatagttcttgggttctttttcctaaaaaggtaaggagctgaggtgtgtggttttttaatattaagaatatataatggaaaacacacgactgacgctcaggcatcttcccctactccccaacagatccccagaagacagcgtggaaggcagtgtagacagtaaatcgggcttcagttctatagccaagaagagatcagctgctgaaaccaccagtgggtaccccaggccacctgcctttgaacttggggatttgccatgtttgatcttgtcacatacttgcttttttacaagatgaactctttgtatttatgatttggggggcaatgaaaggtgcaatgcaggaactgctgctgccgagctcgctggtcacatgggggtgccaggcgggattctggaaaaccagtgcacttaaactgatcctgaagagagctgtcccagcactctggccaccaggagggccagattccccagaaactaccttttgcccaaagaacatgctcagtatttggggcatttcctcccacaaaccctgactgcttctgttacctcagggccttggtacctggatactgccacagaattggggcgggtgggggaggggcctatttttaaataaaataactgttcaaagttgggggttttttaaaaaattaagaaaaaggaaagctattctgtattgcaccttttcacaatttaatacattttcttacattttcctgtgattttcgaaactaaaccattgtgtgtcctgtagtgtcctggttgagctgccgctcagcagcttcctcggggggatttggaacacctgtgtctgtcgccgcactgcctgtgggaggggcccagagggctgctgggactggcgtctgtacacacttgtttggccttttctgtagttgatgctgtaaactctatggctttttaaaaacgatttcatgtttttatttagtattggaaatccaatacacttttttaatccaatcaaaaaaaaat

SEQ ID NO: 439573 - DNA, 6936 bp, Homo sapiens
gggccgggccgggctgggctggagcagcggcgccgcgggagccgagcttgcagcgagggaccggctgaggcgcgcgggagggaaggaggcaagggctccgcggcgctgtcgccgccgctgccgctcactctcggggaagagatggcggcggagcggggagcccggcgactcctcagcaccccctccttctggctctactgcctgctgctgctcgggcgccgggcgccgggcgccgcggccgccaggagcggctccgcgccgcagtccccaggagccagcattcgaacgttcactccattttattttctggtggagccggtggatacactctcagttagaggctcttctgttatattaaactgttcagcatattctgagccttctccaaaaattgaatggaaaaaagatggaacttttttaaacttagtatcagatgatcgacgccagcttctcccggatggatctttatttatcagcaatgtggtgcattccaaacacaataaacctgatgaaggttattatcagtgtgtggccactgttgagagtcttggaactattatcagtagaacagcgaagctcatagtagcaggtcttccaagatttaccagccaaccagaaccttcctcagtttatgctgggaacaatgcaattctgaattgtgaagttaatgcagatttggtcccatttgtgaggtgggaacagaacagacaaccccttcttctggatgatagagttatcaaacttccaagtggaatgctggttatcagcaatgcaactgaaggagatggcgggctttatcgctgcgtagtggaaagtggtgggccaccaaagtatagtgatgaagttgaattgaaggttcttccagatcctgaggtgatatcagacttggtatttttgaaacagccttctcccttagtcagagtcattggtcaggatgtagtgttgccatgtgttgcttcaggacttcctactccaaccattaaatggatgaaaaatgaggaggcacttgacacagaaagctctgaaagattggtattgctggcaggtggtagcctggagatcagtgatgttactgaggatgatgctgggacttatttttgtatagctgataatggaaatgagacaattgaagctcaagcagagcttacagtgcaagctcaacctgaattcctgaagcagcctactaatatatatgctcacgaatctatggatattgtatttgaatgtgaagtgactggaaaaccaactccaactgtgaagtgggtcaaaaatggggatatggttatcccaagtgattattttaagattgtaaaggaacataatcttcaagttttgggtctggtgaaatcagatgaagggttctatcagtgcattgctgaaaatgatgttggaaatgcacaagctggagcccaactgataatccttgaacatgcaccagccacaacgggaccactgccttcagctcctcgggatgtcgtggcctccctggtctctacccgcttcatcaaattgacgtggcggacacctgcatcagatcctcacggagacaaccttacctactctgtgttctacaccaaggaagggattgctagggaacgtgttgagaataccagtcacccaggagagatgcaagtaaccattcaaaacctaatgccagcgaccgtgtacatctttagagttatggctcaaaataagcatggctcaggagagagttcagctccactgcgagtagaaacacaacctgaggttcagctccctggcccagcacctaaccttcgtgcatatgcagcttcgcctacctccatcactgttacgtgggaaacaccagtgtctggcaatggggaaattcagaattataagttgtactacatggaaaaggggactgataaagaacaggatgttgatgtttcaagtcactcttacaccattaatgggttgaaaaaatatacagagtatagtttccgagtggtggcctacaataaacatggtcctggagtttccacacaacatacgagcacgatgatgtcagtgtctcatgttggaagtgagaaattcgaagagtattatgattcactggcagccacctgctccagccacacaaaatgggcagattactggctacaagattcgctaccgaaaggcctcccgaaagagtgatgtcactgagaccttggtaagcgggacacagctgtctcagctgattgaaggtcttgatcgggggactgagtataatttccgagtggctgctctaacaatcaatggtacaggcccggcaactgactggctgtctgctgaaacttttgaaagtgacctagatgaaactcgtgttcctgaagtgcctagctctcttcacgtacgcccgctcgttactagcatcgtagtgagctggactcctccagagaatcagaacattgtggtcagaggttacgccattggttatggcattggcagccctcatgcccagaccatcaaagtggactataaacagcgctattacaccattgaaaatctggatcccagctctcactatgtgattaccctgaaagcatttaataacgtgggtgaaggcatccccctgtatgagagtgctgtgaccaggcctcacacagtgccagatcccactcccatgatgccaccagtgggagttcaggcttccattctgagtcatgacaccatcaggattacgtgggcagacaactcgctgcccaagcaccagaagattacagactcccgatactacaccgtccgatggaaaaccaacatcccagcaaacaccaagtacaagaatgcaaatgcaaccactttgagttatttggtgactggtttaaagccgaatacactctatgaattctctgtgatggtgaccaaaggtcgaagatcaagtacatggagtatgacagcccatgggaccacctttgaattagttccgacttctccacccaaggatgtgactgttgtgagtaaagaggggaaacctaagaccataattgtgaattggcagcctccctctgaagccaatggcaaaattacaggttacatcatatattacagtacagatgtgaatgcagagatacatgactgggttattgagcctgttgtgggaaacagactgactcaccagatacaagagttaactcttgacacaccatactacttcaaaatccaggcacggaactcaaagggcatgggacccatgtctgaagctgtccaattcagaacacctaaagcctcagggtctggagggaaaggaagccggctgccagacctaggatccgactacaaacctccaatgagcggcagtaacagccctcatgggagccccacctctcctctggacagtaatatgctgctggtcataattgtttctgttggcgtcatcaccatcgtggtggttgtgattatcgctgtcttttgtacccgtcgtaccacctctcaccagaaaaagaaacgagctgcctgcaaatcagtgaatggctctcataagtacaaagggaattccaaagatgtgaaacctccagatctctggatccatcatgagagactggagctgaaacccattgataagtctccagacccaaaccccatcatgactgatactccaattcctcgcaactctcaagatatcacaccagttgacaactccatggacagcaatatccatcaaaggcgaaattcatacagagggcatgagtcagaggacagcatgtctacactggctggaaggcgaggaatgagaccaaaaatgatgatgccctttgactcccagccaccccagcctgtgattagtgcccatcccatccattccctcgataaccctcaccatcatttccactccagcagcctcgcttctccagctcgcagtcatctctaccacccgggcagcccatggcccattggcacatccatgtccctttcagacagggccaattccacagaatccgttcgaaatacccccagcactgacaccatgccagcctcttcgtctcaaacatgctgcactgatcaccaggaccctgaaggtgctaccagctcctcttacttggccagctcccaagaggaagattcaggccagagtcttcccactgcccatgttcgcccttcccacccattgaagagcttcgccgtgccagcaatcccgcctccaggacctcccacctatgatcctgcattgccaagcacaccattactgtcccagcaagctctgaaccatcacattcactcagtgaagacagcctccatcgggactctaggaaggagccggcctcctatgccagtggttgttcccagtgcccctgaagtgcaggagaccacaaggatgttggaagactccgagagtagctatgaaccagatgagctgaccaaagagatggcccacctggaaggactaatgaaggacctaaacgctatcacaacagcatgacgaccttcaccaggacctgacttcaaacctgagtctggaagtcttggaacttacccttgaaaacaaggaattgtacagagtacgagaggacagcacttgagaacacagaatgagccagcagactggccagcgcctctgtgtagggctggctccaggcatggccacctgccttcccctggtcagcctggaagaagcctgtgtcgaggcagcttccctttgcctgctgatattctgcaggactgggcaccatgggccaaaattttgtgtccagggaagaggcgagaagtgcaacctgcatttcactttgtggtcaggccgtgtctttgtgctgtgactgcatcacctttatggagtgtagacattggcatttatgtacaattttatttgtgtcttattttattttaccttcaaaaacaaaaacgccatccaaaaccaaggaagtccttggtgttctccacaagtggttgacatttgactgcttgttccaattatgtatggaaagtctttgacagtgtgggtcgttcctggggttggcttgttttttggtttcatttttattttttaattctgagtcattgcatcctctaccagctgttaatccatcactctgagggggaggaaatgttgcattgctgtttgtaagctttttttattatttttttattataattattaaaggcctgactctttcctctcatcactgtgagattacagatctatttgaattgaatgaaatgtaacattgaaaagacttgtttgttgctttctgtgcagtttcagtattggggcgggtggggggctgggggttggtaataggaaatggaggggctgctgaggtcctgtgaatgtttctgtcattgtactttcttccagaagcctgcagagaatggaagcatcttctttattgtcctttcctggcatgtccatccttattgtcactacgttgcaactggagtttgatttggatctggttttaaaattcttctgtgcaatagatgggtttgaggatttagcggccctgatgtcttggtcatagcctggtaagaatgtccatgctgaggagccagatgttgtatttctaactgcctgagtcacacagaatagggtaagagcctgaccccattctgtaaatcagaaagcaaggatggagaccctttcctgctgctattattggctctctttgaggaagttggaggttaaggaaggaacttgtttgtttccgtatacgactccttcttctctctagttcagtcttcagccagtccagcgctctcttccacacttcagagccccttcagagaaagcattagcaggaatgagacaaggcagagctgcagtgccccctgaggcttccacacatctttctgaatattatttttcaagtaacaagggcagggacagcggaaacagctgcccaccccccccatcccagcagctcagctaagccctgatgagaatgaagccacaggagttgtctgaggtgaacccagccgctcagccacacatggaagccattgcctttgcacatagttcttgggttctttttcctaaaaaggtaaggagctgaggtgtgtggttttttaatattaagaatatataatggaaaacacacgactgacgctcaggcatcttcccctactccccaacagatccccagaagacagcgtggaaggcagtgtagacagtaaatcgggcttcagttctatagccaagaagagatcagctgctgaaaccaccagtgggtaccccaggccacctgcctttgaacttggggatttgccatgtttgatcttgtcacatacttgcttttttacaagatgaactctttgtatttatgatttggggggcaatgaaaggtgcaatgcaggaactgctgctgccgagctcgctggtcacatgggggtgccaggcgggattctggaaaaccagtgcacttaaactgatcctgaagagagctgtcccagcactctggccaccaggagggccagattccccagaaactaccttttgcccaaagaacatgctcagtatttggggcatttcctcccacaaaccctgactgcttctgttacctcagggccttggtacctggatactgccacagaattggggcgggtgggggaggggcctatttttaaataaaataactgttcaaagttgggggttttttaaaaaattaagaaaaaggaaagctattctgtattgcaccttttcacaatttaatacattttcttacattttcctgtgattttcgaaactaaaccattgtgtgtcctgtagtgtcctggttgagctgccgctcagcagcttcctcggggggatttggaacacctgtgtctgtcgccgcactgcctgtgggaggggcccagagggctgctgggactggcgtctgtacacacttgtttggccttttctgtagttgatgctgtaaactctatggctttttaaaaacgatttcatgtttttatttagtattggaaatccaatacacttttttaatccaatcaaaaaaaaat

SEQ ID NO: 439574 - DNA, 3001 bp, Homo sapiens
gtgggttgaccgtggcttgtgggttgaccgtggcttgtgggttgaccgtggcttcatgctgcactgatcaccaggaccctgaaggtgctaccagctcctcttacttggccagctcccaagaggaagattcaggccagagtcttcccactgcccatgttcgcccttcccacccattgaagagcttcgccgtgccagcaatcccgcctccaggacctcccacctatgatcctgcattgccaagcacaccattactgtcccagcaagctctgaaccatcacattcactcagtgaagacagcctccatcgggactctaggaaggagccggcctcctatgccagtggttgttcccagtgcccctgaagtgcaggagaccacaaggatgttggaagactccgagagtagctatgaaccagatgagctgaccaaagagatggcccacctggaaggactaatgaaggacctaaacgctatcacaacagcatgacgaccttcaccaggacctgacttcaaacctgagtctggaagtcttggaacttacccttgaaaacaaggaattgtacagagtacgagaggacagcacttgagaacacagaatgagccagcagactggccagcgcctctgtgtagggctggctccaggcatggccacctgccttcccctggtcagcctggaagaagcctgtgtcgaggcagcttccctttgcctgctgatattctgcaggactgggcaccatgggccaaaattttgtgtccagggaagaggcgagaagtgcaacctgcatttcactttgtggtcaggccgtgtctttgtgctgtgactgcatcacctttatggagtgtagacattggcatttatgtacaattttatttgtgtcttattttattttaccttcaaaaacaaaaacgccatccaaaaccaaggaagtccttggtgttctccacaagtggttgacatttgactgcttgttccaattatgtatggaaagtctttgacagtgtgggtcgttcctggggttggcttgttttttggtttcatttttattttttaattctgagtcattgcatcctctaccagctgttaatccatcactctgagggggaggaaatgttgcattgctgtttgtaagctttttttattatttttttattataattattaaaggcctgactctttcctctcatcactgtgagattacagatctatttgaattgaatgaaatgtaacattgaaaagacttgtttgttgctttctgtgcagtttcagtattggggcgggtggggggctgggggttggtaataggaaatggaggggctgctgaggtcctgtgaatgtttctgtcattgtactttcttccagaagcctgcagagaatggaagcatcttctttattgtcctttcctggcatgtccatccttattgtcactacgttgcaactggagtttgatttggatctggttttaaaattcttctgtgcaatagatgggtttgaggatttagcggccctgatgtcttggtcatagcctggtaagaatgtccatgctgaggagccagatgttgtatttctaactgcctgagtcacacagaatagggtaagagcctgaccccattctgtaaatcagaaagcaaggatggagaccctttcctgctgctattattggctctctttgaggaagttggaggttaaggaaggaacttgtttgtttccgtatacgactccttcttctctctagttcagtcttcagccagtccagcgctctcttccacacttcagagccccttcagagaaagcattagcaggaatgagacaaggcagagctgcagtgccccctgaggcttccacacatctttctgaatattatttttcaagtaacaagggcagggacagcggaaacagctgcccaccccccccatcccagcagctcagctaagccctgatgagaatgaagccacaggagttgtctgaggtgaacccagccgctcagccacacatggaagccattgcctttgcacatagttcttgggttctttttcctaaaaaggtaaggagctgaggtgtgtggttttttaatattaagaatatataatggaaaacacacgactgacgctcaggcatcttcccctactccccaacagatccccagaagacagcgtggaaggcagtgtagacagtaaatcgggcttcagttctatagccaagaagagatcagctgctgaaaccaccagtgggtaccccaggccacctgcctttgaacttggggatttgccatgtttgatcttgtcacatacttgcttttttacaagatgaactctttgtatttatgatttggggggcaatgaaaggtgcaatgcaggaactgctgctgccgagctcgctggtcacatgggggtgccaggcgggattctggaaaaccagtgcacttaaactgatcctgaagagagctgtcccagcactctggccaccaggagggccagattccccagaaactaccttttgcccaaagaacatgctcagtatttggggcatttcctcccacaaaccctgactgcttctgttacctcagggccttggtacctggatactgccacagaattggggcgggtgggggaggggcctatttttaaataaaataactgttcaaagttgggggttttttaaaaaattaagaaaaaggaaagctattctgtattgcaccttttcacaatttaatacattttcttacattttcctgtgattttcgaaactaaaccattgtgtgtcctgtagtgtcctggttgagctgccgctcagcagcttcctcggggggatttggaacacctgtgtctgtcgccgcactgcctgtgggaggggcccagagggctgctgggactggcgtctgtacacacttgtttggccttttctgtagttgatgctgtaaactctatggctttttaaaaacgatttcatgtttttatttagtattggaaatccaatacacttttttaatccaatcaaaaaaaaat

SEQ ID NO: 439575 - DNA, 5759 bp, Homo sapiens
gggccgggccgggctgggctggagcagcggcgccgcgggagccgagcttgcagcgagggaccggctgaggcgcgcgggagggaaggaggcaagggctccgcggcgctgtcgccgccgctgccgctcactctcggggaagagatggcggcggagcggggagcccggcgactcctcagcaccccctccttctggctctactgcctgctgctgctcgggcgccgggcgccgggcgccgcggccgccaggagcggctccgcgccgcagtccccaggagccagcattcgaacgttcactccattttattttctggtggagccggtggatacactctcagttagaggctcttctgttatattaaactgttcagcatattctgagccttctccaaaaattgaatggaaaaaagatggaacttttttaaacttagtatcagatgatcgacgccagcttctcccggatggatctttatttatcagcaatgtggtgcattccaaacacaataaacctgatgaaggttattatcagtgtgtggccactgttgagagtcttggaactattatcagtagaacagcgaagctcatagtagcaggtcttccaagatttaccagccaaccagaaccttcctcagtttatgctgggaacaatgcaattctgaattgtgaagttaatgcagatttggtcccatttgtgaggtgggaacagaacagacaaccccttcttctggatgatagagttatcaaacttccaagtggaatgctggttatcagcaatgcaactgaaggagatggcgggctttatcgctgcgtagtggaaagtggtgggccaccaaagtatagtgatgaagttgaattgaaggttcttccagatcctgaggtgatatcagacttggtatttttgaaacagccttctcccttagtcagagtcattggtcaggatgtagtgttgccatgtgttgcttcaggacttcctactccaaccattaaatggatgaaaaatgaggaggcacttgacacagaaagctctgaaagattggtattgctggcaggtggtagcctggagatcagtgatgttactgaggatgatgctgggacttatttttgtatagctgataatggaaatgagacaattgaagctcaagcagagcttacagtgcaagctcaacctgaattcctgaagcagcctactaatatatatgctcacgaatctatggatattgtatttgaatgtgaagtgactggaaaaccaactccaactgtgaagtgggtcaaaaatggggatatggttatcccaagtgattattttaagattgtaaaggaacataatcttcaagttttgggtctggtgaaatcagatgaagggttctatcagtgcattgctgaaaatgatgttggaaatgcacaagctggagcccaactgataatccttgaacatgcaccagccacaacgggaccactgccttcagctcctcgggatgtcgtggcctccctggtctctacccgcttcatcaaattgacgtggcggacacctgcatcagatcctcacggagacaaccttacctactctgtgttctacaccaaggaagggattgctagggaacgtgttgagaataccagtcacccaggagagatgcaagtaaccattcaaaacctaatgccagcgaccgtgtacatctttagagttatggctcaaaataagcatggctcaggagagagttcagctccactgcgagtagaaacacaacctgaggttcagctccctggcccagcacctaaccttcgtgcatatgcagcttcgcctacctccatcactgttacgtgggaaacaccagtgtctggcaatggggaaattcagaattataagttgtactacatggaaaaggggactgataaagaacaggatgttgatgtttcaagtcactcttacaccattaatgggttgaaaaaatatacagagtatagtttccgagtggtggcctacaataaacatggtcctggagtttccacaccagatgttgctgttcgaacattgtcagatgttcccagtgctgctcctcagaatctgtccttggaagtgagaaattcaaagagtattatgattcactggcagccacctgctccagccacacaaaatgggcagattactggctacaagattcgctaccgaaaggcctcccgaaagagtgatgtcactgagaccttggtaagcgggacacagctgtctcagctgattgaaggtcttgatcgggggactgagtataatttccgagtggctgctctaacaatcaatggtacaggcccggcaactgactggctgtctgctgaaacttttgaaagtgacctagatgaaactcgtgttcctgaagtgcctagctctcttcacgtacgcccgctcgttactagcatcgtagtgagctggactcctccagagaatcagaacattgtggtcagaggttacgccattggttatggcattggcagccctcatgcccagaccatcaaagtggactataaacagcgctattacaccattgaaaatctggatcccagctctcactatgtgattaccctgaaagcatttaataacgtgggtgaaggcatccccctgtatgagagtgctgtgaccaggcctcacacagacacttctgaagttgatttatttgttattaatgctccatacactccagtgccagatcccactcccatgatgccaccagtgggagttcaggcttccattctgagtcatgacaccatcaggattacgtgggcagacaactcgctgcccaagcaccagaagattacagactcccgatactacaccgtccgatggaaaaccaacatcccagcaaacaccaagtacaagaatgcaaatgcaaccactttgagttatttggtgactggtttaaagccgaatacactctatgaattctctgtgatggtgaccaaaggtcgaagatcaagtacatggagtatgacagcccatgggaccacctttgaattagttccgacttctccacccaaggatgtgactgttgtgagtaaagaggggaaacctaagaccataattgtgaattggcagcctccctctgaagccaatggcaaaattacaggttacatcatatattacagtacagatgtgaatgcagagatacatgactgggttattgagcctgttgtgggaaacagactgactcaccagatacaagagttaactcttgacacaccatactacttcaaaatccaggcacggaactcaaagggcatgggacccatgtctgaagctgtccaattcagaacacctaaagcggactcctctgataaaatgcctaatgatcaagcctcagggtctggagggaaaggaagccggctgccagacctaggatccgactacaaacctccaatgagcggcagtaacagccctcatgggagccccacctctcctctggacagtaatatgctgctggtcataattgtttctgttggcgtcatcaccatcgtggtggttgtgattatcgctgtcttttgtacccgtcgtaccacctctcaccagaaaaagaaacgagctgcctgcaaatcagtgaatggctctcataagtacaaagggaattccaaagatgtgaaacctccagatctctggatccatcatgagagactggagctgaaacccattgataagtctccagacccaaaccccatcatgactgatactccaattcctcgcaactctcaagatatcacaccagttgacaactccatggacagcaatatccatcaaaggcgaaattcatacagagggcatgagtcagaggacagcatgtctacactggctggaaggcgaggaatgagaccaaaaatgatgatgccctttgactcccagccaccccagcctgtgattagtgcccatcccatccattccctcgataaccctcaccatcatttccactccagcagcctcgcttctccagctcgcagtcatctctaccacccgggcagcccatggcccattggcacatccatgtccctttcagacagggccaattccacagaatccgttcgaaatacccccagcactgacaccatgccagcctcttcgtctcaaacatgctgcactgatcaccaggaccctgaaggtgctaccagctcctcttacttggccagctcccaagaggaagattcaggccagagtcttcccactgcccatgttcgcccttcccacccattgaagagcttcgccgtgccagcaatcccgcctccaggacctcccacctatgatcctgcattgccaagcacaccattactgtcccagcaagctctgaaccatcacattcactcagtgaagacagcctccatcgggactctaggaaggagccggcctcctatgccagtggttgttcccagtgcccctgaagtgcaggagaccacaaggatgttggaagactccgagagtagctatgaaccagatgagctgaccaaagagatggcccacctggaaggactaatgaaggacctaaacgctatcacaacagcatgacgaccttcaccaggacctgacttcaaacctgagtctggaagtcttggaacttacccttgaaaacaaggaattgtacagagtacgagaggacagcacttgagaacacagaatgagccagcagactggccagcgcctctgtgtagggctggctccaggcatggccacctgccttcccctggtcagcctggaagaagcctgtgtcgaggcagcttccctttgcctgctgatattctgcaggactgggcaccatgggccaaaattttgtgtccagggaagaggcgagaagtgcaacctgcatttcactttgtggtcaggccgtgtctttgtgctgtgactgcatcacctttatggagtgtagacattggcatttatgtacaattttatttgtgtcttattttattttaccttcaaaaacaaaaacgccatccaaaaccaaggaagtccttggtgttctccacaagtggttgacatttgactgcttgttccaattatgtatggaaagtctttgacagtgtgggtcgttcctggggttggcttgttttttggtttcatttttattttttaattctgagtcattgcatcctctaccagctgttaatccatcactctgagggggaggaaatgttgcattgctgtttgtaagctttttttattatttttttattataattattaaaggcctgactctttcctctcatcactgtgagattacagatctatttgaattgaatgaaatgtaacattgaaaagacttgtttgttgctttctgtgcagtttcagtattggggcgggtggggggctgggggttggtaataggaaatggaggggctgctgaggtcctgtgaatgtttctgtcattgtactttcttccagaagcctgcagagaatggaagcatcttctttattgtcctttcctggcatgtccatctcacaatttaatacattttcttacattttcctgtgattttcgaaactaaaccattgtgtgtcctgtagtgtcctggttgagctgccgctcagcagcttcctcggggggatttggaacacctgtgtctgtcgccgcactgcctgtgggaggggcccagagggctgctgggactggcgtctgtacacacttgtttggccttttctgtagttgatgctgtaaactctatggctttttaaaaacgatttcatgtttttatttagtattggaaatccaatacacttttttaatccaatcaaaaaaaaat

SEQ ID NO: 439576 - DNA, 5082 bp, Homo sapiens
gggccgggccgggctgggctggagcagcggcgccgcgggagccgagcttgcagcgagggaccggctgaggcgcgcgggagggaaggaggcaagggctccgcggcgctgtcgccgccgctgccgctcactctcggggaagagatggcggcggagcggggagcccggcgactcctcagcaccccctccttctggctctactgcctgctgctgctcgggcgccgggcgccgggcgccgcggccgccaggagcggctccgcgccgcagtccccaggagccagcattcgaacgttcactccattttattttctggtggagccggtggatacactctcagttagaggctcttctgttatattaaactgttcagcatattctgagccttctccaaaaattgaatggaaaaaagatggaacttttttaaacttagtatcagatgatcgacgccagcttctcccggatggatctttatttatcagcaatgtggtgcattccaaacacaataaacctgatgaaggttattatcagtgtgtggccactgttgagagtcttggaactattatcagtagaacagcgaagctcatagtagcaggtcttccaagatttaccagccaaccagaaccttcctcagtttatgctgggaacaatgcaattctgaattgtgaagttaatgcagatttggtcccatttgtgaggtgggaacagaacagacaaccccttcttctggatgatagagttatcaaacttccaagtggaatgctggttatcagcaatgcaactgaaggagatggcgggctttatcgctgcgtagtggaaagtggtgggccaccaaagtatagtgatgaagttgaattgaaggttcttccagatcctgaggtgatatcagacttggtatttttgaaacagccttctcccttagtcagagtcattggtcaggatgtagtgttgccatgtgttgcttcaggacttcctactccaaccattaaatggatgaaaaatgaggaggcacttgacacagaaagctctgaaagattggtattgctggcaggtggtagcctggagatcagtgatgttactgaggatgatgctgggacttatttttgtatagctgataatggaaatgagacaattgaagctcaagcagagcttacagtgcaagctcaacctgaattcctgaagcagcctactaatatatatgctcacgaatctatggatattgtatttgaatgtgaagtgactggaaaaccaactccaactgtgaagtgggtcaaaaatggggatatggttatcccaagtgattattttaagattgtaaaggaacataatcttcaagttttgggtctggtgaaatcagatgaagggttctatcagtgcattgctgaaaatgatgttggaaatgcacaagctggagcccaactgataatccttgaacatgcaccagccacaacgggaccactgccttcagctcctcgggatgtcgtggcctccctggtctctacccgcttcatcaaattgacgtggcggacacctgcatcagatcctcacggagacaaccttacctactctgtgttctacaccaaggaagggattgctagggaacgtgttgagaataccagtcacccaggagagatgcaagtaaccattcaaaacctaatgccagcgaccgtgtacatctttagagttatggctcaaaataagcatggctcaggagagagttcagctccactgcgagtagaaacacaacctgaggttcagctccctggcccagcacctaaccttcgtgcatatgcagcttcgcctacctccatcactgttacgtgggaaacaccagtgtctggcaatggggaaattcagaattataagttgtactacatggaaaaggggactgataaagaacaggatgttgatgtttcaagtcactcttacaccattaatgggttgaaaaaatatacagagtatagtttccgagtggtggcctacaataaacatggtcctggagtttccacaccagatgttgctgttcgaacattgtcagatgttcccagtgctgctcctcagaatctgtccttggaagtgagaaattcaaagagtattatgattcactggcagccacctgctccagccacacaaaatgggcagattactggctacaagattcgctaccgaaaggcctcccgaaagagtgatgtcactgagaccttggtaagcgggacacagctgtctcagctgattgaaggtcttgatcgggggactgagtataatttccgagtggctgctctaacaatcaatggtacaggcccggcaactgactggctgtctgctgaaacttttgaaagtgacctagatgaaactcgtgttcctgaagtgcctagctctcttcacgtacgcccgctcgttactagcatcgtagtgagctggactcctccagagaatcagaacattgtggtcagaggttacgccattggttatggcattggcagccctcatgcccagaccatcaaagtggactataaacagcgctattacaccattgaaaatctggatcccagctctcactatgtgattaccctgaaagcatttaataacgtgggtgaaggcatccccctgtatgagagtgctgtgaccaggcctcacacagacacttctgaagttgatttatttgttattaatgctccatacactccagtgccagatcccactcccatgatgccaccagtgggagttcaggcttccattctgagtcatgacaccatcaggattacgtgggcagacaactcgctgcccaagcaccagaagattacagactcccgatactacaccgtccgatggaaaaccaacatcccagcaaacaccaagtacaagaatgcaaatgcaaccactttgagttatttggtgactggtttaaagccgaatacactctatgaattctctgtgatggtgaccaaaggtcgaagatcaagtacatggagtatgacagcccatgggaccacctttgaattagttccgacttctccacccaaggatgtgactgttgtgagtaaagaggggaaacctaagaccataattgtgaattggcagcctccctctgaagccaatggcaaaattacaggttacatcatatattacagtacagatgtgaatgcagagatacatgactgggttattgagcctgttgtgggaaacagactgactcaccagatacaagagttaactcttgacacaccatactacttcaaaatccaggcacggaactcaaagggcatgggacccatgtctgaagctgtccaattcagaacacctaaagcggactcctctgataaaatgcctaatgatcaagcctcagggtctggagggaaaggaagccggctgccagacctaggatccgactacaaacctccaatgagcggcagtaacagccctcatgggagccccacctctcctctggacagtaatatgctgctggtcataattgtttctgttggcgtcatcaccatcgtggtggttgtgattatcgctgtcttttgtacccgtcgtaccacctctcaccagaaaaagaaacgagctgcctgcaaatcagtgaatggctctcataagtacaaagggaattccaaagatgtgaaacctccagatctctggatccatcatgagagactggagctgaaacccattgataagtctccagacccaaaccccatcatgactgatactccaattcctcgcaactctcaagatatcacaccagttgacaactccatggacagcaatatccatcaaaggcgaaattcatacagagggcatgagtcagaggacagcatgtctacactggctggaaggcgaggaatgagaccaaaaatgatgatgccctttgactcccagccaccccagcctgtgattagtgcccatcccatccattccctcgataaccctcaccatcatttccactccagcagcctcgcttctccagctcgcagtcatctctaccacccgggcagcccatggcccattggcacatccatgtccctttcagacagggccaattccacagaatccgttcgaaatacccccagcactgacaccatgccagcctcttcgtctcaaacatgctgcactgatcaccaggaccctgaaggtgctaccagctcctcttacttggccagctcccaagaggaagattcaggccagagtcttcccactgcccatgttcgcccttcccacccattgaagagcttcgccgtgccagcaatcccgcctccaggacctcccacctatgatcctgcattgccaagcacaccattactgtcccagcaagctctgaaccatcacattcactcagtgaagacagcctccatcgggactctaggaaggagccggcctcctatgccagtggttgttcccagtgcccctgaagtgcaggagaccacaaggatgttggaagactccgagagtagctatgaaccagatgagctgaccaaagagatggcccacctggaaggactaatgaaggacctaaacgctatcacaacagcatgacgaccttcaccaggacctgacttcaaacctgagtctggaagtcttggaacttacccttgaaaacaaggaattgtacagagtacgagaggacagcacttgagaacacagaatgagccagcagactggccagcgcctctgtgtagggctggctccaggcatggccacctgccttcccctggtcagcctggaagaagcctgtgtcgaggcagcttccctttgcctgctgatattctgcaggactgggcaccatgggccaaaattttgtgtccagggaagaggcgagaagtgcaacctgcatttcactttgtggtcaggccgtgtctttgtgctgtgactgcatcacctttatggagtgtagacattggcatttatgtacaattttatttgtgtcttattttattttaccttcaaaaacaaaaacgccatccaaaaccaaggaagtccttggtgttctccacaagtggttgacatttgactgcttgttccaattatgtatggaaagtctttgacagtgtgggtcgttcctgcctgagatgggatcctctagacgcccct

SEQ ID NO: 439577 - DNA, 4475 bp, Homo sapiens
  misc_feature (4404)..(4404): n is a, c, g, or t
  misc_feature (4424)..(4424): n is a, c, g, or t
  misc_feature (4444)..(4444): n is a, c, g, or t
gggccgggccgggctgggctggagcagcggcgccgcgggagccgagcttgcagcgagggaccggctgaggcgcgcgggagggaaggaggcaagggctccgcggcgctgtcgccgccgctgccgctcactctcggggaagagatggcggcggagcggggagcccggcgactcctcagcaccccctccttctggctctactgcctgctgctgctcgggcgccgggcgccgggcgccgcggccgccaggagcggctccgcgccgcagtccccaggagccagcattcgaacgttcactccattttattttctggtggagccggtggatacactctcagttagaggctcttctgttatattaaactgttcagcatattctgagccttctccaaaaattgaatggaaaaaagatggaacttttttaaacttagtatcagatgatcgacgccagcttctcccggatggatctttatttatcagcaatgtggtgcattccaaacacaataaacctgatgaaggttattatcagtgtgtggccactgttgagagtcttggaactattatcagtagaacagcgaagctcatagtagcaggtcttccaagatttaccagccaaccagaaccttcctcagtttatgctgggaacaatgcaattctgaattgtgaagttaatgcagatttggtcccatttgtgaggtgggaacagaacagacaaccccttcttctggatgatagagttatcaaacttccaagtggaatgctggttatcagcaatgcaactgaaggagatggcgggctttatcgctgcgtagtggaaagtggtgggccaccaaagtatagtgatgaagttgaattgaaggttcttccagatcctgaggtgatatcagacttggtatttttgaaacagccttctcccttagtcagagtcattggtcaggatgtagtgttgccatgtgttgcttcaggacttcctactccaaccattaaatggatgaaaaatgaggaggcacttgacacagaaagctctgaaagattggtattgctggcaggtggtagcctggagatcagtgatgttactgaggatgatgctgggacttatttttgtatagctgataatggaaatgagacaattgaagctcaagcagagcttacagtgcaagctcaacctgaattcctgaagcagcctactaatatatatgctcacgaatctatggatattgtatttgaatgtgaagtgactggaaaaccaactccaactgtgaagtgggtcaaaaatggggatatggttatcccaagtgattattttaagattgtaaaggaacataatcttcaagttttgggtctggtgaaatcagatgaagggttctatcagtgcattgctgaaaatgatgttggaaatgcacaagctggagcccaactgataatccttgaacatgcaccagccacaacgggaccactgccttcagctcctcgggatgtcgtggcctccctggtctctacccgcttcatcaaattgacgtggcggacacctgcatcagatcctcacggagacaaccttacctactctgtgttctacaccaaggaagggattgctagggaacgtgttgagaataccagtcacccaggagagatgcaagtaaccattcaaaacctaatgccagcgaccgtgtacatctttagagttatggctcaaaataagcatggctcaggagagagttcagctccactgcgagtagaaacacaacctgaggttcagctccctggcccagcacctaaccttcgtgcatatgcagcttcgcctacctccatcactgttacgtgggaaacaccagtgtctggcaatggggaaattcagaattataagttgtactacatggaaaaggggactgataaagaacaggatgttgatgtttcaagtcactcttacaccattaatgggttgaaaaaatatacagagtatagtttccgagtggtggcctacaataaacatggtcctggagtttccacaccagatgttgctgttcgaacattgtcagatgttcccagtgctgctcctcagaatctgtccttggaagtgagaaattcaaagagtattatgattcactggcagccacctgctccagccacacaaaatgggcagattactggctacaagattcgctaccgaaaggcctcccgaaagagtgatgtcactgagaccttggtaagcgggacacagctgtctcagctgattgaaggtcttgatcgggggactgagtataatttccgagtggctgctctaacaatcaatggtacaggcccggcaactgactggctgtctgctgaaacttttgaaagtgacctagatgaaactcgtgttcctgaagtgcctagctctcttcacgtacgcccgctcgttactagcatcgtagtgagctggactcctccagagaatcagaacattgtggtcagaggttacgccattggttatggcattggcagccctcatgcccagaccatcaaagtggactataaacagcgctattacaccattgaaaatctggatcccagctctcactatgtgattaccctgaaagcatttaataacgtgggtgaaggcatccccctgtatgagagtgctgtgaccaggcctcacacagtgccagatcccactcccatgatgccaccagtgggagttcaggcttccattctgagtcatgacaccatcaggattacgtgggcagacaactcgctgcccaagcaccagaagattacagactcccgatactacaccgtccgatggaaaaccaacatcccagcaaacaccaagtacaagaatgcaaatgcaaccactttgagttatttggtgactggtttaaagccgaatacactctatgaattctctgtgatggtgaccaaaggtcgaagatcaagtacatggagtatgacagcccatgggaccacctttgaattagttccgacttctccacccaaggatgtgactgttgtgagtaaagaggggaaacctaagaccataattgtgaattggcagcctccctctgaagccaatggcaaaattacaggttacatcatatattacagtacagatgtgaatgcagagatacatgactgggttattgagcctgttgtgggaaacagactgactcaccagatacaagagttaactcttgacacaccatactacttcaaaatccaggcacggaactcaaagggcatgggacccatgtctgaagctgtccaattcagaacacctaaagcctcagggtctggagggaaaggaagccggctgccagacctaggatccgactacaaacctccaatgagcggcagtaacagccctcatgggagccccacctctcctctggacagtaatatgctgctggtcataattgtttctgttggcgtcatcaccatcgtggtggttgtgattatcgctgtcttttgtacccgtcgtaccacctctcaccagaaaaagaaacgagctgcctgcaaatcagtgaatggctctcataagtacaaagggaattccaaagatgtgaaacctccagatctctggatccatcatgagagactggagctgaaacccattgataagtctccagacccaaaccccatcatgactgatactccaattcctcgcaactctcaagatatcacaccagttgacaactccatggacagcaatatccatcaaaggcgaaattcatacagagggcatgagtcagaggacagcatgtctacactggctggaaggcgaggaatgagaccaaaaatgatgatgccctttgactcccagccaccccagcctgtgattagtgcccatcccatccattccctcgataaccctcaccatcatttccactccagcagcctcgcttctccagctcgcagtcatctctaccacccgggcagcccatggcccattggcacatccatgtccctttcagacagggccaattccacagaatccgttcgaaatacccccagcactgacaccatgccagcctcttcgtctcaaacatgctgcactgatcaccaggaccctgaaggtgctaccagctcctcttacttggccagctcccaagaggaagattcaggccagagtcttcccactgcccatgttcgcccttcccacccattgaagagcttcgccgtgccagcaatcccgcctccaggacctcccacctatgatcctgcattgccaagcacaccattactgtcccagcaagctctgaaccatcacattcactcagtgaagacagcctccatcgggactctaggaaggagccggcctcctatgccagtggttgttcccagtgcccctgaagtgcaggagaccacaaggatgttggaagactccgagagtaggtattgaaccaggtgaggttgaccaaagagttgggccatngggggagggattaattgaangggaccttaaacgttttttnacaacagcttgacggacttttaacggggggc

SEQ ID NO: 439578 - DNA, 2690 bp, Homo sapiens
gggccgggccgggctgggctggagcagcggcgccgcgggagccgagcttgcagcgagggaccggctgaggcgcgcgggagggaaggaggcaagggctccgcggcgctgtcgccgccgctgccgctcactctcggggaagagatggcggcggagcggggagcccggcgactcctcagcaccccctccttctggctctactgcctgctgctgctcgggcgccgggcgccgggcgccgcggccgccaggagcggctccgcgccgcagtccccaggagccagcattcgaacgttcactccattttattttctggtggagccggtggatacactctcagttagaggctcttctgttatattaaactgttcagcatattctgagccttctccaaaaattgaatggaaaaaagatggaacttttttaaacttagtatcagatgatcgacgccagcttctcccggatggatctttatttatcagcaatgtggtgcattccaaacacaataaacctgatgaaggttattatcagtgtgtggccactgttgagagtcttggaactattatcagtagaacagcgaagctcatagtagcaggtcttccaagatttaccagccaaccagaaccttcctcagtttatgctgggaacaatgcaattctgaattgtgaagttaatgcagatttggtcccatttgtgaggtgggaacagaacagacaaccccttcttctggatgatagagttatcaaacttccaagtggaatgctggttatcagcaatgcaactgaaggagatggcgggctttatcgctgcgtagtggaaagtggtgggccaccaaagtatagtgatgaagttgaattgaaggttcttccagatcctgaggtgatatcagacttggtatttttgaaacagccttctcccttagtcagagtcattggtcaggatgtagtgttgccatgtgttgcttcaggacttcctactccaaccattaaatggatgaaaaatgaggaggcacttgacacagaaagctctgaaagattggtattgctggcaggtggtagcctggagatcagtgatgttactgaggatgatgctgggacttatttttgtatagctgataatggaaatgagacaattgaagctcaagcagagcttacagtgcaagctcaacctgaattcctgaagcagcctactaatatatatgctcacgaatctatggatattgtatttgaatgtgaagtgactggaaaaccaactccaactgtgaagtgggtcaaaaatggggatatggttatcccaagtgattattttaagattgtaaaggaacataatcttcaagttttgggtctggtgaaatcagatgaagggttctatcagtgcattgctgaaaatgatgttggaaatgcacaagctggagcccaactgataatccttgaacatgcaccagccacaacgggaccactgccttcagctcctcgggatgtcgtggcctccctggtctctacccgcttcatcaaattgacgtggcggacacctgcatcagatcctcacggagacaaccttacctactctgtgttctacaccaaggaagggattgctagggaacgtgttgagaataccagtcacccaggagagatgcaagtaaccattcaaaacctaatgccagcgaccgtgtacatctttagagttatggctcaaaataagcatggctcaggagagagttcagctccactgcgagtagaaacacaacctgaggttcagctccctggcccagcacctaaccttcgtgcatatgcagcttcgcctacctccatcactgttacgtgggaaacaccagtgtctggcaatggggaaattcagaattataagttgtactacatggaaaaggggactgataaagaacaggatgttgatgtttcaagtcactcttacaccattaatgggttgaaaaaatatacagagtatagtttccgagtggtggcctacaataaacatggtcctggagtttccacaccagatgttgctgttcgaacattgtcagatgttcccagtgctgctcctcagaatctgtccttggaagtgagaaattcaaagagtattatgattcactggcagccacctgctccagccacacaaaatgggcagattactggctacaagattcgctaccgaaaggcctcccgaaagagtgatgtcactgagaccttggtaagcgggacacagctgtctcagctgattgaaggtcttgatcgggggactgagtataatttccgagtggctgctctaacaatcaatggtacaggcccggcaactgactggctgtctgctgaaacttttgaaagtgacctagatgaaactcgtgttcctgaagtgcctagctctcttcacgtacgcccgctcgttactagcatcgtagtgagctggactcctccagagaatcagaacattgtggtcagaggttacgccattggttatggcattggcagccctcatgcccagaccatcaaagtggactataaacagcgctattacaccattgaaaatctggatcccagctctcactatgtgattaccctgaaagcatttaataacgtgggtgaaggcatccccctgtatgagagtgctgtgaccaggcctcacacagtgccagatcccactcccatgatgccacctatcacaccccatcctaaaaaaaaaaa

SEQ ID NO: 439579 - DNA, 1674 bp, Homo sapiens
gggccgggccgggctgggctggagcagcggcgccgcgggagccgagcttgcagcgagggaccggctgaggcgcgcgggagggaaggaggcaagggctccgcggcgctgtcgccgccgctgccgctcactctcggggaagagatggcggcggagcggggagcccggcgactcctcagcaccccctccttctggctctactgcctgctgctgctcgggcgccgggcgccgggcgccgcggccgccaggagcggctccgcgccgcagtccccaggagccagcattcgaacgttcactccattttattttctggtggagccggtggatacactctcagttagaggctcttctgttatattaaactgttcagcatattctgagccttctccaaaaattgaatggaaaaaagatggaacttttttaaacttagtatcagatgatcgacgccagcttctcccggatggatctttatttatcagcaatgtggtgcattccaaacacaataaacctgatgaaggttattatcagtgtgtggccactgttgagagtcttggaactattatcagtagaacagcgaagctcatagtagcaggtcttccaagatttaccagccaaccagaaccttcctcagtttatgctgggaacaatgcaattctgaattgtgaagttaatgcagatttggtcccatttgtgaggtgggaacagaacagacaaccccttcttctggatgatagagttatcaaacttccaagtggaatgctggttatcagcaatgcaactgaaggagatggcgggctttatcgctgcgtagtggaaagtggtgggccaccaaagtatagtgatgaagttgaattgaaggttcttccagatcctgaggtgatatcagacttggtatttttgaaacagccttctcccttagtcagagtcattggtcaggatgtagtgttgccatgtgttgcttcaggacttcctactccaaccattaaatggatgaaaaatgaggaggcacttgacacagaaagctctgaaagattggtattgctggcaggtggtagcctggagatcagtgatgttactgaggatgatgctgggacttatttttgtatagctgataatggaaatgagacaattgaagctcaagcagagcttacagtgcaagctcaacctgaattcctgaagcagcctactaatatatatgctcacgaatctatggatattgtatttgaatgtgaagtgactggaaaaccaactccaactgtgaagtgggtcaaaaatggggatatggttatcccaagtgattattttaagattgtaaaggaacataatcttcaagttttgggtctggtgaaatcagatgaagggttctatcagtgcattgctgaaaatgatgttggaaatgcacaagctggagcccaactgataatccttgaacatgatgttgccatcccaacattacctcccacttcactgaccagtgccactactgaccatctagcaccagccacaacgggaccactgccttcagctcctcgggatgtcgtggcctccctggtctctacccgcttcatcaaattgacgtggcggacacctgcatcagatcctcacggagacaaccttacctactctgtgttctacaccaaggaagggattgctaggtaagtgcctgtgtgtctgcag

SEQ ID NO: 439580 - DNA, 904 bp, Homo sapiens
gggccgggccgggctgggctggagcagcggcgccgcgggagccgagcttgcagcgagggaccggctgaggcgcgcgggagggaaggaggcaagggctccgcggcgctgtcgccgccgctgccgctcactctcggggaagagatggcggcggagcggggagcccggcgactcctcagcaccccctccttctggctctactgcctgctgctgctcgggcgccgggcgccgggcgccgcggccgccaggagcggctccgcgccgcagtccccaggagccagcattcgaacgttcactccattttattttctggtggagccggtggatacactctcagttagaggctcttctgttatattaaactgttcagcatattctgagccttctccaaaaattgaatggaaaaaagatggaacttttttaaacttagtatcagatgatcgacgccagcttctcccggatggatctttatttatcagcaatgtggtgcattccaaacacaataaacctgatgaaggttattatcagtgtgtggccactgttgagagtcttggaactattatcagtagaacagcgaagctcatagtagcaggtcttccaagatttaccagccaaccagaaccttcctcagtttatgctgggaacaatgcaattctgaattgtgaagttaatgcagatttggtcccatttgtgaggtgggaacagaacagacaaccccttcttctggatgatagagttatcaaacttccaagtggaatgctggttatcagcaatgcaactgaaggagatggcgggctttatcgctgcgtagtggaaagtggtgggccaccaaagtatagtgatgaagttgaattgaaggttcttccagatcctgaggtgatatcagaatggtaacacctgtgccgaa

SEQ ID NO: 439581 - DNA, 503 bp, Homo sapiens
ctggatgatagagttatcaaacttccaagtggaatgctggttatcagcaatgcaactgaaggagatggcgggctttatcgctgcgtagtggaaagtggtgggccaccaaagtatagtgatgaagttgaattgaaggttcttccaggtattaactcattatcaggactgatggttttatgtttatgaatgggtaaacattgttctgttagaatttttaaaaataatgaatgttggccgggcgcagtggctcacacctgtaatcccagcactttgggaggttgaagcgggtggatcacctgagttccagcctggccaacatggcgaaaccccatctctactaaaaatacaaaaattagccagacatggtggcaggcgcttataactccagctactctggaggctgaggaaggagaattacttgaacccgggaggtggagggtgcagtgagctgagattgtgccattgcactccagcctgggcgatagagcaagactccatctcaa

SEQ ID NO: 439582 - DNA, 5272 bp, Homo sapiens
gggccgggccgggctgggctggagcagcggcgccgcgggagccgagcttgcagcgagggaccggctgaggcgcgcgggagggaaggaggcaagggctccgcggcgctgtcgccgccgctgccgctcactctcggggaagagatggcggcggagcggggagcccggcgactcctcagcaccccctccttctggctctactgcctgctgctgctcgggcgccgggcgccgggcgccgcggccgccaggagcggctccgcgccgcagtccccaggagccagcattcgaacgttcactccattttattttctggtggagccggtggatacactctcagttagaggctcttctgttatattaaactgttcagcatattctgagccttctccaaaaattgaatggaaaaaagatggaacttttttaaacttagtatcagatgatcgacgccagcttctcccggatggatctttatttatcagcaatgtggtgcattccaaacacaataaacctgatgaaggttattatcagtgtgtggccactgttgagagtcttggaactattatcagtagaacagcgaagctcatagtagcaggtcttccaagatttaccagccaaccagaaccttcctcagtttatgctgggaacaatgcaattctgaattgtgaagttaatgcagatttggtcccatttgtgaggtgggaacagaacagacaaccccttcttctggatgatagagttatcaaacttccaagtggaatgctggttatcagcaatgcaactgaaggagatggcgggctttatcgctgcgtagtggaaagtggtgggccaccaaagtatagtgatgaagttgaattgaaggttcttccagatcctgaggtgatatcagacttggtatttttgaaacagccttctcccttagtcagagtcattggtcaggatgtagtgttgccatgtgttgcttcaggacttcctactccaaccattaaatggatgaaaaatgaggaggcacttgacacagaaagctctgaaagattggtattgctggcaggtggtagcctggagatcagtgatgttactgaggatgatgctgggacttatttttgtatagctgataatggaaatgagacaattgaagctcaagcagagcttacagtgcaagctcaacctgaattcctgaagcagcctactaatatatatgctcacgaatctatggatattgtatttgaatgtgaagtgactggaaaaccaactccaactgtgaagtgggtcaaaaatggggatatggttatcccaagtgattattttaagattgtaaaggaacataatcttcaagttttgggtctggtgaaatcagatgaagggttctatcagtgcattgctgaaaatgatgttggaaatgcacaagctggagcccaactgataatccttgaacatgcaccagccacaacgggaccactgccttcagctcctcgggatgtcgtggcctccctggtctctacccgcttcatcaaattgacgtggcggacacctgcatcagatcctcacggagacaaccttacctactctgtgttctacaccaaggaagggattgctagggaacgtgttgagaataccagtcacccaggagagatgcaagtaaccattcaaaacctaatgccagcgaccgtgtacatctttagagttatggctcaaaataagcatggctcaggagagagttcagctccactgcgagtagaaacacaacctgaggttcagctccctggcccagcacctaaccttcgtgcatatgcagcttcgcctacctccatcactgttacgtgggaaacaccagtgtctggcaatggggaaattcagaattataagttgtactacatggaaaaggggactgataaagaacaggatgttgatgtttcaagtcactcttacaccattaatgggttgaaaaaatatacagagtatagtttccgagtggtggcctacaataaacatggtcctggagtttccacaccagatgttgctgttcgaacattgtcagatgttcccagtgctgctcctcagaatctgtccttggaagtgagaaattcaaagagtattatgattcactggcagccacctgctccagccacacaaaatgggcagattactggctacaagattcgctaccgaaaggcctcccgaaagagtgatgtcactgagaccttggtaagcgggacacagctgtctcagctgattgaaggtcttgatcgggggactgagtataatttccgagtggctgctctaacaatcaatggtacaggcccggcaactgactggctgtctgctgaaacttttgaaagtgacctagatgaaactcgtgttcctgaagtgcctagctctcttcacgtacgcccgctcgttactagcatcgtagtgagctggactcctccagagaatcagaacattgtggtcagaggttacgccattggttatggcattggcagccctcatgcccagaccatcaaagtggactataaacagcgctattacaccattgaaaatctggatcccagctctcactatgtgattaccctgaaagcatttaataacgtgggtgaaggcatccccctgtatgagagtgctgtgaccaggcctcacacagacacttctgaagttgatttatttgttattaatgctccatacactccagtgccagatcccactcccatgatgccaccagtgggagttcaggcttccattctgagtcatgacaccatcaggattacgtgggcagacaactcgctgcccaagcaccagaagattacagactcccgatactacaccgtccgatggaaaaccaacatcccagcaaacaccaagtacaagaatgcaaatgcaaccactttgagttatttggtgactggtttaaagccgaatacactctatgaattctctgtgatggtgaccaaaggtcgaagatcaagtacatggagtatgacagcccatgggaccacctttgaattagttccgacttctccacccaaggatgtgactgttgtgagtaaagaggggaaacctaagaccataattgtgaattggcagcctccctctgaagccaatggcaaaattacaggttacatcatatattacagtacagatgtgaatgcagagatacatgactgggttattgagcctgttgtgggaaacagactgactcaccagatacaagagttaactcttgacacaccatactacttcaaaatccaggcacggaactcaaagggcatgggacccatgtctgaagctgtccaattcagaacacctaaagcggactcctctgataaaatgcctaatgatcaagcctcagggtctggagggaaaggaagccggctgccagacctaggatccgactacaaacctccaatgagcggcagtaacagccctcatgggagccccacctctcctctggacagtaatatgctgctggtcataattgtttctgttggcgtcatcaccatcgtggtggttgtgattatcgctgtcttttgtacccgtcgtaccacctctcaccagaaaaagaaacgagctgcctgcaaatcagtgaatggctctcataagtacaaagggaattccaaagatgtgaaacctccagatctctggatccatcatgagagactggagctgaaacccattgataagtctccagacccaaaccccatcatgactgatactccaattcctcgcaactctcaagatatcacaccagttgacaactccatggacagcaatatccatcaaaggcgaaattcatacagagggcatgagtcagaggacagcatgtctacactggctggaaggcgaggaatgagaccaaaaatgatgatgccctttgactcccagccaccccagcctgtgattagtgcccatcccatccattccctcgataaccctcaccatcatttccactccagcagcctcgcttctccagctcgcagtcatctctaccacccgggcagcccatggcccattggcacatccatgtccctttcagacagggccaattccacagaatccgttcgaaatacccccagcactgacaccatgccagcctcttcgtctcaaacatgctgcactgatcaccaggaccctgaaggtgctaccagctcctcttacttggccagctcccaagaggaagattcaggccagagtcttcccactgcccatgttcgcccttcccacccattgaagagcttcgccgtgccagcaatcccgcctccaggacctcccacctatgatcctgcattgccaagcacaccattactgtcccagcaagctctgaaccatcacattcactcagtgaagacagcctccatcgggactctaggaaggagccggcctcctatgccagtggttgttcccagtgcccctgaagtgcaggagaccacaaggatgttggaagactccgagagtagctatgaaccagatgagctgaccaaagagatggcccacctggaaggactaatgaaggacctaaacgctatcacaacagcatgacgaccttcaccaggacctgacttcaaacctgagtctggaagtcttggaacttacccttgaaaacaaggaattgtacagagtacgagaggacagcacttgagaacacagaatgagccagcagactggccagcgcctctgtgtagggctggctccaggcatggccacctgccttcccctggtcagcctggaagaagcctgtgtcgaggcagcttccctttgcctgctgatattctgcaggactgggcaccatgggccaaaattttgtgtccagggaagaggcgagaagtgcaacctgcatttcactttgtggtcaggccgtgtctttgtgctgtgactgcatcacctttatggagtgtagacattggcatttatgtacaattttatttgtgtcttattttattttaccttcaaaaacaaaaacgccatccaaaaccaaggaagtccttggtgttctccacaagtggttgacatttgactgcttgttccaattatgtatggaaagtctttgacagtgtgggtcgttcctggggttggcttgttttttggtttcatttttattttttaattctgagtcattgcatcctctaccagctgttaatccatcactctgagggggaggaaatgttgcattgctgtttgtaagctttttttattatttttttattataattattaaaggcctgactctttcctctcatcactgtgagattacagatctatttgaattgaatgaaatgtaacattg

SEQ ID NO: 439583 - DNA, 7043 bp, Homo sapiens
gggccgggccgggctgggctggagcagcggcgccgcgggagccgagcttgcagcgagggaccggctgaggcgcgcgggagggaaggaggcaagggctccgcggcgctgtcgccgccgctgccgctcactctcggggaagagatggcggcggagcggggagcccggcgactcctcagcaccccctccttctggctctactgcctgctgctgctcgggcgccgggcgccgggcgccgcggccgccaggagcggctccgcgccgcagtccccaggagccagcattcgaacgttcactccattttattttctggtggagccggtggatacactctcagttagaggctcttctgttatattaaactgttcagcatattctgagccttctccaaaaattgaatggaaaaaagatggaacttttttaaacttagtatcagatgatcgacgccagcttctcccggatggatctttatttatcagcaatgtggtgcattccaaacacaataaacctgatgaaggttattatcagtgtgtggccactgttgagagtcttggaactattatcagtagaacagcgaagctcatagtagcaggtcttccaagatttaccagccaaccagaaccttcctcagtttatgctgggaacaatgcaattctgaattgtgaagttaatgcagatttggtcccatttgtgaggtgggaacagaacagacaaccccttcttctggatgatagagttatcaaacttccaagtggaatgctggttatcagcaatgcaactgaaggagatggcgggctttatcgctgcgtagtggaaagtggtgggccaccaaagtatagtgatgaagttgaattgaaggttcttccagatcctgaggtgatatcagacttggtatttttgaaacagccttctcccttagtcagagtcattggtcaggatgtagtgttgccatgtgttgcttcaggacttcctactccaaccattaaatggatgaaaaatgaggaggcacttgacacagaaagctctgaaagattggtattgctggcaggtggtagcctggagatcagtgatgttactgaggatgatgctgggacttatttttgtatagctgataatggaaatgagacaattgaagctcaagcagagcttacagtgcaagctcaacctgaattcctgaagcagcctactaatatatatgctcacgaatctatggatattgtatttgaatgtgaagtgactggaaaaccaactccaactgtgaagtgggtcaaaaatggggatatggttatcccaagtgattattttaagattgtaaaggaacataatcttcaagttttgggtctggtgaaatcagatgaagggttctatcagtgcattgctgaaaatgatgttggaaatgcacaagctggagcccaactgataatccttgaacatgcaccagccacaacgggaccactgccttcagctcctcgggatgtcgtggcctccctggtctctacccgcttcatcaaattgacgtggcggacacctgcatcagatcctcacggagacaaccttacctactctgtgttctacaccaaggaagggattgctagggaacgtgttgagaataccagtcacccaggagagatgcaagtaaccattcaaaacctaatgccagcgaccgtgtacatctttagagttatggctcaaaataagcatggctcaggagagagttcagctccactgcgagtagaaacacaacctgaggttcagctccctggcccagcacctaaccttcgtgcatatgcagcttcgcctacctccatcactgttacgtgggaaacaccagtgtctggcaatggggaaattcagaattataagttgtactacatggaaaaggggactgataaagaacaggatgttgatgtttcaagtcactcttacaccattaatgggttgaaaaaatatacagagtatagtttccgagtggtggcctacaataaacatggtcctggagtttccacaccagatgttgctgttcgaacattgtcagatgttcccagtgctgctcctcagaatctgtccttggaagtgagaaattcaaagagtattatgattcactggcagccacctgctccagccacacaaaatgggcagattactggctacaagattcgctaccgaaaggcctcccgaaagagtgatgtcactgagaccttggtaagcgggacacagctgtctcagctgattgaaggtcttgatcgggggactgagtataatttccgagtggctgctctaacaatcaatggtacaggcccggcaactgactggctgtctgctgaaacttttgaaagtgacctagatgaaactcgtgttcctgaagtgcctagctctcttcacgtacgcccgctcgttactagcatcgtagtgagctggactcctccagagaatcagaacattgtggtcagaggttacgccattggttatggcattggcagccctcatgcccagaccatcaaagtggactataaacagcgctattacaccattgaaaatctggatcccagctctcactatgtgattaccctgaaagcatttaataacgtgggtgaaggcatccccctgtatgagagtgctgtgaccaggcctcacacagacacttctgaagttgatttatttgttattaatgctccatacactccagtgccagatcccactcccatgatgccaccagtgggagttcaggcttccattctgagtcatgacaccatcaggattacgtgggcagacaactcgctgcccaagcaccagaagattacagactcccgatactacaccgtccgatggaaaaccaacatcccagcaaacaccaagtacaagaatgcaaatgcaaccactttgagttatttggtgactggtttaaagccgaatacactctatgaattctctgtgatggtgaccaaaggtcgaagatcaagtacatggagtatgacagcccatgggaccacctttgaattagttccgacttctccacccaaggatgtgactgttgtgagtaaagaggggaaacctaagaccataattgtgaattggcagcctccctctgaagccaatggcaaaattacaggttacatcatatattacagtacagatgtgaatgcagagatacatgactgggttattgagcctgttgtgggaaacagactgactcaccagatacaagagttaactcttgacacaccatactacttcaaaatccaggcacggaactcaaagggcatgggacccatgtctgaagctgtccaattcagaacacctaaagcggactcctctgataaaatgcctaatgatcaagcctcagggtctggagggaaaggaagccggctgccagacctaggatccgactacaaacctccaatgagcggcagtaacagccctcatgggagccccacctctcctctggacagtaatatgctgctggtcataattgtttctgttggcgtcatcaccatcgtggtggttgtgattatcgctgtcttttgtacccgtcgtaccacctctcaccagaaaaagaaacgagctgcctgcaaatcagtgaatggctctcataagtacaaagggaattccaaagatgtgaaacctccagatctctggatccatcatgagagactggagctgaaacccattgataagtctccagacccaaaccccatcatgactgatactccaattcctcgcaactctcaagatatcacaccagttgacaactccatggacagcaatatccatcaaaggcgaaattcatacagagggcatgagtcagaggacagcatgtctacactggctggaaggcgaggaatgagaccaaaaatgatgatgccctttgactcccagccaccccagcctgtgattagtgcccatcccatccattccctcgataaccctcaccatcatttccactccagcagcctcgcttctccagctcgcagtcatctctaccacccgggcagcccatggcccattggcacatccatgtccctttcagacagggccaattccacagaatccgttcgaaatacccccagcactgacaccatgccagcctcttcgtctcaaacatgctgcactgatcaccaggaccctgaaggtgctaccagctcctcttacttggccagctcccaagaggaagattcaggccagagtcttcccactgcccatgttcgcccttcccacccattgaagagcttcgccgtgccagcaatcccgcctccaggacctcccacctatgatcctgcattgccaagcacaccattactgtcccagcaagctctgaaccatcacattcactcagtgaagacagcctccatcgggactctaggaaggagccggcctcctatgccagtggttgttcccagtgcccctgaagtgcaggagaccacaaggatgttggaagactccgagagtagctatgaaccagatgagctgaccaaagagatggcccacctggaaggactaatgaaggacctaaacgctatcacaacagcatgacgaccttcaccaggacctgacttcaaacctgagtctggaagtcttggaacttacccttgaaaacaaggaattgtacagagtacgagaggacagcacttgagaacacagaatgagccagcagactggccagcgcctctgtgtagggctggctccaggcatggccacctgccttcccctggtcagcctggaagaagcctgtgtcgaggcagcttccctttgcctgctgatattctgcaggactgggcaccatgggccaaaattttgtgtccagggaagaggcgagaagtgcaacctgcatttcactttgtggtcaggccgtgtctttgtgctgtgactgcatcacctttatggagtgtagacattggcatttatgtacaattttatttgtgtcttattttattttaccttcaaaaacaaaaacgccatccaaaaccaaggaagtccttggtgttctccacaagtggttgacatttgactgcttgttccaattatgtatggaaagtctttgacagtgtgggtcgttcctggggttggcttgttttttggtttcatttttattttttaattctgagtcattgcatcctctaccagctgttaatccatcactctgagggggaggaaatgttgcattgctgtttgtaagctttttttattatttttttattataattattaaaggcctgactctttcctctcatcactgtgagattacagatctatttgaattgaatgaaatgtaacattgaaaagacttgtttgttgctttctgtgcagtttcagtattggggcgggtggggggctgggggttggtaataggaaatggaggggctgctgaggtcctgtgaatgtttctgtcattgtactttcttccagaagcctgcagagaatggaagcatcttctttattgtcctttcctggcatgtccatccttattgtcactacgttgcaactggagtttgatttggatctggttttaaaattcttctgtgcaatagatgggtttgaggatttagcggccctgatgtcttggtcatagcctggtaagaatgtccatgctgaggagccagatgttgtatttctaactgcctgagtcacacagaatagggtaagagcctgaccccattctgtaaatcagaaagcaaggatggagaccctttcctgctgctattattggctctctttgaggaagttggaggttaaggaaggaacttgtttgtttccgtatacgactccttcttctctctagttcagtcttcagccagtccagcgctctcttccacacttcagagccccttcagagaaagcattagcaggaatgagacaaggcagagctgcagtgccccctgaggcttccacacatctttctgaatattatttttcaagtaacaagggcagggacagcggaaacagctgcccaccccccccatcccagcagctcagctaagccctgatgagaatgaagccacaggagttgtctgaggtgaacccagccgctcagccacacatggaagccattgcctttgcacatagttcttgggttctttttcctaaaaaggtaaggagctgaggtgtgtggttttttaatattaagaatatataatggaaaacacacgactgacgctcaggcatcttcccctactccccaacagatccccagaagacagcgtggaaggcagtgtagacagtaaatcgggcttcagttctatagccaagaagagatcagctgctgaaaccaccagtgggtaccccaggccacctgcctttgaacttggggatttgccatgtttgatcttgtcacatacttgcttttttacaagatgaactctttgtatttatgatttggggggcaatgaaaggtgcaatgcaggaactgctgctgccgagctcgctggtcacatgggggtgccaggcgggattctggaaaaccagtgcacttaaactgatcctgaagagagctgtcccagcactctggccaccaggagggccagattccccagaaactaccttttgcccaaagaacatgctcagtatttggggcatttcctcccacaaaccctgactgcttctgttacctcagggccttggtacctggatactgccacagaattggggcgggtgggggaggggcctatttttaaataaaataactgttcaaagttgggggttttttaaaaaattaagaaaaaggaaagctattctgtattgcaccttttcacaatttaatacattttcttacattttcctgtgattttcgaaactaaaccattgtgtgtcctgtagtgtcctggttgagctgccgctcagcagcttcctcggggggatttggaacacctgtgtctgtcgccgcactgcctgtgggaggggcccagagggctgctgggactggcgtctgtacacacttgtttggccttttctgtagttgatgctgtaaactctatggctttttaaaaacgatttcatgtttttatttagtattggaaatccaatacacttttttaatccaatcaaaaaaaaat

SEQ ID NO: 439584 - DNA, 3321 bp, Homo sapiens
ggactggtaccgccccggatttatgggctggacagcaatatccatcaaaggcgaaacttcatacagagggcatgagtcagaggacagcatgtctacactggctggaaggcgaggaatgagaccaaaaatgatgatgccctttgactcccagccaccccagcctgtgattagtgcccatcccatccattccctcgataaccctcaccatcatttccactccagcagcctcgcttctccagctcgcagtcatctctaccacccgggcagcccatggcccattggcacatccatgtccctttcagacagggccaattccacagaatccgttcgaaatacccccagcactgacaccatgccagcctcttcgtctcaaacatgctgcactgatcaccaggaccctgaaggtgctaccagctcctcttacttggccagctcccaagaggaagattcaggccagagtcttcccactgcccatgttcgcccttcccacccattgaagagcttcgccgtgccagcaatcccgcctccaggacctcccacctatgatcctgcattgccaagcacaccattactgtcccagcaagctctgaaccatcacattcactcagtgaagacagcctccatcgggactctaggaaggagccggcctcctatgccagtggttgttcccagtgcccctgaagtgcaggagaccacaaggatgttggaagactccgagagtagctatgaaccagatgagctgaccaaagagatggcccacctggaaggactaatgaaggacctaaacgctatcacaacagcatgacgaccttcaccaggacctgacttcaaacctgagtctggaagtcttggaacttacccttgaaaacaaggaattgtacagagtacgagaggacagcacttgagaacacagaatgagccagcagactggccagcgcctctgtgtagggctggctccaggcatggccacctgccttcccctggtcagcctggaagaagcctgtgtcgaggcagcttccctttgcctgctgatattctgcaggactgggcaccatgggccaaaattttgtgtccagggaagaggcgagaagtgcaacctgcatttcactttgtggtcaggccgtgtctttgtgctgtgactgcatcacctttatggagtgtagacattggcatttatgtacaattttatttgtgtcttattttattttaccttcaaaaacaaaaacgccatccaaaaccaaggaagtccttggtgttctccacaagtggttgacatttgactgcttgttccaattatgtatggaaagtctttgacagtgtgggtcgttcctggggttggcttgttttttggtttcatttttattttttaattctgagtcattgcatcctctaccagctgttaatccatcactctgagggggaggaaatgttgcattgctgtttgtaagctttttttattatttttttattataattattaaaggcctgactctttcctctcatcactgtgagattacagatctatttgaattgaatgaaatgtaacattgaaaagacttgtttgttgctttctgtgcagtttcagtattggggcgggtggggggctgggggttggtaataggaaatggaggggctgctgaggtcctgtgaatgtttctgtcattgtactttcttccagaagcctgcagagaatggaagcatcttctttattgtcctttcctggcatgtccatccttattgtcactacgttgcaactggagtttgatttggatctggttttaaaattcttctgtgcaatagatgggtttgaggatttagcggccctgatgtcttggtcatagcctggtaagaatgtccatgctgaggagccagatgttgtatttctaactgcctgagtcacacagaatagggtaagagcctgaccccattctgtaaatcagaaagcaaggatggagaccctttcctgctgctattattggctctctttgaggaagttggaggttaaggaaggaacttgtttgtttccgtatacgactccttcttctctctagttcagtcttcagccagtccagcgctctcttccacacttcagagccccttcagagaaagcattagcaggaatgagacaaggcagagctgcagtgccccctgaggcttccacacatctttctgaatattatttttcaagtaacaagggcagggacagcggaaacagctgcccaccccccccatcccagcagctcagctaagccctgatgagaatgaagccacaggagttgtctgaggtgaacccagccgctcagccacacatggaagccattgcctttgcacatagttcttgggttctttttcctaaaaaggtaaggagctgaggtgtgtggttttttaatattaagaatatataatggaaaacacacgactgacgctcaggcatcttcccctactccccaacagatccccagaagacagcgtggaaggcagtgtagacagtaaatcgggcttcagttctatagccaagaagagatcagctgctgaaaccaccagtgggtaccccaggccacctgcctttgaacttggggatttgccatgtttgatcttgtcacatacttgcttttttacaagatgaactctttgtatttatgatttggggggcaatgaaaggtgcaatgcaggaactgctgctgccgagctcgctggtcacatgggggtgccaggcgggattctggaaaaccagtgcacttaaactgatcctgaagagagctgtcccagcactctggccaccaggagggccagattccccagaaactaccttttgcccaaagaacatgctcagtatttggggcatttcctcccacaaaccctgactgcttctgttacctcagggccttggtacctggatactgccacagaattggggcgggtgggggaggggcctatttttaaataaaataactgttcaaagttgggggttttttaaaaaattaagaaaaaggaaagctattctgtattgcaccttttcacaatttaatacattttcttacattttcctgtgattttcgaaactaaaccattgtgtgtcctgtagtgtcctggttgagctgccgctcagcagcttcctcggggggatttggaacacctgtgtctgtcgccgcactgcctgtgggaggggcccagagggctgctgggactggcgtctgtacacacttgtttggccttttctgtagttgatgctgtaaactctatggctttttaaaaacgatttcatgtttttatttagtattggaaatccaatacacttttttaatccaatcaaaaaaaaat

SEQ ID NO: 439585 - DNA, 6844 bp, Homo sapiens
gggccgggccgggctgggctggagcagcggcgccgcgggagccgagcttgcagcgagggaccggctgaggcgcgcgggagggaaggaggcaagggctccgcggcgctgtcgccgccgctgccgctcactctcggggaagagatggcggcggagcggggagcccggcgactcctcagcaccccctccttctggctctactgcctgctgctgctcgggcgccgggcgccgggcgccgcggccgccaggagcggctccgcgccgcagtccccaggagccagcattcgaacgttcactccattttattttctggtggagccggtggatacactctcagttagaggctcttctgttatattaaactgttcagcatattctgagccttctccaaaaattgaatggaaaaaagatggaacttttttaaacttagtatcagatgatcgacgccagcttctcccggatggatctttatttatcagcaatgtggtgcattccaaacacaataaacctgatgaaggttattatcagtgtgtggccactgttgagagtcttggaactattatcagtagaacagcgaagctcatagtagcaggtcttccaagatttaccagccaaccagaaccttcctcagtttatgctgggaacaatgcaattctgaattgtgaagttaatgcagatttggtcccatttgtgaggtgggaacagaacagacaaccccttcttctggatgatagagttatcaaacttccaagtggaatgctggttatcagcaatgcaactgaaggagatggcgggctttatcgctgcgtagtggaaagtggtgggccaccaaagtatagtgatgaagttgaattgaaggttcttccagatcctgaggtgatatcagacttggtatttttgaaacagccttctcccttagtcagagtcattggtcaggatgtagtgttgccatgtgttgcttcaggacttcctactccaaccattaaatggatgaaaaatgaggaggcacttgacacagaaagctctgaaagattggtattgctggcaggtggtagcctggagatcagtgatgttactgaggatgatgctgggacttatttttgtatagctgataatggaaatgagacaattgaagctcaagcagagcttacagtgcaagctcaacctgaattcctgaagcagcctactaatatatatgctcacgaatctatggatattgtatttgaatgtgaagtgactggaaaaccaactccaactgtgaagtgggtcaaaaatggggatatggttatcccaagtgattattttaagattgtaaaggaacataatcttcaagttttgggtctggtgaaatcagatgaagggttctatcagtgcattgctgaaaatgatgttggaaatgcacaagctggagcccaactgataatccttgaacatgcaccagccacaacgggaccactgccttcagctcctcgggatgtcgtggcctccctggtctctacccgcttcatcaaattgacgtggcggacacctgcatcagatcctcacggagacaaccttacctactctgtgttctacaccaaggaagggattgctagggaacgtgttgagaataccagtcacccaggagagatgcaagtaaccattcaaaacctaatgccagcgaccgtgtacatctttagagttatggctcaaaataagcatggctcaggagagagttcagctccactgcgagtagaaacacaacctgaggttcagctccctggcccagcacctaaccttcgtgcatatgcagcttcgcctacctccatcactgttacgtgggaaacaccagtgtctggcaatggggaaattcagaattataagttgtactacatggaaaaggggactgataaagaacaggatgttgatgtttcaagtcactcttacaccattaatgggttgaaaaaatatacagagtatagtttccgagtggtggcctacaataaacatggtcctggagtttccacaccagatgttgctgttcgaacattgtcagatgttcccagtgctgctcctcagaatctgtccttggaagtgagaaattcaaagagtattatgattcactggcagccacctgctccagccacacaaaatgggcagattactggctacaagattcgctaccgaaaggcctcccgaaagagtgatgtcactgagaccttggtaagcgggacacagctgtctcagctgattgaaggtcttgatcgggggactgagtataatttccgagtggctgctctaacaatcaatggtacaggcccggcaactgactggctgtctgctgaaacttttgaaagtgacctagatgaaactcgtgttcctgaagtgcctagctctcttcacgtacgcccgctcgttactagcatcgtagtgagctggactcctccagagaatcagaacattgtggtcagaggttacgccattggttatggcattggcagccctcatgcccagaccatcaaagtggactataaacagcgctattacaccattgaaaatctggatcccagctctcactatgtgattaccctgaaagcatttaataacgtgggtgaaggcatccccctgtatgagagtgctgtgaccaggcctcacacagacacttctgaagttgatttatttgttattaatgctccatacactccagtgccagatcccactcccatgatgccaccagtgggagttcaggcttccattctgagtcatgacaccatcaggattacgtgggcagacaactcgctgcccaagcaccagaagattacagactcccgatactacaccgtccgatggaaaaccaacatcccagcaaacaccaagtacaagaatgcaaatgcaaccactttgagttatttggtgactggtttaaagccgaatacactctatgaattctctgtgatggtgaccaaaggtcgaagatcaagtacatggagtatgacagcccatgggaccacctttgaattagttccgacttctccacccaaggatgtgactgttgtgagtaaagaggggaaacctaagaccataattgtgaattggcagcctccctctgaagccaatggcaaaattacaggttacatcatatattacagtacagatgtgaatgcagagatacatgactgggttattgagcctgttgtgggaaacagactgactcaccagatacaagagttaactcttgacacaccatactacttcaaaatccaggcacggaactcaaagggcatgggacccatgtctgaagctgtccaattcagaacacctaaagcggactcctctgataaaatgcctaatgatcaagcctcagggtctggagggaaaggaagccggctgccagacctaggatccgactacaaacctccaatgagcggcagtaacagccctcatgggagccccacctctcctctggacagtaatatgctgctggtcataattgtttctgttggcgtcatcaccatcgtggtggttgtgattatcgctgtcttttgtacccgtcgtaccacctctcaccagaaaaagaaacgagctgcctgcaaatcagtgaatggctctcataagtacaaagggaattccaaagatgtgaaacctccagatctctggatccatcatgagagactggagctgaaacccattgataagtctccagacccaaaccccatcatgactgatactccaattcctcgcaactctcaagatatcacaccagttgacaactccatggacagcaatatccatcaaaggcgaaattcatacagagggcatgagtcagaggacagcatgtctacactggctggaaggcgaggaatgagaccaaaaatgatgatgccctttgactcccagccaccccagcctgtgattagtgcccatcccatccattccctcgataaccctcaccatcatttccactccagcagcctcgcttctccagctcgcagtcatctctaccacccgggcagcccatggcccattggcacatccatgtccctttcagacagggccaattccacagaatccgttcgaaatacccccagcactgacaccatgccagcctcttcgtctcaaacatgctgcactgatcaccaggaccctgaaggtgctaccagctcctcttacttggccagctcccaagaggaagattcaggccagagtcttcccactgcccatgttcgcccttcccacccattgaagagcttcgccgtgccagcaatcccgcctccaggacctcccacctatgatcctgcattgccaagcacaccattactgtcccagcaagctctgaaccatcacattcactcagtgaagacagcctccatcgggactctaggaaggagccggcctcctatgccagtggttgttcccagtgcccctgaagtgcaggagaccacaaggatgttggaagactccgagagtagctatgaaccagatgagctgaccaaagagatggcccacctggaaggactaatgaaggacctaaacgctatcacaacagcatgacgaccttcaccaggacctgacttcaaacctgagtctggaagtcttggaacttacccttgaaaacaaggaattgtacagagtacgagaggacagcacttgagaacacagaatgagccagcagactggccagcgcctctgtgtagggctggctccaggcatggccacctgccttcccctggtcagcctggaagaagcctgtgtcgaggcagcttccctttgcctgctgatattctgcaggactgggcaccatgggccaaaattttgtgtccagggaagaggcgagaagtgcaacctgcatttcactttgtggtcaggccgtgtctttgtgctgtgactgcatcacctttatggagtgtagacattggcatttatgtacaattttatttgtgtcttattttattttaccttcaaaaacaaaaacgccatccaaaaccaaggaagtccttggtgttctccacaagtggttgacatttgactgcttgttccaattatgtatggaaagtctttgacagtgtgggtcgttcctggggttggcttgttttttggtttcatttttattttttaattctgagtcattgcatcctctaccagctgttaatccatcactctgagggggaggaaatgttgcattgctgtttgtaagctttttttattatttttttattataattattaaaggcctgactctttcctctcatcactgtgagattacagatctatttgaattgaatgaaatgtaacattgaaaagacttgtttgttgctttctgtgcagtttcagtattggggcgggtggggggctgggggttggtaataggaaatggaggggctgctgaggtcctgtgaatgtttctgtcattgtactttcttccagaagcctgcagagaatggaagcatcttctttattgtcctttcctggcatgtccatccttattgtcactacgttgcaactggagtttgatttggatctggttttaaaattcttctgtgcaatagatgggtttgaggatttagcggccctgatgtcttggtcatagcctggtaagaatgtccatgctgaggagccagatgttgtatttctaactgcctgagtcacacagaatagggtaagagcctgaccccattctgtaaatcagaaagcaaggatggagaccctttcctgctgctattattggctctctttgaggaagttggaggttaaggaaggaacttgtttgtttccgtatacgactccttcttctctctagttcagtcttcagccagtccagcgctctcttccacacttcagagccccttcagagaaagcattagcaggaatgagacaaggcagagctgcagtgccccctgaggcttccacacatctttctgaatattatttttcaagtaacaagggcagggacagcggaaacagctgcccaccccccccatcccagcagctcagctaagccctgatgagaatgaagccacaggagttgtctgaggtgaacccagccgctcagccacacatggaagccattgcctttgcacatagttcttgggttctttttcctaaaaaggtaaggagctgaggtgtgtggttttttaatattaagaatatataatggaaaacacacgactgacgctcaggcatcttcccctactccccaacagatccccagaagacagcgtggaaggcagtgtagacagtaaatcgggcttcagttctatagccaagaagagatcagctgctgaaaccaccagtgggtaccccaggccacctgcctttgaacttggggatttgccatgtttgatcttgtcacatacttgcttttttacaagatgaactctttgtatttatgatttggggggcaatgaaaggtgcaatgcaggaactgctgctgccgagctcgctggtcacatgggggtgccaggcgggattctggaaaaccagtgcacttaaactgatcctgaagagagctgtcccagcactctggccaccaggagggccagattccccagaaactaccttttgccctcacaatttaatacattttcttacattttcctgtgattttcgaaactaaaccattgtgtgtcctgtagtgtcctggttgagctgccgctcagcagcttcctcggggggatttggaacacctgtgtctgtcgccgcactgcctgtgggaggggcccagagggctgctgggactggcgtctgtacacacttgtttggccttttctgtagttgatgctgtaaactctatggctttttaaaaacgatttcatgtttttatttagtattggaaatccaatacacttttttaatccaatcaaaaaaaaat

SEQ ID NO: 439586 - DNA, 5224 bp, Homo sapiens
gggccgggccgggctgggctggagcagcggcgccgcgggagccgagcttgcagcgagggaccggctgaggcgcgcgggagggaaggaggcaagggctccgcggcgctgtcgccgccgctgccgctcactctcggggaagagatggcggcggagcggggagcccggcgactcctcagcaccccctccttctggctctactgcctgctgctgctcgggcgccgggcgccgggcgccgcggccgccaggagcggctccgcgccgcagtccccaggagccagcattcgaacgttcactccattttattttctggtggagccggtggatacactctcagttagaggctcttctgttatattaaactgttcagcatattctgagccttctccaaaaattgaatggaaaaaagatggaacttttttaaacttagtatcagatgatcgacgccagcttctcccggatggatctttatttatcagcaatgtggtgcattccaaacacaataaacctgatgaaggttattatcagtgtgtggccactgttgagagtcttggaactattatcagtagaacagcgaagctcatagtagcaggtcttccaagatttaccagccaaccagaaccttcctcagtttatgctgggaacaatgcaattctgaattgtgaagttaatgcagatttggtcccatttgtgaggtgggaacagaacagacaaccccttcttctggatgatagagttatcaaacttccaagtggaatgctggttatcagcaatgcaactgaaggagatggcgggctttatcgctgcgtagtggaaagtggtgggccaccaaagtatagtgatgaagttgaattgaaggttcttccagatcctgaggtgatatcagacttggtatttttgaaacagccttctcccttagtcagagtcattggtcaggatgtagtgttgccatgtgttgcttcaggacttcctactccaaccattaaatggatgaaaaatgaggaggcacttgacacagaaagctctgaaagattggtattgctggcaggtggtagcctggagatcagtgatgttactgaggatgatgctgggacttatttttgtatagctgataatggaaatgagacaattgaagctcaagcagagcttacagtgcaagctcaacctgaattcctgaagcagcctactaatatatatgctcacgaatctatggatattgtatttgaatgtgaagtgactggaaaaccaactccaactgtgaagtgggtcaaaaatggggatatggttatcccaagtgattattttaagattgtaaaggaacataatcttcaagttttgggtctggtgaaatcagatgaagggttctatcagtgcattgctgaaaatgatgttggaaatgcacaagctggagcccaactgataatccttgaacatgcaccagccacaacgggaccactgccttcagctcctcgggatgtcgtggcctccctggtctctacccgcttcatcaaattgacgtggcggacacctgcatcagatcctcacggagacaaccttacctactctgtgttctacaccaaggaagggattgctagggaacgtgttgagaataccagtcacccaggagagatgcaagtaaccattcaaaacctaatgccagcgaccgtgtacatctttagagttatggctcaaaataagcatggctcaggagagagttcagctccactgcgagtagaaacacaacctgaggttcagctccctggcccagcacctaaccttcgtgcatatgcagcttcgcctacctccatcactgttacgtgggaaacaccagtgtctggcaatggggaaattcagaattataagttgtactacatggaaaaggggactgataaagaacaggatgttgatgtttcaagtcactcttacaccattaatgggttgaaaaaatatacagagtatagtttccgagtggtggcctacaataaacatggtcctggagtttccacaccagatgttgctgttcgaacattgtcagatgttcccagtgctgctcctcagaatctgtccttggaagtgagaaattcaaagagtattatgattcactggcagccacctgctccagccacacaaaatgggcagattactggctacaagattcgctaccgaaaggcctcccgaaagagtgatgtcactgagaccttggtaagcgggacacagctgtctcagctgattgaaggtcttgatcgggggactgagtataatttccgagtggctgctctaacaatcaatggtacaggcccggcaactgactggctgtctgctgaaacttttgaaagtgacctagatgaaactcgtgttcctgaagtgcctagctctcttcacgtacgcccgctcgttactagcatcgtagtgagctggactcctccagagaatcagaacattgtggtcagaggttacgccattggttatggcattggcagccctcatgcccagaccatcaaagtggactataaacagcgctattacaccattgaaaatctggatcccagctctcactatgtgattaccctgaaagcatttaataacgtgggtgaaggcatccccctgtatgagagtgctgtgaccaggcctcacacagacacttctgaagttgatttatttgttattaatgctccatacactccagtgccagatcccactcccatgatgccaccagtgggagttcaggcttccattctgagtcatgacaccatcaggattacgtgggcagacaactcgctgcccaagcaccagaagattacagactcccgatactacaccgtccgatggaaaaccaacatcccagcaaacaccaagtacaagaatgcaaatgcaaccactttgagttatttggtgactggtttaaagccgaatacactctatgaattctctgtgatggtgaccaaaggtcgaagatcaagtacatggagtatgacagcccatgggaccacctttgaattagttccgacttctccacccaaggatgtgactgttgtgagtaaagaggggaaacctaagaccataattgtgaattggcagcctccctctgaagccaatggcaaaattacaggttacatcatatattacagtacagatgtgaatgcagagatacatgactgggttattgagcctgttgtgggaaacagactgactcaccagatacaagagttaactcttgacacaccatactacttcaaaatccaggcacggaactcaaagggcatgggacccatgtctgaagctgtccaattcagaacacctaaagcggactcctctgataaaatgcctaatgatcaagcctcagggtctggagggaaaggaagccggctgccagacctaggatccgactacaaacctccaatgagcggcagtaacagccctcatgggagccccacctctcctctggacagtaatatgctgctggtcataattgtttctgttggcgtcatcaccatcgtggtggttgtgattatcgctgtcttttgtacccgtcgtaccacctctcaccagaaaaagaaacgagctgcctgcaaatcagtgaatggctctcataagtacaaagggaattccaaagatgtgaaacctccagatctctggatccatcatgagagactggagctgaaacccattgataagtctccagacccaaaccccatcatgactgatactccaattcctcgcaactctcaagatatcacaccagttgacaactccatggacagcaatatccatcaaaggcgaaattcatacagagggcatgagtcagaggacagcatgtctacactggctggaaggcgaggaatgagaccaaaaatgatgatgccctttgactcccagccaccccagcctgtgattagtgcccatcccatccattccctcgataaccctcaccatcatttccactccagcagcctcgcttctccagctcgcagtcatctctaccacccgggcagcccatggcccattggcacatccatgtccctttcagacagggccaattccacagaatccgttcgaaatacccccagcactgacaccatgccagcctcttcgtctcaaacatgctgcactgatcaccaggaccctgaaggtgctaccagctcctcttacttggccagctcccaagaggaagattcaggccagagtcttcccactgcccatgttcgcccttcccacccattgaagagcttcgccgtgccagcaatcccgcctccaggacctcccacctatgatcctgcattgccaagcacaccattactgtcccagcaagctctgaaccatcacattcactcagtgaagacagcctccatcgggactctaggaaggagccggcctcctatgccagtggttgttcccagtgcccctgaagtgcaggagaccacaaggatgttggaagactccgagagtagctatgaaccagatgagctgaccaaagagatggcccacctggaaggactaatgaaggacctaaacgctatcacaacagcatgacgaccttcaccaggacctgacttcaaacctgagtctggaagtcttggaacttacccttgaaaacaaggaattgtacagagtacgagaggacagcacttgagaacacagaatgagccagcagactggccagcgcctctgtgtagggctggctccaggcatggccacctgccttcccctggtcagcctggaagaagcctgtgtcgaggcagcttccctttgcctgctgatattctgcaggactgggcaccatgggccaaaattttgtgtccagggaagaggcgagaagtgcaacctgcatttcactttgtggtcaggccgtgtctttgtgctgtgactgcatcacctttatggagtgtagacattggcatttatgtacaattttatttgtgtcttattttattttaccttcaaaaacaaaaacgccatccaaaaccaaggaagtccttggtgttctccacaagtggttgacatttgactgcttgttccaattatgtatggaaagtctttgacagtgtgggtcgttcctggggttggcttgttttttggtttcatttttattttttaattctgagtcattgcatcctctaccagctgttaatccatcactctgagggggaggaaatgttgcattgctgtttgtaagctttttttattatttttttattataattattaaaggcctgactctttcctctca

SEQ ID NO: 439587 - DNA, 3490 bp, Homo sapiens
gggccgggccgggctgggctggagcagcggcgccgcgggagccgagcttgcagcgagggaccggctgaggcgcgcgggagggaaggaggcaagggctccgcggcgctgtcgccgccgctgccgctcactctcggggaagagatggcggcggagcggggagcccggcgactcctcagcaccccctccttctggctctactgcctgctgctgctcgggcgccgggcgccgggcgccgcggccgccaggagcggctccgcgccgcagtccccaggagccagcattcgaacgttcactccattttattttctggtggagccggtggatacactctcagttagaggctcttctgttatattaaactgttcagcatattctgagccttctccaaaaattgaatggaaaaaagatggaacttttttaaacttagtatcagatgatcgacgccagcttctcccggatggatctttatttatcagcaatgtggtgcattccaaacacaataaacctgatgaaggttattatcagtgtgtggccactgttgagagtcttggaactattatcagtagaacagcgaagctcatagtagcaggtcttccaagatttaccagccaaccagaaccttcctcagtttatgctgggaacaatgcaattctgaattgtgaagttaatgcagatttggtcccatttgtgaggtgggaacagaacagacaaccccttcttctggatgatagagttatcaaacttccaagtggaatgctggttatcagcaatgcaactgaaggagatggcgggctttatcgctgcgtagtggaaagtggtgggccaccaaagtatagtgatgaagttgaattgaaggttcttccagatcctgaggtgatatcagacttggtatttttgaaacagccttctcccttagtcagagtcattggtcaggatgtagtgttgccatgtgttgcttcaggacttcctactccaaccattaaatggatgaaaaatgaggaggcacttgacacagaaagctctgaaagattggtattgctggcaggtggtagcctggagatcagtgatgttactgaggatgatgctgggacttatttttgtatagctgataatggaaatgagacaattgaagctcaagcagagcttacagtgcaagctcaacctgaattcctgaagcagcctactaatatatatgctcacgaatctatggatattgtatttgaatgtgaagtgactggaaaaccaactccaactgtgaagtgggtcaaaaatggggatatggttatcccaagtgattattttaagattgtaaaggaacataatcttcaagttttgggtctggtgaaatcagatgaagggttctatcagtgcattgctgaaaatgatgttggaaatgcacaagctggagcccaactgataatccttgaacatgcaccagccacaacgggaccactgccttcagctcctcgggatgtcgtggcctccctggtctctacccgcttcatcaaattgacgtggcggacacctgcatcagatcctcacggagacaaccttacctactctgtgttctacaccaaggaagggattgctagggaacgtgttgagaataccagtcacccaggagagatgcaagtaaccattcaaaacctaatgccagcgaccgtgtacatctttagagttatggctcaaaataagcatggctcaggagagagttcagctccactgcgagtagaaacacaacctgaggttcagctccctggcccagcacctaaccttcgtgcatatgcagcttcgcctacctccatcactgttacgtgggaaacaccagtgtctggcaatggggaaattcagaattataagttgtactacatggaaaaggggactgataaagaacaggatgttgatgtttcaagtcactcttacaccattaatgggttgaaaaaatatacagagtatagtttccgagtggtggcctacaataaacatggtcctggagtttccacaccagatgttgctgttcgaacattgtcagatgttcccagtgctgctcctcagaatctgtccttggaagtgagaaattcaaagagtattatgattcactggcagccacctgctccagccacacaaaatgggcagattactggctacaagattcgctaccgaaaggcctcccgaaagagtgatgtcactgagaccttggtaagcgggacacagctgtctcagctgattgaaggtcttgatcgggggactgagtataatttccgagtggctgctctaacaatcaatggtacaggcccggcaactgactggctgtctgctgaaacttttgaaagtgacctagatgaaactcgtgttcctgaagtgcctagctctcttcacgtacgcccgctcgttactagcatcgtagtgagctggactcctccagagaatcagaacattgtggtcagaggttacgccattggttatggcattggcagccctcatgcccagaccatcaaagtggactataaacagcgctattacaccattgaaaatctggatcccagctctcactatgtgattaccctgaaagcatttaataacgtgggtgaaggcatccccctgtatgagagtgctgtgaccaggcctcacacagtgccagatcccactcccatgatgccaccagtgggagttcaggcttccattctgagtcatgacaccatcaggattacgtgggcagacaactcgctgcccaagcaccagaagattacagactcccgatactacaccgtccgatggaaaaccaacatcccagcaaacaccaagtacaagaatgcaaatgcaaccactttgagttatttggtgactggtttaaagccgaatacactctatgaattctctgtgatggtgaccaaaggtcgaagatcaagtacatggagtatgacagcccatgggaccacctttgaattagttccgacttctccacccaaggatgtgactgttgtgagtaaagaggggaaacctaagaccataattgtgaattggcagcctccctctgaagccaatggcaaaattacaggttacatcatatattacagtacagatgtgaatgcagagatacatgactgggttattgagcctgttgtgggaaacagactgactcaccagatacaagagttaactcttgacacaccatactacttcaaaatccaggcacggaactcaaagggcatgggacccatgtctgaagctgtccaattcagaacacctaaagcctcagggtctggagggaaaggaagccggctgccagacctaggatccgactacaaacctccaatgagcggcagtaacagccctcatgggagccccacctctcctctggacagtaatatgctgctggtcataattgtttctgttggcgtcatcaccatcgtggtggttgtgattatcgctgtcttttgtacccgtcgtaccacctctcaccagaaaaagtaagaagccccagatgcac

SEQ ID NO: 439588 - DNA, 2553 bp, Homo sapiens
gggccgggccgggctgggctggagcagcggcgccgcgggagccgagcttgcagcgagggaccggctgaggcgcgcgggagggaaggaggcaagggctccgcggcgctgtcgccgccgctgccgctcactctcggggaagagatggcggcggagcggggagcccggcgactcctcagcaccccctccttctggctctactgcctgctgctgctcgggcgccgggcgccgggcgccgcggccgccaggagcggctccgcgccgcagtccccaggagccagcattcgaacgttcactccattttattttctggtggagccggtggatacactctcagttagaggctcttctgttatattaaactgttcagcatattctgagccttctccaaaaattgaatggaaaaaagatggaacttttttaaacttagtatcagatgatcgacgccagcttctcccggatggatctttatttatcagcaatgtggtgcattccaaacacaataaacctgatgaaggttattatcagtgtgtggccactgttgagagtcttggaactattatcagtagaacagcgaagctcatagtagcaggtcttccaagatttaccagccaaccagaaccttcctcagtttatgctgggaacaatgcaattctgaattgtgaagttaatgcagatttggtcccatttgtgaggtgggaacagaacagacaaccccttcttctggatgatagagttatcaaacttccaagtggaatgctggttatcagcaatgcaactgaaggagatggcgggctttatcgctgcgtagtggaaagtggtgggccaccaaagtatagtgatgaagttgaattgaaggttcttccagatcctgaggtgatatcagacttggtatttttgaaacagccttctcccttagtcagagtcattggtcaggatgtagtgttgccatgtgttgcttcaggacttcctactccaaccattaaatggatgaaaaatgaggaggcacttgacacagaaagctctgaaagattggtattgctggcaggtggtagcctggagatcagtgatgttactgaggatgatgctgggacttatttttgtatagctgataatggaaatgagacaattgaagctcaagcagagcttacagtgcaagctcaacctgaattcctgaagcagcctactaatatatatgctcacgaatctatggatattgtatttgaatgtgaagtgactggaaaaccaactccaactgtgaagtgggtcaaaaatggggatatggttatcccaagtgattattttaagattgtaaaggaacataatcttcaagttttgggtctggtgaaatcagatgaagggttctatcagtgcattgctgaaaatgatgttggaaatgcacaagctggagcccaactgataatccttgaacatgcaccagccacaacgggaccactgccttcagctcctcgggatgtcgtggcctccctggtctctacccgcttcatcaaattgacgtggcggacacctgcatcagatcctcacggagacaaccttacctactctgtgttctacaccaaggaagggattgctagggaacgtgttgagaataccagtcacccaggagagatgcaagtaaccattcaaaacctaatgccagcgaccgtgtacatctttagagttatggctcaaaataagcatggctcaggagagagttcagctccactgcgagtagaaacacaacctgaggttcagctccctggcccagcacctaaccttcgtgcatatgcagcttcgcctacctccatcactgttacgtgggaaacaccagtgtctggcaatggggaaattcagaattataagttgtactacatggaaaaggggactgataaagaacaggatgttgatgtttcaagtcactcttacaccattaatgggttgaaaaaatatacagagtatagtttccgagtggtggcctacaataaacatggtcctggagtttccacacaacatacgagcacgatgatgtcagtgtctcatgttggaagtgagaaattcgaagagtattatgattcactggcagccacctgctccagccacacaaaatgggcagattactggctacaagattcgctaccgaaaggcctcccgaaagagtgatgtcactgagaccttggtaagcgggacacagctgtctcagctgattgaaggtcttgatcgggggactgagtataatttccgagtggctgctctaacaatcaatggtacaggcccggcaactgactggctgtctgctgaaacttttgaaagtgacctagatggtaagaataacaattggcaagactggaacacaatagatactagctgtagtcaaatgagtcaaactggaaagccacagacttggggtggatatggctcaagtctgtgaactttagtgcatcacgctgctgttgttcctgtattgcatcgaggctgctggaatggattttttgcagtgccttgtagagaactgtcctttcaagcagaactagagcaaataaaaatgtgtatgtgcta

SEQ ID NO: 439589 - DNA, 1072 bp, Homo sapiens
gggccgggccgggctgggctggagcagcggcgccgcgggagccgagcttgcagcgagggaccggctgaggcgcgcgggagggaaggaggcaagggctccgcggcgctgtcgccgccgctgccgctcactctcggggaagagatggcggcggagcggggagcccggcgactcctcagcaccccctccttctggctctactgcctgctgctgctcgggcgccgggcgccgggcgccgcggccgccaggagcggctccgcgccgcagtccccaggagccagcattcgaacgttcactccattttattttctggtggagccggtggatacactctcagttagaggctcttctgttatattaaactgttcagcatattctgagccttctccaaaaattgaatggaaaaaagatggaacttttttaaacttagtatcagatgatcgacgccagcttctcccggatggatctttatttatcagcaatgtggtgcattccaaacacaataaacctgatgaaggttattatcagtgtgtggccactgttgagagtcttggaactattatcagtagaacagcgaagctcatagtagcaggtcttccaagatttaccagccaaccagaaccttcctcagtttatgctgggaacaatgcaattctgaattgtgaagttaatgcagatttggtcccatttgtgaggtgggaacagaacagacaaccccttcttctggatgatagagttatcaaacttccaagtggaatgctggttatcagcaatgcaactgaaggagatggcgggctttatcgctgcgtagtggaaagtggtgggccaccaaagtatagtgatgaagttgaattgaaggttcttccagatcctgaggtgatatcagacttggtatttttgaaacagccttctcccttagtcagagtcattggtcaggatgtagtgttgccatgtgttgcttcaggacttcctactccaaccattaaatggatgaaaaatgaggaggcacttgacacagaaaggtaagtgttgtctgcctaaaagccttcttcagccttagcttgagactttgtca

SEQ ID NO: 439590 - DNA, 1790 bp, Homo sapiens
  misc_feature (38)..(38): n is a, c, g, or t
  misc_feature (42)..(42): n is a, c, g, or t
  misc_feature (48)..(48): n is a, c, g, or t
aaggcaacaccacaacacgcatgacgaggcctggggtnaatnggcaangatttctgcccgtggacgccgccgaagaagcatcgttaaagtctctcttcaccctgccgtcatgtctaagtcagagtctcctaaagagcccgaacagctgaggaagctcttcattggagggttgagctttgaaacaactgatgagagcctgaggagccattttgagcaatggggaacgctcacggactgtgtggtaatgagagatccaaacaccaagcgctccaggggctttgggtttgtcacatatgccactgtggaggaggtggatgcagctatgaatgcaaggccacacaaggtggatggaagagttgtggaaccaaagagagctgtctccagagaagattctcaaagaccaggtgcccacttaactgtgaaaaagatatttgttggtggcattaaagaagacactgaagaacatcacctaagagattattttgaacagtatggaaaaattgaagtgattgaaatcatgactgaccgaggcagtggcaagaaaaggggctttgcctttgtaacctttgacgaccatgactccgtggataagattgtcattcagaaataccatactgtgaatggccacaactgtgaagttagaaaagccctgtcaaagcaagagatggctagtgcttcatccagccaaagaggtcgaagtggttctggaaactttggtggtggtcgtggaggtggttccggtgggaatgacaacttcggtcgtggaggaaacttcagtggtccgtggtggctttggtggcagccgtggtggtggtggatatggtggcagtggggatggctataatggatttggtaatgatggaagccattttggaggtggtggaagctacaatgatttgggaattacaacaatcagtcttcaaattttggacccatgaagggaggaaattttggaggcagaagctctggcccctatggcggtggaggccaatactttgcaaaaccacgaaaccaaggtggctatggcggttccagcagcagcagtagctatggcagtggcagcaagattccaattaggaaacaaacgcttagcaggagaggagagccagagaagtgacagggaagccacaggttacaacagatttgtgaactcagccaagcacagtggtggcagggcctagctgctacaaagaagacatgttttagacaaatactcatgtgtatgggcaaaaaactcgaggactgtatttgtgactaattgtataacaggttattttagtttctgttctgtggaaagtgtaaagcattccaacaaagggttttaatgtagatttttttttttgcaccccatgctgttgattgctaaatgtaacagtctgatcgtgacgctgaataaatgtcttttttttttaatgtgctgtgtaaagttagtctactcttaagccatcttggtaaatttccccaacagtgtgaagttagaattccttcagggtgatgccaggttctatttggaatttatatacaacctgcttgggtggagaagccattgtcttcggaaaccttggtgtagttgaactgatagttactgttgtgacctgaagttcaccattaaaagggattacccaagcaaaatcatggaatggttataaaagtgattgttggcacatcctatgcaatatatctaaattgaataatggtaccagataaaattatagatgggaatgaagcttgtgtatccattatcatgtgtaatcaataaacgaatttaattctcttgaaaaaaaaaaaaa

SEQ ID NO: 439591 - DNA, 1633 bp, Homo sapiens
ctttcagtgccgggctgggcttaatgctagatagctgtgacgtgggcctttcagatgcaatggggaacgctcacggactgtgtggtaatgagagatccaaacaccaagcgctccaggggctttgggtttgtcacatatgccactgtggaggaggtggatgcagctatgaatgcaaggccacacaaggtggatggaagagttgtggaaccaaagagagctgtctccagagaagattctcaaagaccaggtgcccacttaactgtgaaaaagatatttgttggtggcattaaagaagacactgaagaacatcacctaagagattattttgaacagtatggaaaaattgaagtgattgaaatcatgactgaccgaggcagtggcaagaaaaggggctttgcctttgtaacctttgacgaccatgactccgtggataagattgtcattcagaaataccatactgtgaatggccacaactgtgaagttagaaaagccctgtcaaagcaagagatggctagtgcttcatccagccaaagaggtcgaagtggttctggaaactttggtggtggtcgtggaggtggttccggtgggaatgacaacttcggtcgtggaggaaacttcagtggtccgtggtggctttggtggcagccgtggtggtggtggatatggtggcagtggggatggctataatggatttggtaatgatggaagccattttggaggtggtggaagctacaatgatttgggaattacaacaatcagtcttcaaattttggacccatgaagggaggaaattttggaggcagaagctctggcccctatggcggtggaggccaatactttgcaaaaccacgaaaccaaggtggctatggcggttccagcagcagcagtagctatggcagtggcagcaagattccaattaggaaacaaacgcttagcaggagaggagagccagagaagtgacagggaagccacaggttacaacagatttgtgaactcagccaagcacagtggtggcagggcctagctgctacaaagaagacatgttttagacaaatactcatgtgtatgggcaaaaaactcgaggactgtatttgtgactaattgtataacaggttattttagtttctgttctgtggaaagtgtaaagcattccaacaaagggttttaatgtagatttttttttttgcaccccatgctgttgattgctaaatgtaacagtctgatcgtgacgctgaataaatgtcttttttttttaatgtgctgtgtaaagttagtctactcttaagccatcttggtaaatttccccaacagtgtgaagttagaattccttcagggtgatgccaggttctatttggaatttatatacaacctgcttgggtggagaagccattgtcttcggaaaccttggtgtagttgaactgatagttactgttgtgacctgaagttcaccattaaaagggattacccaagcaaaatcatggaatggttataaaagtgattgttggcacatcctatgcaatatatctaaattgaataatggtaccagataaaattatagatgggaatgaagcttgtgtatccattatcatgtgtaatcaataaacgaatttaattctcttgaaaaaaaaaaaaa

SEQ ID NO: 439592 - DNA, 1760 bp, Homo sapiens
  misc_feature (38)..(38): n is a, c, g, or t
  misc_feature (42)..(42): n is a, c, g, or t
  misc_feature (48)..(48): n is a, c, g, or t
aaggcaacaccacaacacgcatgacgaggcctggggtnaatnggcaangatttctgcccgtggacgccgccgaagaagcatcgttaaagtctctcttcaccctgccgtcatgtctaagtcagagtctcctaaagagcccgaacactttgaaacaactgatgagagcctgaggagccattttgagcaatggggaacgctcacggactgtgtggtaatgagagatccaaacaccaagcgctccaggggctttgggtttgtcacatatgccactgtggaggaggtggatgcagctatgaatgcaaggccacacaaggtggatggaagagttgtggaaccaaagagagctgtctccagagaagattctcaaagaccaggtgcccacttaactgtgaaaaagatatttgttggtggcattaaagaagacactgaagaacatcacctaagagattattttgaacagtatggaaaaattgaagtgattgaaatcatgactgaccgaggcagtggcaagaaaaggggctttgcctttgtaacctttgacgaccatgactccgtggataagattgtcattcagaaataccatactgtgaatggccacaactgtgaagttagaaaagccctgtcaaagcaagagatggctagtgcttcatccagccaaagaggtcgaagtggttctggaaactttggtggtggtcgtggaggtggttccggtgggaatgacaacttcggtcgtggaggaaacttcagtggtccgtggtggctttggtggcagccgtggtggtggtggatatggtggcagtggggatggctataatggatttggtaatgatggaagccattttggaggtggtggaagctacaatgatttgggaattacaacaatcagtcttcaaattttggacccatgaagggaggaaattttggaggcagaagctctggcccctatggcggtggaggccaatactttgcaaaaccacgaaaccaaggtggctatggcggttccagcagcagcagtagctatggcagtggcagcaagattccaattaggaaacaaacgcttagcaggagaggagagccagagaagtgacagggaagccacaggttacaacagatttgtgaactcagccaagcacagtggtggcagggcctagctgctacaaagaagacatgttttagacaaatactcatgtgtatgggcaaaaaactcgaggactgtatttgtgactaattgtataacaggttattttagtttctgttctgtggaaagtgtaaagcattccaacaaagggttttaatgtagatttttttttttgcaccccatgctgttgattgctaaatgtaacagtctgatcgtgacgctgaataaatgtcttttttttttaatgtgctgtgtaaagttagtctactcttaagccatcttggtaaatttccccaacagtgtgaagttagaattccttcagggtgatgccaggttctatttggaatttatatacaacctgcttgggtggagaagccattgtcttcggaaaccttggtgtagttgaactgatagttactgttgtgacctgaagttcaccattaaaagggattacccaagcaaaatcatggaatggttataaaagtgattgttggcacatcctatgcaatatatctaaattgaataatggtaccagataaaattatagatgggaatgaagcttgtgtatccattatcatgtgtaatcaataaacgaatttaattctcttgaaaaaaaaaaaaa

SEQ ID NO: 439593 - DNA, 802 bp, Homo sapiens
  misc_feature (38)..(38): n is a, c, g, or t
  misc_feature (42)..(42): n is a, c, g, or t
  misc_feature (48)..(48): n is a, c, g, or t
aaggcaacaccacaacacgcatgacgaggcctggggtnaatnggcaangatttctgcccgtggacgccgccgaagaagcatcgttaaagtctctcttcaccctgccgtcatgtctaagtcagagtctcctaaagagcccgaacagctgaggaagctcttcattggagggttgagctttgaaacaactgatgagagcctgaggagccattttgagcaatggggaacgctcacggactgtgtggtaatgagagatccaaacaccaagcgctccaggggctttgggtttgtcacatatgccactgtggaggaggtggatgcagctatgaatgcaaggccacacaaggtggatggaagagttgtggaaccaaagagagctgtctccagagaagattctcaaagaccaggtgcccacttaactgtgaaaaagatatttgttggtggcattaaagaagacactgaagaacatcacctaagagattattttgaacagtatggaaaaattgaagtgattgaaatcatgactgaccgaggcagtggcaagaaaaggggctttgcctttgtaacctttgacgaccatgactccgtggataagattgtcattcagaaataccatactgtgaatggccacaactgtgaagttagaaaagccctgtcaaagcaagagatggctagtgcttcatccagccaaagaggtcgaagtggttctggaaactttggtggtggtcgtggaggtgatcttcttcagtgtcttctttaatgccaccaacaaatatctttttcacagttaagtgggcacctggtc

SEQ ID NO: 439594 - DNA, 3972 bp, Homo sapiens
  misc_feature (541)..(541): n is a, c, g, or t
  misc_feature (810)..(810): n is a, c, g, or t
  misc_feature (825)..(825): n is a, c, g, or t
  misc_feature (901)..(901): n is a, c, g, or t
  misc_feature (909)..(909): n is a, c, g, or t
  misc_feature (1016)..(1016): n is a, c, g, or t
  misc_feature (1024)..(1024): n is a, c, g, or t
  misc_feature (1121)..(1121): n is a, c, g, or t
  misc_feature (1226)..(1226): n is a, c, g, or t
ggaaagcatccaacggagtggaagcagcatgaaggaagagccgctgggcagcggcatgaacgcggtgcggacgtggatgcagggcgccggggtgctggacgccaacacggcggcgcagagcggggtgggtctggcccgggctcactttgagaagcagccgccttccaatctgcggaaatccaacttcttccacttcgtcctggccctctacgacagacagggccagcccgtggagatcgagaggacagcgtttgtggggttcgtggagaaggaaaaagaagccaacagcgaaaagaccaataacggaattcactaccggattcagcttctctacagcaatgggataaggacggagcaggatttctacgtgcgcctcattgactccatgacaaaacaagccatagtgtatgaaggccaagacaagagcccagaaatgtgccgagtcttgctcacacatgagatcatgtgcagccgctgttgtgacaagaaaagctgtggcaaccgaaatgagactccctcagatccagtgataattgacagnttcttcttgaaatttttcctcaaatgtaaccaaaattgcctaaagaatgcgggaaacccacgtgacatgcggagattccaggtcgtggtgtctacgacagtcaatgtggatggccatgtcctggcagctctgataacatgtttgtccataataattccaagcatgggcggagggctcggaggcttgacccctcggaaggtacgccctcttatctggaacatgctactccctgtatcaaagccatcagcccgagtgaaggatggacgacnggaggtgcgactgtnatcatcataggggacaatttctttgatgggttacaggtcatattcggtaccatgctggtctggagtgagttgacantcctcatnccatccgtgtgcagacccctcctcggcacatccctggtgttgtggaagtcacactgtcctacaaatctaagcagttctgcaaaggaacaccaggcagattcatttanacagcgcncaacgaacccaccatcgattatggtttccagaggttacagaaggtcattcctcggcaccctggtgaccctgagcgtttgccaaaggaagtaatactnaaaagggctgcggatctggtagaagcactgtatgggatgccacacaacaaccaggaaatcattctgaagagagcggccgacattgccgaggccctgtacagtgtnccccgcaaccacaaccaactcccggcccttgctaacacctcggtccacgcagggatgatgggcgtgaattcgttcagtggacaactggccgtgaatgtctccgaggcatcacaagccaccaatcagggtttcacccgcaactcaagcagcgtatcaccacacgggtacgtgccgagcaccactccccagcagaccaactataactccgtcaccacgagcatgaacggatacggctctgccgcaatgtccaatttgggcggctcccccaccttcctcaacggctcagctgccaactccccctatgccatagtgccatccagccccaccatggcctcctccacaagcctcccctccaactgcagcagctcctcgggcatcttctccttctcaccagccaacatggtctcagccgtgaaacagaagagtgctttcgcaccagtcgtcagaccccagacctccccacctcccacctgcaccagcaccaacgggaacagcctgcaagcgatatctggcatgattgttcctcctatgtgaaagaattgccttgaagaattgtattaatgaagaggttggattctgctacagagagtaatctgatacaagtcccagagtggaacttttaactcaggcctttttaagaggaatcacaataactgcagatttttaaacaaacaaaatcaccgaccttgcaaatactgaaattggaagagggatctgcaagtgcagggtgttggttaaagttgtacctcccaagtatttgggggatatatttattctgtattgacaaaagcaaatccactttttctttttcttttttttttttaagcttaattctgcaatcatttgtcttttataaaccgtaaagctctatacaagggacactataaataagactccatgttttaatttatgatgtttttaaagctgtgtaaaggaagaatgaagtggtgatatttacaaaaaagtaaaaaaaaaaaaaagaaaaaaagtaaaaaaaaaagcttgtatgggacagaataggaatgccagttagattttttagaaaaactaagggtcggcttttgcgccttaaagcatatcaaatggtagttagctcagacagtgcattttcaatatctaacttaacatgccaccccttagcagtgcaagcttatttatctcttttgtattgttgtcttaagcaactgtgtaaataaatgcagcctggaaagttaaaacgcgatgtaagtgatcacatttttccctctactcgaaaatccagtgcctctagacagattgttaaaactgcatatttaaatctgatctcattctctccttttacttaagtcagtttcttctgaagccgatggcctctcgagagcttggtggcacacatactgtgtgagaatctcctttgagacttcatggaacagggtccaggcacagaattccacactctgccctccagttaacaagccaaaacctcacgtacgctcccccatttgcaagtttaaagtttactcgtcctaaatgcagacttcatacctatcttccaaaagttgataaaagcaacgtggcaggtattttcgattttcccattccagatactgcctctatcagtcgacccttaccatttgtaacataatagattgaaacaacaggttaagtgctttggaattaagagttaaagggaaccgggggtggagaaaggaaaagaaggttgagacctccaaaacatagttttctgttctatgggaatttttgctctcattatctgggaagtgttcttaaaaataagaattaatagcaaagatgcagcaaagctctgaggatgcatttgcctgatatttttttctttgctcttgtgtttttgtatgtagttataaatactgtagatttttttttggtgattttttgccaaagttgttgttctatttatacattttaatgtcttaagacattttttcaatatcacaaaaagattttactgcgtattttgcaaagaaaaaaagctcactacctttagcttgcacatacttgcaaagttaattaaaaggcttttggttttaaaggggattttgtaaaatatccatataaataatgtatttatctttcgaatttgtacattgcttttcccttcttcctcttccttccacccccaatttattttattgtgtatgtttgctacgtgaaaagtgcgtatttgtttggtcacctacacttgtattagctgtttcaatgtgatttttaaacatttcatttatagttatttttagtattgttataaaccatgcttcagtttttttaatttccacccaaaagtcattgtctatttttgtattatttgtaagttaagaagttttttccaatatatggcaaaaaaaaaaaaatagtagcatattattcttgtagtatttagttcagtagatttaaaaaaaaatgtatcctttgctttggaagcttacaaaacaaccctaatgctgttttactctattaatatgcatggaatctctccctttggagtgacgcattttgtgcattaaattctagggagaaacttcatagaaatcaatgaacatactttctttcttaagtctgcttgtatatttcctctgtctttcacataaatataaaccagcagattggatgccttaacaatgcaaatcatattcatttcacttgtacattgtaactgtgcaccagaactgtcagtcatcactaacattctaagaaaaaagaaaaagaaaaaaagaaaaaaaaaaaaaca

SEQ ID NO: 439595 - DNA, 511 bp, Homo sapiens
cagtgagaagtttgaacgcaaagaaaccattgacttctgtcttttctttcatagcgatatctggcatgattgttcctcctatgtgaaagaattgccttgaagaattgtattaatgaagaggttggattctgctacagagagtaatctgatacaagtcccagagtggaacttttaactcaggcctttttaagaggaatcacaataactgcagatttttaaacaaacaaaatcaccgaccttgcaaatactgaaattggaagagggatctgcaagtgcagggtgttggttaaagttgtacctcccaagtatttgggggatatatttattctgtattgacaaaagcaaatccactttttctttttcttttttttttttaagcttaattctgcaatcatttgtcttttataaaccgtaaagctctatacaagggacactataaataagactccatgttttaatttatgatgtttttaaagctgtgtaaaggaagaatgaagtggtgatatttaca

SEQ ID NO: 439596 - DNA, 2499 bp, Homo sapiens
  misc_feature (64)..(64): n is a, c, g, or t
  misc_feature (73)..(73): n is a, c, g, or t
  misc_feature (81)..(81): n is a, c, g, or t
  misc_feature (83)..(83): n is a, c, g, or t
  misc_feature (116)..(116): n is a, c, g, or t
aagtgccgcactgctcaagtcctttgccaacgccttctacctggcccagcacctgcgatcccantggggggcnaaactccncntgctcctactgtgataagtccttccggcagctntcccacctccagcagcacaccagaatccacacaggcgacagaccctacaagtgcccacatcctggctgcgagaaggctttcactcagctctccaacctccagtctcaccagcgccagcacaacgggaacagcctgcaagcgatatctggcatgattgttcctcctatgtgaaagaattgccttgaagaattgtattaatgaagaggttggattctgctacagagagtaatctgatacaagtcccagagtggaacttttaactcaggcctttttaagaggaatcacaataactgcagatttttaaacaaacaaaatcaccgaccttgcaaatactgaaattggaagagggatctgcaagtgcagggtgttggttaaagttgtacctcccaagtatttgggggatatatttattctgtattgacaaaagcaaatccactttttctttttcttttttttttttaagcttaattctgcaatcatttgtcttttataaaccgtaaagctctatacaagggacactataaataagactccatgttttaatttatgatgtttttaaagctgtgtaaaggaagaatgaagtggtgatatttacaaaaaagtaaaaaaaaaaaaaagaaaaaaagtaaaaaaaaaagcttgtatgggacagaataggaatgccagttagattttttagaaaaactaagggtcggcttttgcgccttaaagcatatcaaatggtagttagctcagacagtgcattttcaatatctaacttaacatgccaccccttagcagtgcaagcttatttatctcttttgtattgttgtcttaagcaactgtgtaaataaatgcagcctggaaagttaaaacgcgatgtaagtgatcacatttttccctctactcgaaaatccagtgcctctagacagattgttaaaactgcatatttaaatctgatctcattctctccttttacttaagtcagtttcttctgaagccgatggcctctcgagagcttggtggcacacatactgtgtgagaatctcctttgagacttcatggaacagggtccaggcacagaattccacactctgccctccagttaacaagccaaaacctcacgtacgctcccccatttgcaagtttaaagtttactcgtcctaaatgcagacttcatacctatcttccaaaagttgataaaagcaacgtggcaggtattttcgattttcccattccagatactgcctctatcagtcgacccttaccatttgtaacataatagattgaaacaacaggttaagtgctttggaattaagagttaaagggaaccgggggtggagaaaggaaaagaaggttgagacctccaaaacatagttttctgttctatgggaatttttgctctcattatctgggaagtgttcttaaaaataagaattaatagcaaagatgcagcaaagctctgaggatgcatttgcctgatatttttttctttgctcttgtgtttttgtatgtagttataaatactgtagatttttttttggtgattttttgccaaagttgttgttctatttatacattttaatgtcttaagacattttttcaatatcacaaaaagattttactgcgtattttgcaaagaaaaaaagctcactacctttagcttgcacatacttgcaaagttaattaaaaggcttttggttttaaaggggattttgtaaaatatccatataaataatgtatttatctttcgaatttgtacattgcttttcccttcttcctcttccttccacccccaatttattttattgtgtatgtttgctacgtgaaaagtgcgtatttgtttggtcacctacacttgtattagctgtttcaatgtgatttttaaacatttcatttatagttatttttagtattgttataaaccatgcttcagtttttttaatttccacccaaaagtcattgtctatttttgtattatttgtaagttaagaagttttttccaatatatggcaaaaaaaaaaaaatagtagcatattattcttgtagtatttagttcagtagatttaaaaaaaaatgtatcctttgctttggaagcttacaaaacaaccctaatgctgttttactctattaatatgcatggaatctctccctttggagtgacgcattttgtgcattaaattctagggagaaacttcatagaaatcaatgaacatactttctttcttaagtctgcttgtatatttcctctgtctttcacataaatataaaccagcagattggatgccttaacaatgcaaatcatattcatttcacttgtacattgtaactgtgcaccagaactgtcagtcatcactaacattctaagaaaaaagaaaaagaaaaaaagaaaaaaaaaaaaaca

SEQ ID NO: 439597 - DNA, 2011 bp, Homo sapiens
cgcctttccttttgtttttctcaggttttgcgtgggaggcggtcccgggatttcaagggtctacgcgcttttctatggcgaatgcaacccgacgagggagtgggctgtatcttcagagttgtctccgtctttccaagaacagaacaaaatgaacaaggtagaacagaagtcccaggagtcagtatcatttaaagatgtgactgtgggcttcacccaggaggagtggcagcacctggaccctagtcagagggctctgtatagagatgtgatgctggagaactacagcaaccttgtctcagtggggtattgtgttcacaaaccagaggtgatcttcaggctgcaacaaggagaagagccatggaaacaggaggaagaattcccaagccaaagctttccagaagtctggacagctgatcacctgaaagagaggagccaagaaaaccaatctaaacatttgtgggaagttgtattcatcaataatgaaatgctgactaaggaacaaggtgatgtaataggaataccatttaatgtggatgcccctgagatgctcatgcccttggattaaacccctgcagtgctggaagaagaggactctgcactgcctgccacaccaggactggaagatccatggccttcccttcttccaaactaccttcccacaagatggggatggtggtcacatctccaacactagcatgctgtggaagagacatcagcattcttgcaacaaatctggaaacagcctaaagagacatttctacttcaaagagttgcactgaggaagtgcactggcactgctggggactcacctggggcccagggctgaggcttctcgtgtccttggagctgctgtcctcccgaggagtgtccacactgcagccagctcagcctcaggtgtcttctctggttttgaaaccaaatctaagtgggaaaagaagattcaagttttatccgatttagtctacataattttaagtatctatttgagctcaataccaagaatcacttccttctctctcccatctgtgatctccagaggaaaggtccccgggctaggagacactggctggcatcctaaagccagagctggccaaagggtgtgtgtccactcttccttcacctcttccccaccccacacttgtttttgtctcacgctcacttgctctttctgcctccctctcactctttaggtctcacaaaggctttggccaaagactgactgactttccttggctctctgtcatctccccatagtcaaaagcatttcataacacacaatccatgtgaagggacctctgatgaaaatccatttaaagaggagctcactaattatcaatacttactgctgagcctggaatcattcatatatacctcagagttcattcattccagatgcaatactagataaggagactcctatgaaccaaatatctaactctgaatagatagtgactgtcataatcaaaccctgtggctgcctcctccttactggagggtgtagaggaatgcagttttttgtttgtttatttgtttgttctgagattgcatcactgcactccagcctgggtgatagagtgagactctgtctcaaaacaaaacagtagaaaagaaacaaaaaccatgtgatgagaaacgggactttatggcagcactgacctcactgtcctcaatatgacctattaaagaacaagcattctgagcattctgtaatattggttccaggtatcaattacaacctatcatgatcatggtgaccctattacctatattctctagagcatgcaaatatgatttaattttctcctaccaggaaaaaggcccaatttcacttccttcccccatcaatgaatacaccagaccacatgttccatgattggtaaaaggcagagataggggtcttactttcagttcattcttaacatggtgtaattggagactgcttagcccagcttgtcttttttctttgaccccaaggaaatgaaacaaaaatacaagcccacctgtatcctag

SEQ ID NO: 439598 - DNA, 715 bp, Homo sapiens
cgcctttccttttgtttttctcaggttttgcgtgggaggcggtcccgggatttcaagggtctacgcgcttttctatggcgaatgcaacccgacgagggagtgggctgtatcttcagagttgtctccgtctttccaagaacagaacaaaatgaacaaggtagaacagaagtcccaggagtcagtatcatttaaagatgtgactgtgggcttcacccaggaggagtggcagcacctggaccctagtcagagggctctgtatagagatgtgatgctggagaactacagcaaccttgtctcagtggggtattgtgttcacaaaccagaggtgatcttcaggctgcaacaaggagaagagccatggaaacaggaggaagaattcccaagccaaagctttccaggtgagttaatatgtactgcacagattcacatcaggggatttgttgtttcccagtagttaattcagggtttggcaactttggaagatttttcaagaacatctccatagggatcctaacctctggaagtgatggagaatattgattcctaaatcaaacttccagatactactcacaaaaaattcctcctttttgaatcgttttttgaatgtttactattcttacacctgccaatagttcagtctttgcccacctcaactttactgttgtttttcttggttatcatttttctccaagcactttcagtgtcctaccttgcc

SEQ ID NO: 439599 - DNA, 480 bp, Homo sapiens
cttcctgcttcaaaggcctgaagtctagactgcttggtccaaatcctaaattatttcctgttaacagggtattgtgttcacaaaccagaggtgatcttcaggctgcaacaaggagaagagccatggaaacaggaggaagaattcccaagccaaagctttccaggctcctcttggctatggtggtttcccagactttccttgttttggatgaccttgacagttgaggagtcctggtgagaagtctggacagctgatcacctgaaagagaggagccaagaaaaccaatctaaacatttgtgggaagttgtattcatcaataatgaaatgctgactaaggaacaaggtgatgtaataggaataccatttaatgtggatgtaagttcttttccttccagaaaaatgttctgtcagtgtgattcatgtggaatgagtttcaacactgtttcagaattggttatcagtaagataaactatttagga

SEQ ID NO: 439600 - DNA, 357 bp, Homo sapiens
ctcatctgaatctaatctcgagtataaccatcagacaaacccaaattgagagacagtttacaaaacaccagccttgtactctgcttaatatgtcaatgtcacaagagagaaagacaagtctggacagctgatcacctgaaagagaggagccaagaaaaccaatctaaacatttgtgggaagttgtattcatcaataatgaaatgctgactaaggaacaaggtgatgtaataggaataccatttaatgtggatgtaagttcttttccttccagaaaaatgttctgtcagtgtgattcatgtggaatgagtttcaacactgtttcagaattggttatcagtaagataaactatttagga

SEQ ID NO: 439601 - DNA, 6564 bp, Homo sapiens
ttctgtgatttgtaaatataaatctgtagttctcagtaatattcttgaaaatggtaaatgatcaaatactttggagaccattggtctaaaattactctataacccatttccttggctttttttctcaagacagcaccaggccatctcctgtgctgtctgccattttgttgatgtctgcagtgtgttggaggccctcacctttgcttgtatcatggccctatgcttatgaagaacgtaatagagtgtttttcataattcaaccaacagctgtacttcctcagttaagctcaaaacagagccaactttgctcctaatgttagtctactgtgtttgtactttcaccttagtacttgtaacatattaccacacatattttcttaccactctgtgtgttctttgaacacaggaagatttttattaatcttagtatttccagcagtgatgatagttccaggtactttgtaggaacttgataatttcttttgcatgaattaatatcttaatgcattaatggcagaatatttctgttatgatttctttttccctaaaagtataaaacaaaacaatattctgtgaataataatcatggtaaggattagcccatacttcttttttcatgccacctaattctgaatgtttcaggtagaacagaagtcccaggagtcagtatcatttaaagatgtgactgtgggcttcacccaggaggagtggcagcacctggaccctagtcagagggctctgtatagagatgtgatgctggagaactacagcaaccttgtctcagtggggtattgtgttcacaaaccagaggtgatcttcaggctgcaacaaggagaagagccatggaaacaggaggaagaattcccaagccaaagctttccagaagtctggacagctgatcacctgaaagagaggagccaagaaaaccaatctaaacatttgtgggaagttgtattcatcaataatgaaatgctgactaaggaacaaggtgatgtaataggaataccatttaatgtggatgtaagttcttttccttccagaaaaatgttctgtcagtgtgattcatgtggaatgagtttcaacactgtttcagaattggttatcagtaagataaactatttaggaaaaaagtctgatgaatttaatgcctgtgggaaattgttactcaatattaagcatgatgaaactcatactcaagagaaaaatgaagttttgaaaaataggaacacactgagtcatcatgaggagactttgcagcatgagaagattcaaactttagagcacaattttgaatacagtatatgtcaggaaaccctccttgaaaaggcagtattcaatacacagaagagagagaacgcagaagagaataactgtgattataatgaatttgggagaactttgtgtgatagttcatccctcttgttccatcagatatctccgtcaagggacaatcactatgaatttagtgattgtgagaagttcttatgtgtgaagtccaccctttctaaacctcatggggtatctatgaaacactatgattgtggtgaaagtgggaataatttcaggaggaaattgtgtctgtcacaccttcagaaaggtgataaaggagagaaacactttgaatgtaatgaatgtgggaaagctttctgggagaagtcacatctcactcgacatcagagggtgcacacaggacagaaaccctttcaatgtaatgaatgtgaaaaagctttctgggataagtcaaacctcactaaacatcaaagatcacacacaggggagaaaccttttgaatgcaatgaatgtgggaaagcctttagccataagtcagccctcacattacaccagagaacacatacaggggagaaaccctatcaatgtaatgcgtgtgggaaaactttttgccagaaatctgacctcactaaacatcagagaacacacacagggctgaaaccctatgaatgttatgaatgtggaaaatccttccgtgtgacttcgcaccttaaagtacaccagagaactcacacaggtgagaaaccttttgaatgtcttgagtgtgggaaatcctttagtgaaaagtcaaatcttacacagcatcagagaattcacataggagataaatcttatgaatgtaatgcatgtgggaaaactttctaccacaagtcattactcaccaggcatcagataattcatacagggtggaaaccttatgaatgttatgaatgtgggaaaaccttctgcttgaagtcagacctcacagtacatcagagaacacacacagggcagaaaccctttgcatgtcccgaatgtgggaaattctttagccataagtcaaccctctctcaacattatagaacacacacaggggagaaaccctacgaatgtcatgaatgtggaaaaatcttttacaataaatcatacctaactaaacataatagaacacatacaggggagaaaccctatgaatgtaatgaatgtggaaaagccttctaccagaagtcacaactcactcagcatcagagaattcacataggggagaaaccctataaatgtaatgagtgtggaaaagctttctgccataagtcagctctaattgtacatcagagaacccatacacaagaaaagccctataaatgtaatgaatgtggaaaatctttctgtgtaaaatcaggacttattttccatgagagaaagcacacgggggagaaaccctatgaatgcaatgaatgtgggaaattcttcaggcacaaatcatcactcacagtacatcacagggctcacacaggagagaaatcttgtcaatgtaatgaatgtggaaaaatcttttaccgtaaatcggaacttgctcaacatcagagatcacatacaggggaaaagccctatgaatgtaacacatgcaggaaaactttctctcaaaagtcaaatctcattgtacatcagagaagacatataggagaaaaccttatgaatgaaatggatattagaaatttccagccacaagtcagcctccataatgcctcagagtattcacactgtggagaaagccctgatgacatcctgaatgttcagtaactatccacaaactcaccttatgttactccaaagtaatagtaggggataaacccatagactacaacaattataggacagcttttgttaggaagtgatattctatgtaatatcagatggttaatacgggcataacaccttacagattttttttgaatttgtgaaagtttttggcaaaaatgcaaataaggttatgttagaatttacactgaggagaaaattgtcaatttaagaaatctaaagtgaaaattttgcttagaaataaaatacgacaagttatgttttgagtttgatgccataatagtttttagggcacctaacaataatttatagatgtatattgtggaatgtaaagctttaagaacttaaacaaaggtaataattaaaataacctcacaagaagtttaatgagtagagagaattcccatgtacacttcaccaaacttcctctaaggataatgtataatcatagtatatggtcaagtccaagaaatcgatgttaccttgctggtagatagagacttagtcagattttactatggtttgcatgcactctgtgtgtgtgtgtacgtgtatgtgtgtgtgtgtggttatatcaaacttttacgacttttacatttgagtaaccatcaacacgattagtttacagaactgaaaaggaatctgagatctgtactgtatcaggattacaaaggatttagcctcaagtagttccctttttgtattaataaccacacgctttctgcaaccctatcccttgcatccacttgactatgaagtttttttaaagcacagataaattgaataatcagggcaatagcattaagcacatctgcgaattatccctgaagttcaaaagacttatatatgtataagtggtatgtgatataaatcgtgtgtttcatatgcataatggaatttaacgtaattgtgaataggaagtaggtatcctagtttagtagtggttacattatcaggcccatcccagatgtttgtgatgtcctgaaacaatttaaaaggagacccacagagctaatgtttatccatttaaaaggtataaatcaaaataacaaattatctaaaaaaaatctatcctgtacatgtgaagatctaggctcgcctccatgttactccctttctcttcctacctgtggctcatgccatgccatgaagtgcctagggtacatatgtgaacattccagccttcagcataagtggtagtccaaattttctttaagcagctgctctccaagacagggccctggaaaggcccacacatacagcccagggctgcccagggctgttggactgtcatttcaaggctcattgtccccagacagggatctgggccctcagacttttgagaatatgaagaggagggttgaggctggagcagaaccagaatcaagctggtgtggggcttttattgatagtgtgaagattgtacactatattacatgatcagatcatacaaataatctaagattatacagtctagtgatcctagattacacaagtaatctaagcttccactttaggaaactagaaaaagaagagcaaattaaatccaaagtaacctgaaaaaacattagagtaaaaatcattgaaattgaaaagagaaaatcgataaaacccaaaactggttccttgaaaaggtcagtaaaattgataaacctctagctagcttaagaacaaacagaagacaaatattgctaataccaaaaatgaaagaggccatcacagctaatcctatggtcaccaaaaggattagaaagaaacatggacaactctgtccataaatttgataacttagctaaaatggaccaattccttgcaagacgcattctctcaaagctcacacaagatagacctcaataggcatatgtatctattaaataaaccaaagcagtaattaataaccttccaaggccaggtacagtggttcatgcctgtaatcccagcacttcactttgggaggctgaggcgggtggatcacaaggtcaggagttcgagaccagcctggtcaacatggtgaaaccccctatctactaaaaatacaaaaaattagctgggcatggtggcatgcgtgtgtagtcgaagctactcaggaggctgaggcagaagaatcacttgaacctgggaggtggatgttgcagtgagctgagattgtgccactgtactgcagcctgggtgacagaatgagactgcatctcaaaaaataataatgaaactttccaaaacaaagtgccaggaccagctgggttcactgatgtgtttttgagatacttaaggtagaaatgataccaagtctctaccatctctttcagaaaataaaagcagagataacacttcccaactcattttgtgaggccagtattaccctaatagcaaaaccaggcaaagatattacaagaaaggaaaactacagatcaatatttccattgaacacagatgcagaaatcctcaaaatattagcaaatcaggaatgcaaggcttgttcaacatttgatattcagtgtaatccattgcatgcattagcagctcaaagatgaaatacgatcatatcaataggtacagaaaaagcatttgacaaaatccaatatccattcatgttaaaacctctcaacacagaaggaatacaggagaacttactcaagttggtaaagaacatactacaaaaaaccctacagctaacattatccttgatgtttccaactagacactttcctactaagatcaggaacatggcaaggaacaccacaccactgcttttcagcattgtactggaagtgctatataatgcagtgttaaaaaaaaaagaaataaaatgcacatagatttgaaaggatgaaatacaactttgttcacaagtaacatgattgtctttgtagagaattctaaataacaaaaaccctgctgacattaataagcaattacagcaggattgcaggatacagtcctcaggtagatgataaaaaggaattggacatcaagtcattaaaagacacggagaaaccctaaatgcttattgttaagtgaaaaccaatctgaaaaggctttctattttgtatgattgcaattatatgacattttgggagaggcaaaactattgagccagtgaaaggaccagtggttgctgagagttgaggggaaaggagggatggcaggtagagaggtgatttttaaggcagtgaaagtactctctagggtactgtaatttgtcaaaacgcagagaatggaaaacagtgaacggaaaacacagagtaaaccctaatgtcaactctggacttcagttaataataatgtatcactgttggctcattaattgtaacaaatgaaccataatgatgcaagatgttaatgattggggagcctgtggaagatgggaggggaaagggttatatgagaattctctatactttttgctcaactttctgtaaccctaaagctactctaaaaaatgaagtgtatcaagtaaataaataaccaaccaaccaa

SEQ ID NO: 439602 - DNA, 5844 bp, Homo sapiens
cttcctgcttcaaaggcctgaagtctagactgcttggtccaaatcctaaattatttcctgttaacagggtattgtgttcacaaaccagaggtgatcttcaggctgcaacaaggagaagagccatggaaacaggaggaagaattcccaagccaaagctttccagaagtctggacagctgatcacctgaaagagaggagccaagaaaaccaatctaaacatttgtgggaagttgtattcatcaataatgaaatgctgactaaggaacaaggtgatgtaataggaataccatttaatgtggatgtaagttcttttccttccagaaaaatgttctgtcagtgtgattcatgtggaatgagtttcaacactgtttcagaattggttatcagtaagataaactatttaggaaaaaagtctgatgaatttaatgcctgtgggaaattgttactcaatattaagcatgatgaaactcatactcaagagaaaaatgaagttttgaaaaataggaacacactgagtcatcatgaggagactttgcagcatgagaagattcaaactttagagcacaattttgaatacagtatatgtcaggaaaccctccttgaaaaggcagtattcaatacacagaagagagagaacgcagaagagaataactgtgattataatgaatttgggagaactttgtgtgatagttcatccctcttgttccatcagatatctccgtcaagggacaatcactatgaatttagtgattgtgagaagttcttatgtgtgaagtccaccctttctaaacctcatggggtatctatgaaacactatgattgtggtgaaagtgggaataatttcaggaggaaattgtgtctgtcacaccttcagaaaggtgataaaggagagaaacactttgaatgtaatgaatgtgggaaagctttctgggagaagtcacatctcactcgacatcagagggtgcacacaggacagaaaccctttcaatgtaatgaatgtgaaaaagctttctgggataagtcaaacctcactaaacatcaaagatcacacacaggggagaaaccttttgaatgcaatgaatgtgggaaagcctttagccataagtcagccctcacattacaccagagaacacatacaggggagaaaccctatcaatgtaatgcgtgtgggaaaactttttgccagaaatctgacctcactaaacatcagagaacacacacagggctgaaaccctatgaatgttatgaatgtggaaaatccttccgtgtgacttcgcaccttaaagtacaccagagaactcacacaggtgagaaaccttttgaatgtcttgagtgtgggaaatcctttagtgaaaagtcaaatcttacacagcatcagagaattcacataggagataaatcttatgaatgtaatgcatgtgggaaaactttctaccacaagtcattactcaccaggcatcagataattcatacagggtggaaaccttatgaatgttatgaatgtgggaaaaccttctgcttgaagtcagacctcacagtacatcagagaacacacacagggcagaaaccctttgcatgtcccgaatgtgggaaattctttagccataagtcaaccctctctcaacattatagaacacacacaggggagaaaccctacgaatgtcatgaatgtggaaaaatcttttacaataaatcatacctaactaaacataatagaacacatacaggggagaaaccctatgaatgtaatgaatgtggaaaagccttctaccagaagtcacaactcactcagcatcagagaattcacataggggagaaaccctataaatgtaatgagtgtggaaaagctttctgccataagtcagctctaattgtacatcagagaacccatacacaagaaaagccctataaatgtaatgaatgtggaaaatctttctgtgtaaaatcaggacttattttccatgagagaaagcacacgggggagaaaccctatgaatgcaatgaatgtgggaaattcttcaggcacaaatcatcactcacagtacatcacagggctcacacaggagagaaatcttgtcaatgtaatgaatgtggaaaaatcttttaccgtaaatcggaacttgctcaacatcagagatcacatacaggggaaaagccctatgaatgtaacacatgcaggaaaactttctctcaaaagtcaaatctcattgtacatcagagaagacatataggagaaaaccttatgaatgaaatggatattagaaatttccagccacaagtcagcctccataatgcctcagagtattcacactgtggagaaagccctgatgacatcctgaatgttcagtaactatccacaaactcaccttatgttactccaaagtaatagtaggggataaacccatagactacaacaattataggacagcttttgttaggaagtgatattctatgtaatatcagatggttaatacgggcataacaccttacagattttttttgaatttgtgaaagtttttggcaaaaatgcaaataaggttatgttagaatttacactgaggagaaaattgtcaatttaagaaatctaaagtgaaaattttgcttagaaataaaatacgacaagttatgttttgagtttgatgccataatagtttttagggcacctaacaataatttatagatgtatattgtggaatgtaaagctttaagaacttaaacaaaggtaataattaaaataacctcacaagaagtttaatgagtagagagaattcccatgtacacttcaccaaacttcctctaaggataatgtataatcatagtatatggtcaagtccaagaaatcgatgttaccttgctggtagatagagacttagtcagattttactatggtttgcatgcactctgtgtgtgtgtgtacgtgtatgtgtgtgtgtgtggttatatcaaacttttacgacttttacatttgagtaaccatcaacacgattagtttacagaactgaaaaggaatctgagatctgtactgtatcaggattacaaaggatttagcctcaagtagttccctttttgtattaataaccacacgctttctgcaaccctatcccttgcatccacttgactatgaagtttttttaaagcacagataaattgaataatcagggcaatagcattaagcacatctgcgaattatccctgaagttcaaaagacttatatatgtataagtggtatgtgatataaatcgtgtgtttcatatgcataatggaatttaacgtaattgtgaataggaagtaggtatcctagtttagtagtggttacattatcaggcccatcccagatgtttgtgatgtcctgaaacaatttaaaaggagacccacagagctaatgtttatccatttaaaaggtataaatcaaaataacaaattatctaaaaaaaatctatcctgtacatgtgaagatctaggctcgcctccatgttactccctttctcttcctacctgtggctcatgccatgccatgaagtgcctagggtacatatgtgaacattccagccttcagcataagtggtagtccaaattttctttaagcagctgctctccaagacagggccctggaaaggcccacacatacagcccagggctgcccagggctgttggactgtcatttcaaggctcattgtccccagacagggatctgggccctcagacttttgagaatatgaagaggagggttgaggctggagcagaaccagaatcaagctggtgtggggcttttattgatagtgtgaagattgtacactatattacatgatcagatcatacaaataatctaagattatacagtctagtgatcctagattacacaagtaatctaagcttccactttaggaaactagaaaaagaagagcaaattaaatccaaagtaacctgaaaaaacattagagtaaaaatcattgaaattgaaaagagaaaatcgataaaacccaaaactggttccttgaaaaggtcagtaaaattgataaacctctagctagcttaagaacaaacagaagacaaatattgctaataccaaaaatgaaagaggccatcacagctaatcctatggtcaccaaaaggattagaaagaaacatggacaactctgtccataaatttgataacttagctaaaatggaccaattccttgcaagacgcattctctcaaagctcacacaagatagacctcaataggcatatgtatctattaaataaaccaaagcagtaattaataaccttccaaggccaggtacagtggttcatgcctgtaatcccagcacttcactttgggaggctgaggcgggtggatcacaaggtcaggagttcgagaccagcctggtcaacatggtgaaaccccctatctactaaaaatacaaaaaattagctgggcatggtggcatgcgtgtgtagtcgaagctactcaggaggctgaggcagaagaatcacttgaacctgggaggtggatgttgcagtgagctgagattgtgccactgtactgcagcctgggtgacagaatgagactgcatctcaaaaaataataatgaaactttccaaaacaaagtgccaggaccagctgggttcactgatgtgtttttgagatacttaaggtagaaatgataccaagtctctaccatctctttcagaaaataaaagcagagataacacttcccaactcattttgtgaggccagtattaccctaatagcaaaaccaggcaaagatattacaagaaaggaaaactacagatcaatatttccattgaacacagatgcagaaatcctcaaaatattagcaaatcaggaatgcaaggcttgttcaacatttgatattcagtgtaatccattgcatgcattagcagctcaaagatgaaatacgatcatatcaataggtacagaaaaagcatttgacaaaatccaatatccattcatgttaaaacctctcaacacagaaggaatacaggagaacttactcaagttggtaaagaacatactacaaaaaaccctacagctaacattatccttgatgtttccaactagacactttcctactaagatcaggaacatggcaaggaacaccacaccactgcttttcagcattgtactggaagtgctatataatgcagtgttaaaaaaaaaagaaataaaatgcacatagatttgaaaggatgaaatacaactttgttcacaagtaacatgattgtctttgtagagaattctaaataacaaaaaccctgctgacattaataagcaattacagcaggattgcaggatacagtcctcaggtagatgataaaaaggaattggacatcaagtcattaaaagacacggagaaaccctaaatgcttattgttaagtgaaaaccaatctgaaaaggctttctattttgtatgattgcaattatatgacattttgggagaggcaaaactattgagccagtgaaaggaccagtggttgctgagagttgaggggaaaggagggatggcaggtagagaggtgatttttaaggcagtgaaagtactctctagggtactgtaatttgtcaaaacgcagagaatggaaaacagtgaacggaaaacacagagtaaaccctaatgtcaactctggacttcagttaataataatgtatcactgttggctcattaattgtaacaaatgaaccataatgatgcaagatgttaatgattggggagcctgtggaagatgggaggggaaagggttatatgagaattctctatactttttgctcaactttctgtaaccctaaagctactctaaaaaatgaagtgtatcaagtaaataaataaccaaccaaccaa

SEQ ID NO: 439603 - DNA, 6295 bp, Homo sapiens
cgcctttccttttgtttttctcaggttttgcgtgggaggcggtcccgggatttcaagggtctacgcgcttttctatggcgaatgcaacccgacgagggagtgggctgtatcttcagagttgtctccgtctttccaagaacagaacaaaatgaacaaggtagaacagaagtcccaggagtcagtatcatttaaagatgtgactgtgggcttcacccaggaggagtggcagcacctggaccctagtcagagggctctgtatagagatgtgatgctggagaactacagcaaccttgtctcagtggggtattgtgttcacaaaccagaggtgatcttcaggctgcaacaaggagaagagccatggaaacaggaggaagaattcccaagccaaagctttccagaagtctggacagctgatcacctgaaagagaggagccaagaaaaccaatctaaacatttgtgggaagttgtattcatcaataatgaaatgctgactaaggaacaaggtgatgtaataggaataccatttaatgtggatgtaagttcttttccttccagaaaaatgttctgtcagtgtgattcatgtggaatgagtttcaacactgtttcagaattggttatcagtaagataaactatttaggaaaaaagtctgatgaatttaatgcctgtgggaaattgttactcaatattaagcatgatgaaactcatactcaagagaaaaatgaagttttgaaaaataggaacacactgagtcatcatgaggagactttgcagcatgagaagattcaaactttagagcacaattttgaatacagtatatgtcaggaaaccctccttgaaaaggcagtattcaatacacagaagagagagaacgcagaagagaataactgtgattataatgaatttgggagaactttgtgtgatagttcatccctcttgttccatcagatatctccgtcaagggacaatcactatgaatttagtgattgtgagaagttcttatgtgtgaagtccaccctttctaaacctcatggggtatctatgaaacactatgattgtggtgaaagtgggaataatttcaggaggaaattgtgtctgtcacaccttcagaaaggtgataaaggagagaaacactttgaatgtaatgaatgtgggaaagctttctgggagaagtcacatctcactcgacatcagagggtgcacacaggacagaaaccctttcaatgtaatgaatgtgaaaaagctttctgggataagtcaaacctcactaaacatcaaagatcacacacaggggagaaaccttttgaatgcaatgaatgtgggaaagcctttagccataagtcagccctcacattacaccagagaacacatacaggggagaaaccctatcaatgtaatgcgtgtgggaaaactttttgccagaaatctgacctcactaaacatcagagaacacacacagggctgaaaccctatgaatgttatgaatgtggaaaatccttccgtgtgacttcgcaccttaaagtacaccagagaactcacacaggtgagaaaccttttgaatgtcttgagtgtgggaaatcctttagtgaaaagtcaaatcttacacagcatcagagaattcacataggagataaatcttatgaatgtaatgcatgtgggaaaactttctaccacaagtcattactcaccaggcatcagataattcatacagggtggaaaccttatgaatgttatgaatgtgggaaaaccttctgcttgaagtcagacctcacagtacatcagagaacacacacagggcagaaaccctttgcatgtcccgaatgtgggaaattctttagccataagtcaaccctctctcaacattatagaacacacacaggggagaaaccctacgaatgtcatgaatgtggaaaaatcttttacaataaatcatacctaactaaacataatagaacacatacaggggagaaaccctatgaatgtaatgaatgtggaaaagccttctaccagaagtcacaactcactcagcatcagagaattcacataggggagaaaccctataaatgtaatgagtgtggaaaagctttctgccataagtcagctctaattgtacatcagagaacccatacacaagaaaagccctataaatgtaatgaatgtggaaaatctttctgtgtaaaatcaggacttattttccatgagagaaagcacacgggggagaaaccctatgaatgcaatgaatgtgggaaattcttcaggcacaaatcatcactcacagtacatcacagggctcacacaggagagaaatcttgtcaatgtaatgaatgtggaaaaatcttttaccgtaaatcggaacttgctcaacatcagagatcacatacaggggaaaagccctatgaatgtaacacatgcaggaaaactttctctcaaaagtcaaatctcattgtacatcagagaagacatataggagaaaaccttatgaatgaaatggatattagaaatttccagccacaagtcagcctccataatgcctcagagtattcacactgtggagaaagccctgatgacatcctgaatgttcagtaactatccacaaactcaccttatgttactccaaagtaatagtaggggataaacccatagactacaacaattataggacagcttttgttaggaagtgatattctatgtaatatcagatggttaatacgggcataacaccttacagattttttttgaatttgtgaaagtttttggcaaaaatgcaaataaggttatgttagaatttacactgaggagaaaattgtcaatttaagaaatctaaagtgaaaattttgcttagaaataaaatacgacaagttatgttttgagtttgatgccataatagtttttagggcacctaacaataatttatagatgtatattgtggaatgtaaagctttaagaacttaaacaaaggtaataattaaaataacctcacaagaagtttaatgagtagagagaattcccatgtacacttcaccaaacttcctctaaggataatgtataatcatagtatatggtcaagtccaagaaatcgatgttaccttgctggtagatagagacttagtcagattttactatggtttgcatgcactctgtgtgtgtgtgtacgtgtatgtgtgtgtgtgtggttatatcaaacttttacgacttttacatttgagtaaccatcaacacgattagtttacagaactgaaaaggaatctgagatctgtactgtatcaggattacaaaggatttagcctcaagtagttccctttttgtattaataaccacacgctttctgcaaccctatcccttgcatccacttgactatgaagtttttttaaagcacagataaattgaataatcagggcaatagcattaagcacatctgcgaattatccctgaagttcaaaagacttatatatgtataagtggtatgtgatataaatcgtgtgtttcatatgcataatggaatttaacgtaattgtgaataggaagtaggtatcctagtttagtagtggttacattatcaggcccatcccagatgtttgtgatgtcctgaaacaatttaaaaggagacccacagagctaatgtttatccatttaaaaggtataaatcaaaataacaaattatctaaaaaaaatctatcctgtacatgtgaagatctaggctcgcctccatgttactccctttctcttcctacctgtggctcatgccatgccatgaagtgcctagggtacatatgtgaacattccagccttcagcataagtggtagtccaaattttctttaagcagctgctctccaagacagggccctggaaaggcccacacatacagcccagggctgcccagggctgttggactgtcatttcaaggctcattgtccccagacagggatctgggccctcagacttttgagaatatgaagaggagggttgaggctggagcagaaccagaatcaagctggtgtggggcttttattgatagtgtgaagattgtacactatattacatgatcagatcatacaaataatctaagattatacagtctagtgatcctagattacacaagtaatctaagcttccactttaggaaactagaaaaagaagagcaaattaaatccaaagtaacctgaaaaaacattagagtaaaaatcattgaaattgaaaagagaaaatcgataaaacccaaaactggttccttgaaaaggtcagtaaaattgataaacctctagctagcttaagaacaaacagaagacaaatattgctaataccaaaaatgaaagaggccatcacagctaatcctatggtcaccaaaaggattagaaagaaacatggacaactctgtccataaatttgataacttagctaaaatggaccaattccttgcaagacgcattctctcaaagctcacacaagatagacctcaataggcatatgtatctattaaataaaccaaagcagtaattaataaccttccaaggccaggtacagtggttcatgcctgtaatcccagcacttcactttgggaggctgaggcgggtggatcacaaggtcaggagttcgagaccagcctggtcaacatggtgaaaccccctatctactaaaaatacaaaaaattagctgggcatggtggcatgcgtgtgtagtcgaagctactcaggaggctgaggcagaagaatcacttgaacctgggaggtggatgttgcagtgagctgagattgtgccactgtactgcagcctgggtgacagaatgagactgcatctcaaaaaataataatgaaactttccaaaacaaagtgccaggaccagctgggttcactgatgtgtttttgagatacttaaggtagaaatgataccaagtctctaccatctctttcagaaaataaaagcagagataacacttcccaactcattttgtgaggccagtattaccctaatagcaaaaccaggcaaagatattacaagaaaggaaaactacagatcaatatttccattgaacacagatgcagaaatcctcaaaatattagcaaatcaggaatgcaaggcttgttcaacatttgatattcagtgtaatccattgcatgcattagcagctcaaagatgaaatacgatcatatcaataggtacagaaaaagcatttgacaaaatccaatatccattcatgttaaaacctctcaacacagaaggaatacaggagaacttactcaagttggtaaagaacatactacaaaaaaccctacagctaacattatccttgatgtttccaactagacactttcctactaagatcaggaacatggcaaggaacaccacaccactgcttttcagcattgtactggaagtgctatataatgcagtgttaaaaaaaaaagaaataaaatgcacatagatttgaaaggatgaaatacaactttgttcacaagtaacatgattgtctttgtagagaattctaaataacaaaaaccctgctgacattaataagcaattacagcaggattgcaggatacagtcctcaggtagatgataaaaaggaattggacatcaagtcattaaaagacacggagaaaccctaaatgcttattgttaagtgaaaaccaatctgaaaaggctttctattttgtatgattgcaattatatgacattttgggagaggcaaaactattgagccagtgaaaggaccagtggttgctgagagttgaggggaaaggagggatggcaggtagagaggtgatttttaaggcagtgaaagtactctctagggtactgtaatttgtcaaaacgcagagaatggaaaacagtgaacggaaaacacagagtaaaccctaatgtcaactctggacttcagttaataataatgtatcactgttggctcattaattgtaacaaatgaaccataatgatgcaagatgttaatgattggggagcctgtggaagatgggaggggaaagggttatatgagaattctctatactttttgctcaactttctgtaaccctaaagctactctaaaaaatgaagtgtatcaagtaaataaataaccaaccaaccaaccctgaggaacatcttgtttctgtactaaggtgttcttttgttagttgtatgtttctgactgaacatgtaaatcatcattagtgaacaattgaattgcttttgtacatccttaatatattttaaattatggtaactgtgacctgaaattaaggactagtatttttggttctcttgacatctgaagccaatagggcctcaaatgacctaacctcatt

SEQ ID NO: 439604 - DNA, 2041 bp, Homo sapiens
  misc_feature (1094)..(1094): n is a, c, g, or t
  misc_feature (1334)..(1334): n is a, c, g, or t
  misc_feature (1595)..(1595): n is a, c, g, or t
ttctgtgatttgtaaatataaatctgtagttctcagtaatattcttgaaaatggtaaatgatcaaatactttggagaccattggtctaaaattactctataacccatttccttggctttttttctcaagacagcaccaggccatctcctgtgctgtctgccattttgttgatgtctgcagtgtgttggaggccctcacctttgcttgtatcatggccctatgcttatgaagaacgtaatagagtgtttttcataattcaaccaacagctgtacttcctcagttaagctcaaaacagagccaactttgctcctaatgttagtctactgtgtttgtactttcaccttagtacttgtaacatattaccacacatattttcttaccactctgtgtgttctttgaacacaggaagatttttattaatcttagtatttccagcagtgatgatagttccaggtactttgtaggaacttgataatttcttttgcatgaattaatatcttaatgcattaatggcagaatatttctgttatgatttctttttccctaaaagtataaaacaaaacaatattctgtgaataataatcatggtaaggattagcccatacttcttttttcatgccacctaattctgaatgtttcaggtagaacagaagtcccaggagtcagtatcatttaaagatgtgactgtgggcttcacccaggaggagtggcagcacctggaccctagtcagagggctctgtatagagatgtgatgctggagaactacagcaaccttgtctcagtggggtattgtgttcacaaaccagaggtgatcttcaggctgcaacaaggagaagagccatggaaacaggaggaagaattcccaagccaaagctttccagagatggggtttcaccatgttcctgggctggtcttaaactcctgagttcaagtgatccacctgccttggcctcccaaagtggtaggattacaggcatgagccacagcatcccacctgtaatggggagttttaaatttacaacttcaatctttttacttgtgtaggtcttttcagatttttctttttctacttgagttggttttagttgtttntgttttatggattttcccattttgttgaagttaaataatttgttggcatacattgttcataccattctttgtaattatttttatttctgtaagagtactagtaatacatctttaatccctacttttagtaatttgaaccttctctctcttttttttctttttcaatgtcagtctagctagaggtttgtatattttgttgatcttttccaggaatcagctattgtttttctgttctctagntcattaatttttactctataatctttctgctttcctgccttctgcttgatttggttttgtattgctgctcctgtccaagtgttttaaggtggaaaattagtttactgatttgagatctttttaaatatggttattacagctacaaatctctaaggattgctttatctgtgttccataagtttgagtatgtcttcatttttatctcaaagcattttttctaattttccttcttattgcttctttaacttttttttttaactncggaatatgttatataatttgtgcatgtttgtgcattctaaaaattcctttgtcttactgatttgtaattcgactgtggtcagagaatcattttaaatttattctggggaatgtttcatgtgtacttttgaagcatacctgctccactgttcgagtggaatgttctgtctatatctcttagatctggttgctttagagtgtcatctatatcttctgtttccatgtttatattgtgcccagttgtcctaaccattattgaaaatggggtattacagtttgcaataagtattgtagacttgtatatttttttcttttaattctgtcagtttttgctacacatactttgaggctctgttagtagtacatacgcttagaattgttatgtctcctttattgattgacccttttattgttatattaataaaattcccctctttatccttagt

SEQ ID NO: 439605 - DNA, 2251 bp, Homo sapiens
gaagcagacatagcttggtaatctgtggtgtattctcggaaggtaccacttgaatgggaaagaggagacagacaaagacaaccaagaggcttgaacttgacaaaaattatttataacaaaatgggcagctttgtgcatagaggtgcatgtaaatatatacaaaatgctaatagtatcagaagatgaacatcctgctttgttcagtgatttcatggagttgttttgcatttccttgtcatgttctctgtctacatgtttaaagggaggattacatgtgaacactatccggtattatgcatctaagcttgtgttaccaatcattggtagatagatagtgaggtaacttctagttcccatctcctctggtaagagctaagatgcaaactctttgtgatgaactgacatcaagatgaaatatagcacccctgttttctctgcgtcagtctgccttcaggctcaccctgtgaactcaccaaagggagtgaagtgtggatgtgtctcttttacctattttcaccttggttcagttctggtttatgcattgtccagactacccaggatgtgacgattgcagggaggaggtcatgtttgtcataaaaatgctttggctccttaggattcagcaaaggtatccactgcctggtgtctgtggtgcctgcaggacagtgcattctgtaggaaaacaggaagaaaagagggctttcaggccatcttcacatcaaccctacgacagacattttcaaatattgttctcaccatccttactccctcccaggcccctgagatgctcatgcccttggattaaacccctgcagtgctggaagaagaggactctgcactgcctgccacaccaggactggaagatccatggccttcccttcttccaaactaccttcccacaagatggggatggtggtcacatctccaacactagcatgctgtggaagagacatcagcattcttgcaacaaatctggaaacagcctaaagagacatttctacttcaaagagttgcactgaggaagtgcactggcactgctggggactcacctggggcccagggctgaggcttctcgtgtccttggagctgctgtcctcccgaggagtgtccacactgcagccagctcagcctcaggtgtcttctctggttttgaaaccaaatctaagtgggaaaagaagattcaagttttatccgatttagtctacataattttaagtatctatttgagctcaataccaagaatcacttccttctctctcccatctgtgatctccagaggaaaggtccccgggctaggagacactggctggcatcctaaagccagagctggccaaagggtgtgtgtccactcttccttcacctcttccccaccccacacttgtttttgtctcacgctcacttgctctttctgcctccctctcactctttaggtctcacaaaggctttggccaaagactgactgactttccttggctctctgtcatctccccatagtcaaaagcatttcataacacacaatccatgtgaagggacctctgatgaaaatccatttaaagaggagctcactaattatcaatacttactgctgagcctggaatcattcatatatacctcagagttcattcattccagatgcaatactagataaggagactcctatgaaccaaatatctaactctgaatagatagtgactgtcataatcaaaccctgtggctgcctcctccttactggagggtgtagaggaatgcagttttttgtttgtttatttgtttgttctgagattgcatcactgcactccagcctgggtgatagagtgagactctgtctcaaaacaaaacagtagaaaagaaacaaaaaccatgtgatgagaaacgggactttatggcagcactgacctcactgtcctcaatatgacctattaaagaacaagcattctgagcattctgtaatattggttccaggtatcaattacaacctatcatgatcatggtgaccctattacctatattctctagagcatgcaaatatgatttaattttctcctaccaggaaaaaggcccaatttcacttccttcccccatcaatgaatacaccagaccacatgttccatgattggtaaaaggcagagataggggtcttactttcagttcattcttaacatggtgtaattggagactgcttagcccagcttgtcttttttctttgaccccaaggaaatgaaacaaaaatacaagcccacctgtatcctag

SEQ ID NO: 439606 - DNA, 1176 bp, Homo sapiens
ttctgtgatttgtaaatataaatctgtagttctcagtaatattcttgaaaatggtaaatgatcaaatactttggagaccattggtctaaaattactctataacccatttccttggctttttttctcaagacagcaccaggccatctcctgtgctgtctgccattttgttgatgtctgcagtgtgttggaggccctcacctttgcttgtatcatggccctatgcttatgaagaacgtaatagagtgtttttcataattcaaccaacagctgtacttcctcagttaagctcaaaacagagccaactttgctcctaatgttagtctactgtgtttgtactttcaccttagtacttgtaacatattaccacacatattttcttaccactctgtgtgttctttgaacacaggaagatttttattaatcttagtatttccagcagtgatgatagttccaggtactttgtaggaacttgataatttcttttgcatgaattaatatcttaatgcattaatggcagaatatttctgttatgatttctttttccctaaaagtataaaacaaaacaatattctgtgaataataatcatggtaaggattagcccatacttcttttttcatgccacctaattctgaatgtttcaggtagaacagaagtcccaggagtcagtatcatttaaagatgtgactgtgggcttcacccaggaggagtggcagcacctggaccctagtcagagggctctgtatagagatgtgatgctggagaactacagcaaccttgtctcagtggggtattgtgttcacaaaccagaggtgatcttcaggctgcaacaaggagaagagccatggaaacaggaggaagaattcccaagccaaagctttccaggctcctcttggctatggtggtttcccagactttccttgttttggatgaccttgacagttgaggagtcctggtgaggtatatataaattccatttattgggatgtgtctgatgtttttctcaagataagactgggattataggttttgggggaaaaagcccacagtggtaaagtaccttttttgtcacattatatcaagcatgcatactgtcaccatgttttatgacttttgatgttggcctgaaatgtcttggcaaacagagtttgtccactataaagttacatctttttcct

SEQ ID NO: 439607 - DNA, 6079 bp, Homo sapiens
cgcctttccttttgtttttctcaggttttgcgtgggaggcggtcccgggatttcaagggtctacgcgcttttctatggcgaatgcaacccgacgagggagtgggctgtatcttcagagttgtctccgtctttccaagaacagaacaaaatgaacaaggtagaacagaagtcccaggagtcagtatcatttaaagatgtgactgtgggcttcacccaggaggagtggcagcacctggaccctagtcagagggctctgtatagagatgtgatgctggagaactacagcaaccttgtctcagtggggtattgtgttcacaaaccagaggtgatcttcaggctgcaacaaggagaagagccatggaaacaggaggaagaattcccaagccaaagctttccagaagtctggacagctgatcacctgaaagagaggagccaagaaaaccaatctaaacatttgtgggaagttgtattcatcaataatgaaatgctgactaaggaacaaggtgatgtaataggaataccatttaatgtggatgtaagttcttttccttccagaaaaatgttctgtcagtgtgattcatgtggaatgagtttcaacactgtttcagaattggttatcagtaagataaactatttaggaaaaaagtctgatgaatttaatgcctgtgggaaattgttactcaatattaagcatgatgaaactcatactcaagagaaaaatgaagttttgaaaaataggaacacactgagtcatcatgaggagactttgcagcatgagaagattcaaactttagagcacaattttgaatacagtatatgtcaggaaaccctccttgaaaaggcagtattcaatacacagaagagagagaacgcagaagagaataactgtgattataatgaatttgggagaactttgtgtgatagttcatccctcttgttccatcagatatctccgtcaagggacaatcactatgaatttagtgattgtgagaagttcttatgtgtgaagtccaccctttctaaacctcatggggtatctatgaaacactatgattgtggtgaaagtgggaataatttcaggaggaaattgtgtctgtcacaccttcagaaaggtgataaaggagagaaacactttgaatgtaatgaatgtgggaaagctttctgggagaagtcacatctcactcgacatcagagggtgcacacaggacagaaaccctttcaatgtaatgaatgtgaaaaagctttctgggataagtcaaacctcactaaacatcaaagatcacacacaggggagaaaccttttgaatgcaatgaatgtgggaaagcctttagccataagtcagccctcacattacaccagagaacacatacaggggagaaaccctatcaatgtaatgcgtgtgggaaaactttttgccagaaatctgacctcactaaacatcagagaacacacacagggctgaaaccctatgaatgttatgaatgtggaaaatccttccgtgtgacttcgcaccttaaagtacaccagagaactcacacaggtgagaaaccttttgaatgtcttgagtgtgggaaatcctttagtgaaaagtcaaatcttacacagcatcagagaattcacataggagataaatcttatgaatgtaatgcatgtgggaaaactttctaccacaagtcattactcaccaggcatcagataattcatacagggtggaaaccttatgaatgttatgaatgtgggaaaaccttctgcttgaagtcagacctcacagtacatcagagaacacacacagggcagaaaccctttgcatgtcccgaatgtgggaaattctttagccataagtcaaccctctctcaacattatagaacacacacaggggagaaaccctacgaatgtcatgaatgtggaaaaatcttttacaataaatcatacctaactaaacataatagaacacatacaggggagaaaccctatgaatgtaatgaatgtggaaaagccttctaccagaagtcacaactcactcagcatcagagaattcacataggggagaaaccctataaatgtaatgagtgtggaaaagctttctgccataagtcagctctaattgtacatcagagaacccatacacaagaaaagccctataaatgtaatgaatgtggaaaatctttctgtgtaaaatcaggacttattttccatgagagaaagcacacgggggagaaaccctatgaatgcaatgaatgtgggaaattcttcaggcacaaatcatcactcacagtacatcacagggctcacacaggagagaaatcttgtcaatgtaatgaatgtggaaaaatcttttaccgtaaatcggaacttgctcaacatcagagatcacatacaggggaaaagccctatgaatgtaacacatgcaggaaaactttctctcaaaagtcaaatctcattgtacatcagagaagacatataggagaaaaccttatgaatgaaatggatattagaaatttccagccacaagtcagcctccataatgcctcagagtattcacactgtggagaaagccctgatgacatcctgaatgttcagtaactatccacaaactcaccttatgttactccaaagtaatagtaggggataaacccatagactacaacaattataggacagcttttgttaggaagtgatattctatgtaatatcagatggttaatacgggcataacaccttacagattttttttgaatttgtgaaagtttttggcaaaaatgcaaataaggttatgttagaatttacactgaggagaaaattgtcaatttaagaaatctaaagtgaaaattttgcttagaaataaaatacgacaagttatgttttgagtttgatgccataatagtttttagggcacctaacaataatttatagatgtatattgtggaatgtaaagctttaagaacttaaacaaaggtaataattaaaataacctcacaagaagtttaatgagtagagagaattcccatgtacacttcaccaaacttcctctaaggataatgtataatcatagtatatggtcaagtccaagaaatcgatgttaccttgctggtagatagagacttagtcagattttactatggtttgcatgcactctgtgtgtgtgtgtacgtgtatgtgtgtgtgtgtggttatatcaaacttttacgacttttacatttgagtaaccatcaacacgattagtttacagaactgaaaaggaatctgagatctgtactgtatcaggattacaaaggatttagcctcaagtagttccctttttgtattaataaccacacgctttctgcaaccctatcccttgcatccacttgactatgaagtttttttaaagcacagataaattgaataatcagggcaatagcattaagcacatctgcgaattatccctgaagttcaaaagacttatatatgtataagtggtatgtgatataaatcgtgtgtttcatatgcataatggaatttaacgtaattgtgaataggaagtaggtatcctagtttagtagtggttacattatcaggcccatcccagatgtttgtgatgtcctgaaacaatttaaaaggagacccacagagctaatgtttatccatttaaaaggtataaatcaaaataacaaattatctaaaaaaaatctatcctgtacatgtgaagatctaggctcgcctccatgttactccctttctcttcctacctgtggctcatgccatgccatgaagtgcctagggtacatatgtgaacattccagccttcagcataagtggtagtccaaattttctttaagcagctgctctccaagacagggccctggaaaggcccacacatacagcccagggctgcccagggctgttggactgtcatttcaaggctcattgtccccagacagggatctgggccctcagacttttgagaatatgaagaggagggttgaggctggagcagaaccagaatcaagctggtgtggggcttttattgatagtgtgaagattgtacactatattacatgatcagatcatacaaataatctaagattatacagtctagtgatcctagattacacaagtaatctaagcttccactttaggaaactagaaaaagaagagcaaattaaatccaaagtaacctgaaaaaacattagagtaaaaatcattgaaattgaaaagagaaaatcgataaaacccaaaactggttccttgaaaaggtcagtaaaattgataaacctctagctagcttaagaacaaacagaagacaaatattgctaataccaaaaatgaaagaggccatcacagctaatcctatggtcaccaaaaggattagaaagaaacatggacaactctgtccataaatttgataacttagctaaaatggaccaattccttgcaagacgcattctctcaaagctcacacaagatagacctcaataggcatatgtatctattaaataaaccaaagcagtaattaataaccttccaaggccaggtacagtggttcatgcctgtaatcccagcacttcactttgggaggctgaggcgggtggatcacaaggtcaggagttcgagaccagcctggtcaacatggtgaaaccccctatctactaaaaatacaaaaaattagctgggcatggtggcatgcgtgtgtagtcgaagctactcaggaggctgaggcagaagaatcacttgaacctgggaggtggatgttgcagtgagctgagattgtgccactgtactgcagcctgggtgacagaatgagactgcatctcaaaaaataataatgaaactttccaaaacaaagtgccaggaccagctgggttcactgatgtgtttttgagatacttaaggtagaaatgataccaagtctctaccatctctttcagaaaataaaagcagagataacacttcccaactcattttgtgaggccagtattaccctaatagcaaaaccaggcaaagatattacaagaaaggaaaactacagatcaatatttccattgaacacagatgcagaaatcctcaaaatattagcaaatcaggaatgcaaggcttgttcaacatttgatattcagtgtaatccattgcatgcattagcagctcaaagatgaaatacgatcatatcaataggtacagaaaaagcatttgacaaaatccaatatccattcatgttaaaacctctcaacacagaaggaatacaggagaacttactcaagttggtaaagaacatactacaaaaaaccctacagctaacattatccttgatgtttccaactagacactttcctactaagatcaggaacatggcaaggaacaccacaccactgcttttcagcattgtactggaagtgctatataatgcagtgttaaaaaaaaaagaaataaaatgcacatagatttgaaaggatgaaatacaactttgttcacaagtaacatgattgtctttgtagagaattctaaataacaaaaaccctgctgacattaataagcaattacagcaggattgcaggatacagtcctcaggtagatgataaaaaggaattggacatcaagtcattaaaagacacggagaaaccctaaatgcttattgttaagtgaaaaccaatctgaaaaggctttctattttgtatgattgcaattatatgacattttgggagaggcaaaactattgagccagtgaaaggaccagtggttgctgagagttgaggggaaaggagggatggcaggtagagaggtgatttttaaggcagtgaaagtactctctagggtactgtaatttgtcaaaacgcagagaatggaaaacagtgaacggaaaacacagagtaaaccctaatgtcaactctggacttcagttaataataatgtatcactgttggctcattaattgtaacaaatgaaccataatgatgcaagatgttaatgattggggagcctgtggaagatgggaggggaaagggttatatgagaattctctatactttttgctcaactttctgtaaccctaaagctactctaaaaaatgaagtgtatcaagtaaataaataaccaaccaaccaa

SEQ ID NO: 439608 - DNA, 640 bp, Homo sapiens
cgcctttccttttgtttttctcaggttttgcgtgggaggcggtcccgggatttcaagggtctacgcgcttttctatggcgaatgcaacccgacgagggagtgggctgtatcttcagagttgtctccgtctttccaagaacagaacaaaatgaacaaggtagaacagaagtcccaggagtcagtatcatttaaagatgtgactgtgggcttcacccaggaggagtggcagcacctggaccctagtcagagggctctgtatagagatgtgatgctggagaactacagcaaccttgtctcagtggggtattgtgttcacaaaccagaggtgatcttcaggctgcaacaaggagaagagccatggaaacaggaggaagaattcccaagccaaagctttccagaagtctggacagctgatcacctgaaagagaggagccaagaaaaccaatctaaacatttgtgggaagttgtattcatcaataatgaaatgctgactaaggaacaaggtgatgtaataggaataccatttaatgtggatgtaagttcttttccttccagaaaaatgttctgtcagtgtgattcatgtggaatgagtttcaacactgtttcagaattggttatcagtaagataaactatttagga

SEQ ID NO: 439609 - DNA, 6025 bp, Homo sapiens
cgcctttccttttgtttttctcaggttttgcgtgggaggcggtcccgggatttcaagggtctacgcgcttttctatggcgaatgcaacccgacgagggagtgggctgtatcttcagagttgtctccgtctttccaagaacagaacaaaatgaacaaggtagaacagaagtcccaggagtcagtatcatttaaagatgtgactgtgggcttcacccaggaggagtggcagcacctggaccctagtcagagggctctgtatagagatgtgatgctggagaactacagcaaccttgtctcagtggggtattgtgttcacaaaccagaggtgatcttcaggctgcaacaaggagaagagccatggaaacaggaggaagaattcccaagccaaagctttccagaagtctggacagctgatcacctgaaagagaggagccaagaaaaccaatctaaacatttgtgggaagttgtattcatcaataatgaaatgctgactaaggaacaaggtgatgtaataggaataccatttaatgtggatgtaagttcttttccttccagaaaaatgttctgtcagtgtgattcatgtggaatgagtttcaacactgtttcagaattggttatcagtaagataaactatttaggaaaaaagtctgatgaatttaatgcctgtgggaaattgttactcaatattaagcatgatgaaactcatactcaagagaaaaatgaagttttgaaaaataggaacacactgagtcatcatgaggagactttgcagcatgagaagattcaaactttagagcacaattttgaatacagtatatgtcaggaaaccctccttgaaaaggcagtattcaatacacagaagagagagaacgcagaagagaataactgtgattataatgaatttgggagaactttgtgtgatagttcatccctcttgttccatcagatatctccgtcaagggacaatcactatgaatttagtgattgtgagaagttcttatgtgtgaagtccaccctttctaaacctcatggggtatctatgaaacactatgattgtggtgaaagtgggaataatttcaggaggaaattgtgtctgtcacaccttcagaaaggtgataaaggagagaaacactttgaatgtaatgaatgtgggaaagctttctgggagaagtcacatctcactcgacatcagagggtgcacacaggacagaaaccctttcaatgtaatgaatgtgaaaaagctttctgggataagtcaaacctcactaaacatcaaagatcacacacaggggagaaaccttttgaatgcaatgaatgtgggaaagcctttagccataagtcagccctcacattacaccagagaacacatacaggggagaaaccctatcaatgtaatgcgtgtgggaaaactttttgccagaaatctgacctcactaaacatcagagaacacacacagggctgaaaccctatgaatgttatgaatgtggaaaatccttccgtgtgacttcgcaccttaaagtacaccagagaactcacacaggtgagaaaccttttgaatgtcttgagtgtgggaaatcctttagtgaaaagtcaaatcttacacagcatcagagaattcacataggagataaatcttatgaatgtaatgcatgtgggaaaactttctaccacaagtcattactcaccaggcatcagataattcatacagggtggaaaccttatgaatgttatgaatgtgggaaaaccttctgcttgaagtcagacctcacagtacatcagagaacacacacagggcagaaaccctttgcatgtcccgaatgtgggaaattctttagccataagtcaaccctctctcaacattatagaacacacacaggggagaaaccctacgaatgtcatgaatgtggaaaaatcttttacaataaatcatacctaactaaacataatagaacacatacaggggagaaaccctatgaatgtaatgaatgtggaaaagccttctaccagaagtcacaactcactcagcatcagagaattcacataggggagaaaccctataaatgtaatgagtgtggaaaagctttctgccataagtcagctctaattgtacatcagagaacccatacacaagaaaagccctataaatgtaatgaatgtggaaaatctttctgtgtaaaatcaggacttattttccatgagagaaagcacacgggggagaaaccctatgaatgcaatgaatgtgggaaattcttcaggcacaaatcatcactcacagtacatcacagggctcacacaggagagaaatcttgtcaatgtaatgaatgtggaaaaatcttttaccgtaaatcggaacttgctcaacatcagagatcacatacaggggaaaagccctatgaatgtaacacatgcaggaaaactttctctcaaaagtcaaatctcattgtacatcagagaagacatataggagaaaaccttatgaatgaaatggatattagaaatttccagccacaagtcagcctccataatgcctcagagtattcacactgtggagaaagccctgatgacatcctgaatgttcagtaactatccacaaactcaccttatgttactccaaagtaatagtaggggataaacccatagactacaacaattataggacagcttttgttaggaagtgatattctatgtaatatcagatggttaatacgggcataacaccttacagattttttttgaatttgtgaaagtttttggcaaaaatgcaaataaggttatgttagaatttacactgaggagaaaattgtcaatttaagaaatctaaagtgaaaattttgcttagaaataaaatacgacaagttatgttttgagtttgatgccataatagtttttagggcacctaacaataatttatagatgtatattgtggaatgtaaagctttaagaacttaaacaaaggtaataattaaaataacctcacaagaagtttaatgagtagagagaattcccatgtacacttcaccaaacttcctctaaggataatgtataatcatagtatatggtcaagtccaagaaatcgatgttaccttgctggtagatagagacttagtcagattttactatggtttgcatgcactctgtgtgtgtgtgtacgtgtatgtgtgtgtgtgtggttatatcaaacttttacgacttttacatttgagtaaccatcaacacgattagtttacagaactgaaaaggaatctgagatctgtactgtatcaggattacaaaggatttagcctcaagtagttccctttttgtattaataaccacacgctttctgcaaccctatcccttgcatccacttgactatgaagtttttttaaagcacagataaattgaataatcagggcaatagcattaagcacatctgcgaattatccctgaagttcaaaagacttatatatgtataagtggtatgtgatataaatcgtgtgtttcatatgcataatggaatttaacgtaattgtgaataggaagtaggtatcctagtttagtagtggttacattatcaggcccatcccagatgtttgtgatgtcctgaaacaatttaaaaggagacccacagagctaatgtttatccatttaaaaggtataaatcaaaataacaaattatctaaaaaaaatctatcctgtacatgtgaagatctaggctcgcctccatgttactccctttctcttcctacctgtggctcatgccatgccatgaagtgcctagggtacatatgtgaacattccagccttcagcataagtggtagtccaaattttctttaagcagctgctctccaagacagggccctggaaaggcccacacatacagcccagggctgcccagggctgttggactgtcatttcaaggctcattgtccccagacagggatctgggccctcagacttttgagaatatgaagaggagggttgaggctggagcagaaccagaatcaagctggtgtggggcttttattgatagtgtgaagattgtacactatattacatgatcagatcatacaaataatctaagattatacagtctagtgatcctagattacacaagtaatctaagcttccactttaggaaactagaaaaagaagagcaaattaaatccaaagtaacctgaaaaaacattagagtaaaaatcattgaaattgaaaagagaaaatcgataaaacccaaaactggttccttgaaaaggtcagtaaaattgataaacctctagctagcttaagaacaaacagaagacaaatattgctaataccaaaaatgaaagaggccatcacagctaatcctatggtcaccaaaaggattagaaagaaacatggacaactctgtccataaatttgataacttaggacctcaataggcatatgtatctattaaataaaccaaagcagtaattaataaccttccaaggccaggtacagtggttcatgcctgtaatcccagcacttcactttgggaggctgaggcgggtggatcacaaggtcaggagttcgagaccagcctggtcaacatggtgaaaccccctatctactaaaaatacaaaaaattagctgggcatggtggcatgcgtgtgtagtcgaagctactcaggaggctgaggcagaagaatcacttgaacctgggaggtggatgttgcagtgagctgagattgtgccactgtactgcagcctgggtgacagaatgagactgcatctcaaaaaataataatgaaactttccaaaacaaagtgccaggaccagctgggttcactgatgtgtttttgagatacttaaggtagaaatgataccaagtctctaccatctctttcagaaaataaaagcagagataacacttcccaactcattttgtgaggccagtattaccctaatagcaaaaccaggcaaagatattacaagaaaggaaaactacagatcaatatttccattgaacacagatgcagaaatcctcaaaatattagcaaatcaggaatgcaaggcttgttcaacatttgatattcagtgtaatccattgcatgcattagcagctcaaagatgaaatacgatcatatcaataggtacagaaaaagcatttgacaaaatccaatatccattcatgttaaaacctctcaacacagaaggaatacaggagaacttactcaagttggtaaagaacatactacaaaaaaccctacagctaacattatccttgatgtttccaactagacactttcctactaagatcaggaacatggcaaggaacaccacaccactgcttttcagcattgtactggaagtgctatataatgcagtgttaaaaaaaaaagaaataaaatgcacatagatttgaaaggatgaaatacaactttgttcacaagtaacatgattgtctttgtagagaattctaaataacaaaaaccctgctgacattaataagcaattacagcaggattgcaggatacagtcctcaggtagatgataaaaaggaattggacatcaagtcattaaaagacacggagaaaccctaaatgcttattgttaagtgaaaaccaatctgaaaaggctttctattttgtatgattgcaattatatgacattttgggagaggcaaaactattgagccagtgaaaggaccagtggttgctgagagttgaggggaaaggagggatggcaggtagagaggtgatttttaaggcagtgaaagtactctctagggtactgtaatttgtcaaaacgcagagaatggaaaacagtgaacggaaaacacagagtaaaccctaatgtcaactctggacttcagttaataataatgtatcactgttggctcattaattgtaacaaatgaaccataatgatgcaagatgttaatgattggggagcctgtggaagatgggaggggaaagggttatatgagaattctctatactttttgctcaactttctgtaaccctaaagctactctaaaaaatgaagtgtatcaagtaaataaataaccaaccaaccaa

SEQ ID NO: 439610 - DNA, 5988 bp, Homo sapiens
cgcctttccttttgtttttctcaggttttgcgtgggaggcggtcccgggatttcaagggtctacgcgcttttctatggcgaatgcaacccgacgagggagtgggctgtatcttcagagttgtctccgtctttccaagaacagaacaaaatgaacaaggtagaacagaagtcccaggagtcagtatcatttaaagatgtgactgtgggcttcacccaggaggagtggcagcacctggaccctagtcagagggctctgtatagagatgtgatgctggagaactacagcaaccttgtctcagtggggtattgtgttcacaaaccagaggtgatcttcaggctgcaacaaggagaagagccatggaaacaggaggaagaattcccaagccaaagctttccagaagtctggacagctgatcacctgaaagagaggagccaagaaaaccaatctaaacatttgtgggaagttgtattcatcaataatgaaatgctgactaaggaacaaggtgatgtaataggaataccatttaatgtggatgtaagttcttttccttccagaaaaatgttctgtcagtgtgattcatgtggaatgagtttcaacactgtttcagaattggttatcagtaagataaactatttaggaaaaaagtctgatgaatttaatgcctgtgggaaattgttactcaatattaagcatgatgaaactcatactcaagagaaaaatgaagttttgaaaaataggaacacactgagtcatcatgaggagactttgcagcatgagaagattcaaactttagagcacaattttgaatacagtatatgtcaggaaaccctccttgaaaaggcagtattcaatacacagaagagagagaacgcagaagagaataactgtgattataatgaatttgggagaactttgtgtgatagttcatccctcttgttccatcagatatctccgtcaagggacaatcactatgaatttagtgattgtgagaagttcttatgtgtgaagtccaccctttctaaacctcatggggtatctatgaaacactatgattgtggtgaaagtgggaataatttcaggaggaaattgtgtctgtcacaccttcagaaaggtgataaaggagagaaacactttgaatgtaatgaatgtgggaaagctttctgggagaagtcacatctcactcgacatcagagggtgcacacaggacagaaaccctttcaatgtaatgaatgtgaaaaagctttctgggataagtcaaacctcactaaacatcaaagatcacacacaggggagaaaccttttgaatgcaatgaatgtgggaaagcctttagccataagtcagccctcacattacaccagagaacacatacaggggagaaaccctatcaatgtaatgcgtgtgggaaaactttttgccagaaatctgacctcactaaacatcagagaacacacacagggctgaaaccctatgaatgttatgaatgtggaaaatccttccgtgtgacttcgcaccttaaagtacaccagagaactcacacaggtgagaaaccttttgaatgtcttgagtgtgggaaatcctttagtgaaaagtcaaatcttacacagcatcagagaattcacataggagataaatcttatgaatgtaatgcatgtgggaaaactttctaccacaagtcattactcaccaggcatcagataattcatacagggtggaaaccttatgaatgttatgaatgtgggaaaaccttctgcttgaagtcagacctcacagtacatcagagaacacacacagggcagaaaccctttgcatgtcccgaatgtgggaaattctttagccataagtcaaccctctctcaacattatagaacacacacaggggagaaaccctacgaatgtcatgaatgtggaaaaatcttttacaataaatcatacctaactaaacataatagaacacatacaggggagaaaccctatgaatgtaatgaatgtggaaaagccttctaccagaagtcacaactcactcagcatcagagaattcacataggggagaaaccctataaatgtaatgagtgtggaaaagctttctgccataagtcagctctaattgtacatcagagaacccatacacaagaaaagccctataaatgtaatgaatgtggaaaatctttctgtgtaaaatcaggacttattttccatgagagaaagcacacgggggagaaaccctatgaatgcaatgaatgtgggaaattcttcaggcacaaatcatcactcacagtacatcacagggctcacacaggagagaaatcttgtcaatgtaatgaatgtggaaaaatcttttaccgtaaatcggaacttgctcaacatcagagatcacatacaggggaaaagccctatgaatgtaacacatgcaggaaaactttctctcaaaagtcaaatctcattgtacatcagagaagacatataggagaaaaccttatgaatgaaatggatattagaaatttccagccacaagtcagcctccataatgcctcagagtattcacactgtggagaaagccctgatgacatcctgaatgttcagtaactatccacaaactcaccttatgttactccaaagtaatagtaggggataaacccatagactacaacaattataggacagcttttgttaggaagtgatattctatgtaatatcagatggttaatacgggcataacaccttacagattttttttgaatttgtgaaagtttttggcaaaaatgcaaataaggttatgttagaatttacactgaggagaaaattgtcaatttaagaaatctaaagtgaaaattttgcttagaaataaaatacgacaagttatgttttgagtttgatgccataatagtttttagggcacctaacaataatttatagatgtatattgtggaatgtaaagctttaagaacttaaacaaaggtaataattaaaataacctcacaagaagtttaatgagtagagagaattcccatgtacacttcaccaaacttcctctaaggataatgtataatcatagtatatggtcaagtccaagaaatcgatgttaccttgctggtagatagagacttagtcagattttactatggtttgcatgcactctgtgtgtgtgtgtacgtgtatgtgtgtgtgtgtggttatatcaaacttttacgacttttacatttgagtaaccatcaacacgattagtttacagaactgaaaaggaatctgagatctgtactgtatcaggattacaaaggatttagcctcaagtagttccctttttgtattaataaccacacgctttctgcaaccctatcccttgcatccacttgactatgaagtttttttaaagcacagataaattgaataatcagggcaatagcattaagcacatctgcgaattatccctgaagttcaaaagacttatatatgtataagtggtatgtgatataaatcgtgtgtttcatatgcataatggaatttaacgtaattgtgaataggaagtaggtatcctagtttagtagtggttacattatcaggcccatcccagatgtttgtgatgtcctgaaacaatttaaaaggagacccacagagctaatgtttatccatttaaaaggtataaatcaaaataacaaattatctaaaaaaaatctatcctgtacatgtgaagatctaggctcgcctccatgttactccctttctcttcctacctgtggctcatgccatgccatgaagtgcctagggtacatatgtgaacattccagccttcagcataagtggtagtccaaattttctttaagcagctgctctccaagacagggccctggaaaggcccacacatacagcccagggctgcccagggctgttggactgtcatttcaaggctcattgtccccagacagggatctgggccctcagacttttgagaatatgaagaggagggttgaggctggagcagaaccagaatcaagctggtgtggggcttttattgatagtgtgaagattgtacactatattacatgatcagatcatacaaataatctaagattatacagtctagtgatcctagattacacaagtaatctaagcttccactttaggaaactagaaaaagaagagcaaattaaatccaaagtaacctgaaaaaacattagagtaaaaatcattgaaattgaaaagagaaaatcgataaaacccaaaactggttccttgaaaaggtcagtaaaattgataaacctctagctagcttaagaacaaacagaagacaaatattgctaataccaaaaatgaaagaggccatcacagctaatcctatggtcaccaaaaggattagaaagaaacatggacaactctgtccataaatttgataacttagctaaaatggaccaattccttgcaagacgcattctctcaaagctcacacaagatagacctcaataggcatatgtatctattaaataaaccaaagcagtaattaataaccttccaaggccaggtacagtggttcatgcctgtaatcccagcacttcactttgggaggctgaggcgggtggatcacaaggtcaggagttcgagaccagcctggtcaacatggtgaaaccccctatctactaaaaatacaaaaaattagctgggcatggtggcatgcgtgtgtagtcgaagctactcaggaggctgaggcagaagaatcacttgaacctgggaggtggatgttgcagtgagctgagattgtgccactgtactgcagcctgggtgacagaatgagactgcatctcaaaaaataataatgaaactttccaaaacaaagtgccaggaccagctgggttcactgatgtgtttttgagatacttaaggtagaaatgataccaagtctctaccatctctttcagaaaataaaagcagagataacacttcccaactcattttgtgaggccagtattaccctaatagcaaaaccaggcaaagatattacaagaaaggaaaactacagatcaatatttccattgaacacagatgcagaaatcctcaaaatattagcaaatcaggaatgcaaggcttgttcaacatttgatattcagtgtaatccattgcatgcattagcagctcaaagatgaaatacgatcatatcaataggtacagaaaaagcatttgacaaaatccaatatccattcatgttaaaacctctcaacacagaaggaatacaggagaacttactcaagttggtaaagaacatactacaaaaaaccctacagctaacattatccttgatgtttccaactagacactttcctactaagatcaggaacatggcaaggaacaccacaccactgcttttcagcattgtactggaagtgctatataatgcagtgttaaaaaaaaaagaaataaaatgcacatagatttgaaaggatgaaatacaactttgttcacaagtaacatgattgtctttgtagagaattctaaataacaaaaaccctgctgacattaataagcaatttattgttaagtgaaaaccaatctgaaaaggctttctattttgtatgattgcaattatatgacattttgggagaggcaaaactattgagccagtgaaaggaccagtggttgctgagagttgaggggaaaggagggatggcaggtagagaggtgatttttaaggcagtgaaagtactctctagggtactgtaatttgtcaaaacgcagagaatggaaaacagtgaacggaaaacacagagtaaaccctaatgtcaactctggacttcagttaataataatgtatcactgttggctcattaattgtaacaaatgaaccataatgatgcaagatgttaatgattggggagcctgtggaagatgggaggggaaagggttatatgagaattctctatactttttgctcaactttctgtaaccctaaagctactctaaaaaatgaagtgtatcaagtaaataaataaccaaccaaccaa

SEQ ID NO: 439611 - DNA, 1556 bp, Homo sapiens
  misc_feature (609)..(609): n is a, c, g, or t
  misc_feature (849)..(849): n is a, c, g, or t
  misc_feature (1110)..(1110): n is a, c, g, or t
cgcctttccttttgtttttctcaggttttgcgtgggaggcggtcccgggatttcaagggtctacgcgcttttctatggcgaatgcaacccgacgagggagtgggctgtatcttcagagttgtctccgtctttccaagaacagaacaaaatgaacaaggtagaacagaagtcccaggagtcagtatcatttaaagatgtgactgtgggcttcacccaggaggagtggcagcacctggaccctagtcagagggctctgtatagagatgtgatgctggagaactacagcaaccttgtctcagtggggtattgtgttcacaaaccagaggtgatcttcaggctgcaacaaggagaagagccatggaaacaggaggaagaattcccaagccaaagctttccagagatggggtttcaccatgttcctgggctggtcttaaactcctgagttcaagtgatccacctgccttggcctcccaaagtggtaggattacaggcatgagccacagcatcccacctgtaatggggagttttaaatttacaacttcaatctttttacttgtgtaggtcttttcagatttttctttttctacttgagttggttttagttgtttntgttttatggattttcccattttgttgaagttaaataatttgttggcatacattgttcataccattctttgtaattatttttatttctgtaagagtactagtaatacatctttaatccctacttttagtaatttgaaccttctctctcttttttttctttttcaatgtcagtctagctagaggtttgtatattttgttgatcttttccaggaatcagctattgtttttctgttctctagntcattaatttttactctataatctttctgctttcctgccttctgcttgatttggttttgtattgctgctcctgtccaagtgttttaaggtggaaaattagtttactgatttgagatctttttaaatatggttattacagctacaaatctctaaggattgctttatctgtgttccataagtttgagtatgtcttcatttttatctcaaagcattttttctaattttccttcttattgcttctttaacttttttttttaactncggaatatgttatataatttgtgcatgtttgtgcattctaaaaattcctttgtcttactgatttgtaattcgactgtggtcagagaatcattttaaatttattctggggaatgtttcatgtgtacttttgaagcatacctgctccactgttcgagtggaatgttctgtctatatctcttagatctggttgctttagagtgtcatctatatcttctgtttccatgtttatattgtgcccagttgtcctaaccattattgaaaatggggtattacagtttgcaataagtattgtagacttgtatatttttttcttttaattctgtcagtttttgctacacatactttgaggctctgttagtagtacatacgcttagaattgttatgtctcctttattgattgacccttttattgttatattaataaaattcccctctttatccttagt

SEQ ID NO: 439612 - DNA, 2285 bp, Homo sapiens
  misc_feature (1094)..(1094): n is a, c, g, or t
  misc_feature (1334)..(1334): n is a, c, g, or t
  misc_feature (1595)..(1595): n is a, c, g, or t
ttctgtgatttgtaaatataaatctgtagttctcagtaatattcttgaaaatggtaaatgatcaaatactttggagaccattggtctaaaattactctataacccatttccttggctttttttctcaagacagcaccaggccatctcctgtgctgtctgccattttgttgatgtctgcagtgtgttggaggccctcacctttgcttgtatcatggccctatgcttatgaagaacgtaatagagtgtttttcataattcaaccaacagctgtacttcctcagttaagctcaaaacagagccaactttgctcctaatgttagtctactgtgtttgtactttcaccttagtacttgtaacatattaccacacatattttcttaccactctgtgtgttctttgaacacaggaagatttttattaatcttagtatttccagcagtgatgatagttccaggtactttgtaggaacttgataatttcttttgcatgaattaatatcttaatgcattaatggcagaatatttctgttatgatttctttttccctaaaagtataaaacaaaacaatattctgtgaataataatcatggtaaggattagcccatacttcttttttcatgccacctaattctgaatgtttcaggtagaacagaagtcccaggagtcagtatcatttaaagatgtgactgtgggcttcacccaggaggagtggcagcacctggaccctagtcagagggctctgtatagagatgtgatgctggagaactacagcaaccttgtctcagtggggtattgtgttcacaaaccagaggtgatcttcaggctgcaacaaggagaagagccatggaaacaggaggaagaattcccaagccaaagctttccagagatggggtttcaccatgttcctgggctggtcttaaactcctgagttcaagtgatccacctgccttggcctcccaaagtggtaggattacaggcatgagccacagcatcccacctgtaatggggagttttaaatttacaacttcaatctttttacttgtgtaggtcttttcagatttttctttttctacttgagttggttttagttgtttntgttttatggattttcccattttgttgaagttaaataatttgttggcatacattgttcataccattctttgtaattatttttatttctgtaagagtactagtaatacatctttaatccctacttttagtaatttgaaccttctctctcttttttttctttttcaatgtcagtctagctagaggtttgtatattttgttgatcttttccaggaatcagctattgtttttctgttctctagntcattaatttttactctataatctttctgctttcctgccttctgcttgatttggttttgtattgctgctcctgtccaagtgttttaaggtggaaaattagtttactgatttgagatctttttaaatatggttattacagctacaaatctctaaggattgctttatctgtgttccataagtttgagtatgtcttcatttttatctcaaagcattttttctaattttccttcttattgcttctttaacttttttttttaactncggaatatgttatataatttgtgcatgtttgtgcattctaaaaattcctttgtcttactgatttgtaattcgactgtggtcagagaatcattttaaatttattctggggaatgtttcatgtgtacttttgaagcatacctgctccactgttcgagtggaatgttctgtctatatctcttagatctggttgctttagagtgtcatctatatcttctgtttccatgtttatattgtgcccagttgtcctaaccattattgaaaatggggtattacagtttgcaataagtattgtagacttgtatatttttttcttttaattctgtcagtttttgctacacatactttgaggctctgttagtagtacatacgcttagaattgttatgtctcctttattgattgacccttttattgttatattaataaaattcccctctttatccttagtaaaatttttgtattaaagtgtattttgtgtgatattaggatagctactccagccttataggtgccatgtgccggatatatctttttctgtcttcaaattttcaacctgtttgtatctatctcttatagacagcacatgtttggattttcacacttttgacaacctgagaattgttgctttttgattggattttcaaatcattccctttttcctgttgttattgctatgcagatggttcctgact

SEQ ID NO: 439613 - DNA, 2707 bp, Homo sapiens
gggccggagggccgcggtgtgccgcggggcagttgcgggttgtcataacggtccccgccggagtgaggcgaggccgcgtcgctcagttctggccgtctagggcccctgtaaggatgagagcgcagaggacgcagggccgctggaggcgcaggtaacgaagctagggtgcggttgggaccgcggctgagctttttccgggacccgtggtgctgaatggagaggacggagacgaagccgagccgcggctcctagcggcggcgccgatgctcgagctgtagctgccaggcgaggatgtgtggagcgcaggcggcgcggggtaaatgagaggtctcgggccccaggacccccggggcccgggatgagttagcgagggcagccgcgggggccagttccgaccgtgacaggccaaggcgacggccgccgcccgcccgccccttccgtgcagaagcagctgctcctttccgcgcccgcccgcctgcgctcccggccctggagaccatgaggttccgcatctacaaacggaaggtgctaatcctgacgctcgtggtggccgcctgcggcttcgtcctctggagcagcaatgggcgacaaaggaagaacgaggccctcgccccaccgttgctggacgccgaacccgcgcggggtgccggcggccgcggtggggaccacccctctgtggctgtgggcatccgcagggtctccaacgtgtcggcggcttccctggtcccggcggtcccccagcccgaggcggacaacctgacgctgcggtaccggtccctggtgtaccagctgaactttgatcagaccctgaggaatgtagataaggctggcacctgggccccccgggagctggtgctggtggtccaggtgcataaccggcccgaatacctcagactgctgctggactcacttcgaaaagcccagggaattgacaacgtcctcgtcatctttagccatgacttctggtcgaccgagatcaatcagctgatcgccggggtgaatttctgtccggttctgcaggtgttctttcctttcagcattcagttgtaccctaacgagtttccaggtagtgaccctagagattgtcccagagacctgccgaagaatgccgctttgaaattggggtgcatcaatgctgagtatcccgactccttcggccattatagagaggccaaattctcccagaccaaacatcactggtggtggaagctgcatttgtgtgggaaagagtgaaaattcttcgagattatgctggccttatacttttcctagaagaggatcactacttagccccagacttttaccatgtcttcaaaaagatgtggaaactgaagcagcaagagtgccctgaatgtgatgttctctccctggggacctatagtgccagtcgcagtttctatggcatggctgacaaggtagatgtgaaaacttggaaatccacagagcacaatatgggtctagccttgacccggaatgcctatcagaagctgatcgagtgcacagacactttctgtacttatgatgattataactgggactggactcttcaatacttgactgtatcttgtcttccaaaattctggaaagtgctggttcctcaaattcctaggatctttcatgctggagactgtggtatgcatcacaagaaaacctgtagaccatccactcagagtgcccaaattgagtcactcttaaataataacaaacaatacatgtttccagaaactctaactatcagtgaaaagtttactgtggtagccatttccccacctagaaaaaatggagggtggggagatattagggaccatgaactctgtaaaagttatagaagactgcagtgaaaatcacagttacaaaagcgacagtcttctatttttgatatttgtccaaacaggacatacaattgaataaaagagtttaggaactggtttctgctttaatacaaaaacaaaatcttgtaaaaggtgtccaaatacatagtaatcttttccagttatgtctgattaagatttaaaactgaaggtttcattttgggagtagggttttaaagctcaatctgttatctgctaaaattgattattgttgatatgagagaagaggggaaattttatttaaattgcatttattaatctttttatctgaaactttgtacacttttccactttcaaaacctattttaagtacagcaaaatttatttaaaactgtcatagcagtaaaaagtattacgatgaaattgttagggtattaatggaacaaacccagtttcactctcttgacacacttattaggaagggattgcttcactggtttaataatttaaaagttatgtttgttaaacaccctgtcagaacagtcattttcagtattagattcctgtactattgtgttttgagtgtgttttggaaccttcatagaacacactttcttttggaatgtatttgattgataagaaagtttaaacattgttttcacctcaatgtagaaatacagtggttttgtttttttttttcttttagtgctgacaaaataaaatactcatttttgcataaaaaggttcctaatccttttgcagaataagttttgtttactctttataccaaaattcagtgaaggcattctacaagttttgagttagcattacattttaatatttactattgctacattgtataattgagtttgaaataaaacccagcttatgacaat

SEQ ID NO: 439614 - DNA, 4202 bp, Homo sapiens
gggccggagggccgcggtgtgccgcggggcagttgcgggttgtcataacggtccccgccggagtgaggcgaggccgcgtcgctcagttctggccgtctagggcccctgtaaggatgagagcgcagaggacgcagggccgctggaggcgcaggtaacgaagctagggtgcggttgggaccgcggctgagctttttccgggacccgtggtgctgaatggagaggacggagacgaagccgagccgcggctcctagcggcggcgccgatgctcgagctgtagctgccaggcgaggatgtgtggagcgcaggcggcgcggggtaaatgagaggtctcgggccccaggacccccggggcccgggatgagttagcgagggcagccgcgggggccagttccgaccgtgacaggccaaggcgacggccgccgcccgcccgccccttccgtgcagaagcagctgctcctttccgcgcccgcccgcctgcgctcccggccctggagaccatgaggttccgcatctacaaacggaaggtgctaatcctgacgctcgtggtggccgcctgcggcttcgtcctctggagcagcaatgggcgacaaaggaagaacgaggccctcgccccaccgttgctggacgccgaacccgcgcggggtgccggcggccgcggtggggaccacccctctgtggctgtgggcatccgcagggtctccaacgtgtcggcggcttccctggtcccggcggtcccccagcccgaggcggacaacctgacgctgcggtaccggtccctggtgtaccagctgaactttgatcagaccctgaggaatgtagataaggctggcacctgggccccccgggagctggtgctggtggtccaggtgcataaccggcccgaatacctcagactgctgctggactcacttcgaaaagcccagggaattgacaacgtcctcgtcatctttagccatgacttctggtcgaccgagatcaatcagctgatcgccggggtgaatttctgtccggttctgcaggtgttctttcctttcagcattcagttgtaccctaacgagtttccaggtagtgaccctagagattgtcccagagacctgccgaagaatgccgctttgaaattggggtgcatcaatgctgagtatcccgactccttcggccattatagagaggccaaattctcccagaccaaacatcactggtggtggaagctgcatttgtgtgggaaagagtgaaaattcttcgagattatgctggccttatacttttcctagaagaggatcactacttagccccagacttttaccatgtcttcaaaaagatgtggaaactgaagcagcaagagtgccctgaatgtgatgttctctccctggggacctatagtgccagtcgcagtttctatggcatggctgacaaggtagatgtgaaaacttggaaatccacagagcacaatatgggtctagccttgacccggaatgcctatcagaagctgatcgagtgcacagacactttctgtacttatgatgattataactgggactggactcttcaatacttgactgtatcttgtcttccaaaattctggaaagtgctggttcctcaaattcctaggatctttcatgctggagactgtggtatgcatcacaagaaaacctgtagaccatccactcagagtgcccaaattgagtcactcttaaataataacaaacaatacatgtttccagaaactctaactatcagtgaaaagtttactgtggtagccatttccccacctagaaaaaatggagggtggggagatattagggaccatgaactctgtaaaagttatagaagactgcagtgaaaatcacagttacaaaagcgacagtcttctatttttgatatttgtccaaacaggacatacaattgaataaaagagtttaggaactggtttctgctttaatacaaaaacaaaatcttgtaaaaggtgtccaaatacatagtaatcttttccagttatgtctgattaagatttaaaactgaaggtttcattttgggagtagggttttaaagctcaatctgttatctgctaaaattgattattgttgatatgagagaagaggggaaattttatttaaattgcatttattaatctttttatctgaaactttgtacacttttccactttcaaaacctattttaagtacagcaaaatttatttaaaactgtcatagcagtaaaaagtattacgatgaaattgttagggtattaatggaacaaacccagtttcactctcttgacacacttattaggaagggattgcttcactggtttaataatttaaaagttatgtttgttaaacaccctgtcagaacagtcattttcagtattagattcctgtactattgtgttttgagtgtgttttggaaccttcatagaacacactttcttttggaatgtatttgattgataagaaagtttaaacattgttttcacctcaatgtagaaatacagtggttttgtttttttttttcttttagtgctgacaaaataaaatactcatttttgcataaaaaggttcctaatccttttgcagaataagttttgtttactctttataccaaaattcagtgaaggcattctacaagttttgagttagcattacattttaatatttactattgctacattgtataattgagtttgaaataaaacccagcttatgacaatgcattccctgtgcaagaaactgtttggctttcaaattacccaggcattgaaaatgaatgataaaaagttgctgtgtaagggaaatacagcctaaattgtttttgaaagccagaaatgatacaaagttcagtcatgccaaagtgaaatactttctagtgccagctttaacttaaatcatacgttttaaaaggacagatacagaaaattataggaaacaggcttaaattttgctccatatttaatgtagacgtttatagaagtttcccttaatttgtaattgcattcaaccgagaatttctcataaaagactaatttctgtgtaaagatattacgggctgggtgtggtggctcatgtctgtaatcccagcactctgggaggttgaggcaggcagattgcttgaactcaagagtttgagaccagcctgggcaacatggcgaaaacccatctctactaaaaatacaaaaaattagccgggtgtagtggtgcatctgtagtcccagctacttgagaggctgaggtgggaggatcctttgagtctcgaggcagaggttgcagtgagcctagagcgtgccactgcacgccagcctgagcaacagagcaaggctccatctaaagaaaaaaaaaaaaagttacttaaacttgtaactattaaatggcagtctcaaaattattgcatcaatttaagattcatagtagtttaagagcacatatgcttatctaaggtgaggcaaatagttctcttgctttacgagctacctttagacttacccacggcccagtctggtgcaagattttgcctgggggttataaataagggtgaatcaggaggctttgtacctatttctggtactctgacctgacatcactagttcaaagaactaaaaaattaggttatttccaggactgagctaagaaggccagagtgtgaagtagtagctgtttttgaaacaaatagatcagctcctggctttggggttagtgattaaatcaacaaatatttccctttctgtatttccttcctttcattttctttggctgccctaaaattttttgtaagaaaaaaacctgttaggatcttctctttgcctcacattttaggtgttataaaggaaattgattatgcaggaggctgagatgagaggatcacttgagcctaagagtttgaatccagtctggacaacatagcaagacccatctcttaaaaaaaaagaaagtgattaggaaacactggcttttttttgtttttctgtgtaataatgtaatgaaggcaattttcctatcagagcaaattgccagattttaaaaattccagttttactcttaaatttctataaaaccacaagatgttttaatatttcaataacttctaagaaatacttcaaaattgaattttgaaaatcattactaaataactaaatctattatatatactttatgtaacaaaaatatatatagtttgtgtgacaaaatatagagctgatgaaaaataaaaaa

SEQ ID NO: 439615 - DNA, 4148 bp, Homo sapiens
gggccggagggccgcggtgtgccgcggggcagttgcgggttgtcataacggtccccgccggagtgaggcgaggccgcgtcgctcagttctggccgtctagggcccctgtaaggatgagagcgcagaggacgcagggccgctggaggcgcaggtaacgaagctagggtgcggttgggaccgcggctgagctttttccgggacccgtggtgctgaatggagaggacggagacgaagccgagccgcggctcctagcggcggcgccgatgctcgagctgtagctgccaggcgaggatgtgtggagcgcaggcggcgcggggtaaatgagaggtctcgggccccaggacccccggggcccgggatgagttagcgagggcagccgcgggggccagttccgaccgtgacaggccaaggcgacggccgccgcccgcccgccccttccgtgcagaagcagctgctcctttccgcgcccgcccgcctgcgctcccggccctggagaccatgaggttccgcatctacaaacggaaggtgctaatcctgacgctcgtggtggccgcctgcggcttcgtcctctggagcagcaatgggcgacaaaggaagaacgaggccctcgccccaccgttgctggacgccgaacccgcgcggggtgccggcggccgcggtggggaccacccctctgtggctgtgggcatccgcagggtctccaacgtgtcggcggcttccctggtcccggcggtcccccagcccgaggcggacaacctgacgctgcggtaccggtccctggtgtaccagctgaactttgatcagaccctgaggaatgtagataaggctggcacctgggccccccgggagctggtgctggtggtccaggtgcataaccggcccgaatacctcagactgctgctggactcacttcggaccgagatcaatcagctgatcgccggggtgaatttctgtccggttctgcaggtgttctttcctttcagcattcagttgtaccctaacgagtttccaggtagtgaccctagagattgtcccagagacctgccgaagaatgccgctttgaaattggggtgcatcaatgctgagtatcccgactccttcggccattatagagaggccaaattctcccagaccaaacatcactggtggtggaagctgcatttgtgtgggaaagagtgaaaattcttcgagattatgctggccttatacttttcctagaagaggatcactacttagccccagacttttaccatgtcttcaaaaagatgtggaaactgaagcagcaagagtgccctgaatgtgatgttctctccctggggacctatagtgccagtcgcagtttctatggcatggctgacaaggtagatgtgaaaacttggaaatccacagagcacaatatgggtctagccttgacccggaatgcctatcagaagctgatcgagtgcacagacactttctgtacttatgatgattataactgggactggactcttcaatacttgactgtatcttgtcttccaaaattctggaaagtgctggttcctcaaattcctaggatctttcatgctggagactgtggtatgcatcacaagaaaacctgtagaccatccactcagagtgcccaaattgagtcactcttaaataataacaaacaatacatgtttccagaaactctaactatcagtgaaaagtttactgtggtagccatttccccacctagaaaaaatggagggtggggagatattagggaccatgaactctgtaaaagttatagaagactgcagtgaaaatcacagttacaaaagcgacagtcttctatttttgatatttgtccaaacaggacatacaattgaataaaagagtttaggaactggtttctgctttaatacaaaaacaaaatcttgtaaaaggtgtccaaatacatagtaatcttttccagttatgtctgattaagatttaaaactgaaggtttcattttgggagtagggttttaaagctcaatctgttatctgctaaaattgattattgttgatatgagagaagaggggaaattttatttaaattgcatttattaatctttttatctgaaactttgtacacttttccactttcaaaacctattttaagtacagcaaaatttatttaaaactgtcatagcagtaaaaagtattacgatgaaattgttagggtattaatggaacaaacccagtttcactctcttgacacacttattaggaagggattgcttcactggtttaataatttaaaagttatgtttgttaaacaccctgtcagaacagtcattttcagtattagattcctgtactattgtgttttgagtgtgttttggaaccttcatagaacacactttcttttggaatgtatttgattgataagaaagtttaaacattgttttcacctcaatgtagaaatacagtggttttgtttttttttttcttttagtgctgacaaaataaaatactcatttttgcataaaaaggttcctaatccttttgcagaataagttttgtttactctttataccaaaattcagtgaaggcattctacaagttttgagttagcattacattttaatatttactattgctacattgtataattgagtttgaaataaaacccagcttatgacaatgcattccctgtgcaagaaactgtttggctttcaaattacccaggcattgaaaatgaatgataaaaagttgctgtgtaagggaaatacagcctaaattgtttttgaaagccagaaatgatacaaagttcagtcatgccaaagtgaaatactttctagtgccagctttaacttaaatcatacgttttaaaaggacagatacagaaaattataggaaacaggcttaaattttgctccatatttaatgtagacgtttatagaagtttcccttaatttgtaattgcattcaaccgagaatttctcataaaagactaatttctgtgtaaagatattacgggctgggtgtggtggctcatgtctgtaatcccagcactctgggaggttgaggcaggcagattgcttgaactcaagagtttgagaccagcctgggcaacatggcgaaaacccatctctactaaaaatacaaaaaattagccgggtgtagtggtgcatctgtagtcccagctacttgagaggctgaggtgggaggatcctttgagtctcgaggcagaggttgcagtgagcctagagcgtgccactgcacgccagcctgagcaacagagcaaggctccatctaaagaaaaaaaaaaaaagttacttaaacttgtaactattaaatggcagtctcaaaattattgcatcaatttaagattcatagtagtttaagagcacatatgcttatctaaggtgaggcaaatagttctcttgctttacgagctacctttagacttacccacggcccagtctggtgcaagattttgcctgggggttataaataagggtgaatcaggaggctttgtacctatttctggtactctgacctgacatcactagttcaaagaactaaaaaattaggttatttccaggactgagctaagaaggccagagtgtgaagtagtagctgtttttgaaacaaatagatcagctcctggctttggggttagtgattaaatcaacaaatatttccctttctgtatttccttcctttcattttctttggctgccctaaaattttttgtaagaaaaaaacctgttaggatcttctctttgcctcacattttaggtgttataaaggaaattgattatgcaggaggctgagatgagaggatcacttgagcctaagagtttgaatccagtctggacaacatagcaagacccatctcttaaaaaaaaagaaagtgattaggaaacactggcttttttttgtttttctgtgtaataatgtaatgaaggcaattttcctatcagagcaaattgccagattttaaaaattccagttttactcttaaatttctataaaaccacaagatgttttaatatttcaataacttctaagaaatacttcaaaattgaattttgaaaatcattactaaataactaaatctattatatatactttatgtaacaaaaatatatatagtttgtgtgacaaaatatagagctgatgaaaaataaaaaa

SEQ ID NO: 439616 - DNA, 4005 bp, Homo sapiens
gggccggagggccgcggtgtgccgcggggcagttgcgggttgtcataacggtccccgccggagtgaggcgaggccgcgtcgctcagttctggccgtctagggcccctgtaaggatgagagcgcagaggacgcagggccgctggaggcgcaggtaacgaagctagggtgcggttgggaccgcggctgagctttttccgggacccgtggtgctgaatggagaggacggagacgaagccgagccgcggctcctagcggcggcgccgatgctcgagctgtagctgcgctcccggccctggagaccatgaggttccgcatctacaaacggaaggtgctaatcctgacgctcgtggtggccgcctgcggcttcgtcctctggagcagcaatgggcgacaaaggaagaacgaggccctcgccccaccgttgctggacgccgaacccgcgcggggtgccggcggccgcggtggggaccacccctctgtggctgtgggcatccgcagggtctccaacgtgtcggcggcttccctggtcccggcggtcccccagcccgaggcggacaacctgacgctgcggtaccggtccctggtgtaccagctgaactttgatcagaccctgaggaatgtagataaggctggcacctgggccccccgggagctggtgctggtggtccaggtgcataaccggcccgaatacctcagactgctgctggactcacttcgaaaagcccagggaattgacaacgtcctcgtcatctttagccatgacttctggtcgaccgagatcaatcagctgatcgccggggtgaatttctgtccggttctgcaggtgttctttcctttcagcattcagttgtaccctaacgagtttccaggtagtgaccctagagattgtcccagagacctgccgaagaatgccgctttgaaattggggtgcatcaatgctgagtatcccgactccttcggccattatagagaggccaaattctcccagaccaaacatcactggtggtggaagctgcatttgtgtgggaaagagtgaaaattcttcgagattatgctggccttatacttttcctagaagaggatcactacttagccccagacttttaccatgtcttcaaaaagatgtggaaactgaagcagcaagagtgccctgaatgtgatgttctctccctggggacctatagtgccagtcgcagtttctatggcatggctgacaaggtagatgtgaaaacttggaaatccacagagcacaatatgggtctagccttgacccggaatgcctatcagaagctgatcgagtgcacagacactttctgtacttatgatgattataactgggactggactcttcaatacttgactgtatcttgtcttccaaaattctggaaagtgctggttcctcaaattcctaggatctttcatgctggagactgtggtatgcatcacaagaaaacctgtagaccatccactcagagtgcccaaattgagtcactcttaaataataacaaacaatacatgtttccagaaactctaactatcagtgaaaagtttactgtggtagccatttccccacctagaaaaaatggagggtggggagatattagggaccatgaactctgtaaaagttatagaagactgcagtgaaaatcacagttacaaaagcgacagtcttctatttttgatatttgtccaaacaggacatacaattgaataaaagagtttaggaactggtttctgctttaatacaaaaacaaaatcttgtaaaaggtgtccaaatacatagtaatcttttccagttatgtctgattaagatttaaaactgaaggtttcattttgggagtagggttttaaagctcaatctgttatctgctaaaattgattattgttgatatgagagaagaggggaaattttatttaaattgcatttattaatctttttatctgaaactttgtacacttttccactttcaaaacctattttaagtacagcaaaatttatttaaaactgtcatagcagtaaaaagtattacgatgaaattgttagggtattaatggaacaaacccagtttcactctcttgacacacttattaggaagggattgcttcactggtttaataatttaaaagttatgtttgttaaacaccctgtcagaacagtcattttcagtattagattcctgtactattgtgttttgagtgtgttttggaaccttcatagaacacactttcttttggaatgtatttgattgataagaaagtttaaacattgttttcacctcaatgtagaaatacagtggttttgtttttttttttcttttagtgctgacaaaataaaatactcatttttgcataaaaaggttcctaatccttttgcagaataagttttgtttactctttataccaaaattcagtgaaggcattctacaagttttgagttagcattacattttaatatttactattgctacattgtataattgagtttgaaataaaacccagcttatgacaatgcattccctgtgcaagaaactgtttggctttcaaattacccaggcattgaaaatgaatgataaaaagttgctgtgtaagggaaatacagcctaaattgtttttgaaagccagaaatgatacaaagttcagtcatgccaaagtgaaatactttctagtgccagctttaacttaaatcatacgttttaaaaggacagatacagaaaattataggaaacaggcttaaattttgctccatatttaatgtagacgtttatagaagtttcccttaatttgtaattgcattcaaccgagaatttctcataaaagactaatttctgtgtaaagatattacgggctgggtgtggtggctcatgtctgtaatcccagcactctgggaggttgaggcaggcagattgcttgaactcaagagtttgagaccagcctgggcaacatggcgaaaacccatctctactaaaaatacaaaaaattagccgggtgtagtggtgcatctgtagtcccagctacttgagaggctgaggtgggaggatcctttgagtctcgaggcagaggttgcagtgagcctagagcgtgccactgcacgccagcctgagcaacagagcaaggctccatctaaagaaaaaaaaaaaaagttacttaaacttgtaactattaaatggcagtctcaaaattattgcatcaatttaagattcatagtagtttaagagcacatatgcttatctaaggtgaggcaaatagttctcttgctttacgagctacctttagacttacccacggcccagtctggtgcaagattttgcctgggggttataaataagggtgaatcaggaggctttgtacctatttctggtactctgacctgacatcactagttcaaagaactaaaaaattaggttatttccaggactgagctaagaaggccagagtgtgaagtagtagctgtttttgaaacaaatagatcagctcctggctttggggttagtgattaaatcaacaaatatttccctttctgtatttccttcctttcattttctttggctgccctaaaattttttgtaagaaaaaaacctgttaggatcttctctttgcctcacattttaggtgttataaaggaaattgattatgcaggaggctgagatgagaggatcacttgagcctaagagtttgaatccagtctggacaacatagcaagacccatctcttaaaaaaaaagaaagtgattaggaaacactggcttttttttgtttttctgtgtaataatgtaatgaaggcaattttcctatcagagcaaattgccagattttaaaaattccagttttactcttaaatttctataaaaccacaagatgttttaatatttcaataacttctaagaaatacttcaaaattgaattttgaaaatcattactaaataactaaatctattatatatactttatgtaacaaaaatatatatagtttgtgtgacaaaatatagagctgatgaaaaataaaaaa

SEQ ID NO: 439617 - DNA, 3826 bp, Homo sapiens
gggccggagggccgcggtgtgccgcggggcagttgcgggttgtcataacggtccccgccggagtgaggcgaggccgcgtcgctcagttctggccgtctagggcccctgtaaggatgagaaccatgaggttccgcatctacaaacggaaggtgctaatcctgacgctcgtggtggccgcctgcggcttcgtcctctggagcagcaatgggcgacaaaggaagaacgaggccctcgccccaccgttgctggacgccgaacccgcgcggggtgccggcggccgcggtggggaccacccctctgtggctgtgggcatccgcagggtctccaacgtgtcggcggcttccctggtcccggcggtcccccagcccgaggcggacaacctgacgctgcggtaccggtccctggtgtaccagctgaactttgatcagaccctgaggaatgtagataaggctggcacctgggccccccgggagctggtgctggtggtccaggtgcataaccggcccgaatacctcagactgctgctggactcacttcgaaaagcccagggaattgacaacgtcctcgtcatctttagccatgacttctggtcgaccgagatcaatcagctgatcgccggggtgaatttctgtccggttctgcaggtgttctttcctttcagcattcagttgtaccctaacgagtttccaggtagtgaccctagagattgtcccagagacctgccgaagaatgccgctttgaaattggggtgcatcaatgctgagtatcccgactccttcggccattatagagaggccaaattctcccagaccaaacatcactggtggtggaagctgcatttgtgtgggaaagagtgaaaattcttcgagattatgctggccttatacttttcctagaagaggatcactacttagccccagacttttaccatgtcttcaaaaagatgtggaaactgaagcagcaagagtgccctgaatgtgatgttctctccctggggacctatagtgccagtcgcagtttctatggcatggctgacaaggtagatgtgaaaacttggaaatccacagagcacaatatgggtctagccttgacccggaatgcctatcagaagctgatcgagtgcacagacactttctgtacttatgatgattataactgggactggactcttcaatacttgactgtatcttgtcttccaaaattctggaaagtgctggttcctcaaattcctaggatctttcatgctggagactgtggtatgcatcacaagaaaacctgtagaccatccactcagagtgcccaaattgagtcactcttaaataataacaaacaatacatgtttccagaaactctaactatcagtgaaaagtttactgtggtagccatttccccacctagaaaaaatggagggtggggagatattagggaccatgaactctgtaaaagttatagaagactgcagtgaaaatcacagttacaaaagcgacagtcttctatttttgatatttgtccaaacaggacatacaattgaataaaagagtttaggaactggtttctgctttaatacaaaaacaaaatcttgtaaaaggtgtccaaatacatagtaatcttttccagttatgtctgattaagatttaaaactgaaggtttcattttgggagtagggttttaaagctcaatctgttatctgctaaaattgattattgttgatatgagagaagaggggaaattttatttaaattgcatttattaatctttttatctgaaactttgtacacttttccactttcaaaacctattttaagtacagcaaaatttatttaaaactgtcatagcagtaaaaagtattacgatgaaattgttagggtattaatggaacaaacccagtttcactctcttgacacacttattaggaagggattgcttcactggtttaataatttaaaagttatgtttgttaaacaccctgtcagaacagtcattttcagtattagattcctgtactattgtgttttgagtgtgttttggaaccttcatagaacacactttcttttggaatgtatttgattgataagaaagtttaaacattgttttcacctcaatgtagaaatacagtggttttgtttttttttttcttttagtgctgacaaaataaaatactcatttttgcataaaaaggttcctaatccttttgcagaataagttttgtttactctttataccaaaattcagtgaaggcattctacaagttttgagttagcattacattttaatatttactattgctacattgtataattgagtttgaaataaaacccagcttatgacaatgcattccctgtgcaagaaactgtttggctttcaaattacccaggcattgaaaatgaatgataaaaagttgctgtgtaagggaaatacagcctaaattgtttttgaaagccagaaatgatacaaagttcagtcatgccaaagtgaaatactttctagtgccagctttaacttaaatcatacgttttaaaaggacagatacagaaaattataggaaacaggcttaaattttgctccatatttaatgtagacgtttatagaagtttcccttaatttgtaattgcattcaaccgagaatttctcataaaagactaatttctgtgtaaagatattacgggctgggtgtggtggctcatgtctgtaatcccagcactctgggaggttgaggcaggcagattgcttgaactcaagagtttgagaccagcctgggcaacatggcgaaaacccatctctactaaaaatacaaaaaattagccgggtgtagtggtgcatctgtagtcccagctacttgagaggctgaggtgggaggatcctttgagtctcgaggcagaggttgcagtgagcctagagcgtgccactgcacgccagcctgagcaacagagcaaggctccatctaaagaaaaaaaaaaaaagttacttaaacttgtaactattaaatggcagtctcaaaattattgcatcaatttaagattcatagtagtttaagagcacatatgcttatctaaggtgaggcaaatagttctcttgctttacgagctacctttagacttacccacggcccagtctggtgcaagattttgcctgggggttataaataagggtgaatcaggaggctttgtacctatttctggtactctgacctgacatcactagttcaaagaactaaaaaattaggttatttccaggactgagctaagaaggccagagtgtgaagtagtagctgtttttgaaacaaatagatcagctcctggctttggggttagtgattaaatcaacaaatatttccctttctgtatttccttcctttcattttctttggctgccctaaaattttttgtaagaaaaaaacctgttaggatcttctctttgcctcacattttaggtgttataaaggaaattgattatgcaggaggctgagatgagaggatcacttgagcctaagagtttgaatccagtctggacaacatagcaagacccatctcttaaaaaaaaagaaagtgattaggaaacactggcttttttttgtttttctgtgtaataatgtaatgaaggcaattttcctatcagagcaaattgccagattttaaaaattccagttttactcttaaatttctataaaaccacaagatgttttaatatttcaataacttctaagaaatacttcaaaattgaattttgaaaatcattactaaataactaaatctattatatatactttatgtaacaaaaatatatatagtttgtgtgacaaaatatagagctgatgaaaaataaaaaa

SEQ ID NO: 439618 - DNA, 1928 bp, Homo sapiens
gggccggagggccgcggtgtgccgcggggcagttgcgggttgtcataacggtccccgccggagtgaggcgaggccgcgtcgctcagttctggccgtctagggcccctgtaaggatgagagcgcagaggacgcagggccgctggaggcgcaggtaacgaagctagggtgcggttgggaccgcggctgagctttttccgggacccgtggtgctgaatggagaggacggagacgaagccgagccgcggctcctagcggcggcgccgatgctcgagctgtagctgccaggcgaggatgtgtggagcgcaggcggcgcggggtaaatgagaggtctcgggccccaggacccccggggcccgggatgagttagcgagggcagccgcgggggccagttccgaccgtgacaggccaaggcgacggccgccgcccgcccgccccttccgtgcagaagcagctgctcctttccgcgcccgcccgcctgcgctcccggccctggagaccatgaggttccgcatctacaaacggaaggtgctaatcctgacgctcgtggtggccgcctgcggcttcgtcctctggagcagcaatgggcgacaaaggaagaacgaggccctcgccccaccgttgctggacgccgaacccgcgcggggtgccggcggccgcggtggggaccacccctctgtggctgtgggcatccgcagggtctccaacgtgtcggcggcttccctggtcccggcggtcccccagcccgaggcggacaacctgacgctgcggtaccggtccctggtgtaccagctgaactttgatcagaccctgaggaatgtagataaggctggcacctgggccccccgggagctggtgctggtggtccaggtgcataaccggcccgaatacctcagactgctgctggactcacttcgaaaagcccagggaattgacaacgtcctcgtcatctttagccatgacttctggtcgaccgagatcaatcagctgatcgccggggtgaatttctgtccggttctgcaggtgttctttcctttcagcattcagttgtaccctaacgagtttccaggtagtgaccctagagattgtcccagagacctgccgaagaatgccgctttgaaattggggtgcatcaatgctgagtatcccgactccttcggccattatagagaggccaaattctcccagaccaaacatcactggtggtggaagctgcatttgtgtgggaaagagtgaaaattcttcgagattatgctggccttatacttttcctagaagaggatcactacttagccccagacttttaccatgtcttcaaaaagatgtggaaactgaagcagcaagagtgccctgaatgtgatgttctctccctggggacctatagtgccagtcgcagtttctatggcatggctgacaaggtagatgtgaaaacttggaaatccacagagcacaatatgggtctagccttgacccggaatgcctatcagaagctgatcgagtgcacagacactttctgtacttatgatgattataactgggactggactcttcaatacttgactgtatcttgtcttccaaaattctggaaagtgctggttcctcaaattcctaggatctttcatgctggagactgtggtatgcatcacaagaaaacctgtagaccatccactcagagtgcccaaattgagtcactcttaaataataacaaacaatacatgtttccagaaactctaactatcagtgaaaagtttactgtggtagccatttccccacctagaaaaaatggagggtggggagatattagggaccatgaactctgtaaaagttatagaagactgcagtgaaaatcacagttacaaaagcgacagtcttctatttttgatatttgtccaaacaggacatacaattgaataaaagagtttaggaactgg

SEQ ID NO: 439619 - DNA, 2549 bp, Homo sapiens
gggccggagggccgcggtgtgccgcggggcagttgcgggttgtcataacggtccccgccggagtgaggcgaggccgcgtcgctcagttctggccgtctagggcccctgtaaggatgagagcgcagaggacgcagggccgctggaggcgcaggtaacgaagctagggtgcggttgggaccgcggctgagctttttccgggacccgtggtgctgaatggagaggacggagacgaagccgagccgcggctcctagcggcggcgccgatgctcgagctgtagctgccaggcgaggatgtgtggagcgcaggcggcgcggggtaaatgagaggtctcgggccccaggacccccggggcccgggatgagttagcgagggcagccgcgggggccagttccgaccgtgacaggccaaggcgacggccgccgcccgcccgccccttccgtgcagaagcagctgctcctttccgcgcccgcccgcctgcgctcccggccctggagaccatgaggttccgcatctacaaacggaaggtgctaatcctgacgctcgtggtggccgcctgcggcttcgtcctctggagcagcaatgggcgacaaaggaagaacgaggccctcgccccaccgttgctggacgccgaacccgcgcggggtgccggcggccgcggtggggaccacccctctgtggctgtgggcatccgcagggtctccaacgtgtcggcggcttccctggtcccggcggtcccccagcccgaggcggacaacctgacgctgcggtaccggtccctggtgtaccagctgaactttgatcagaccctgaggaatgtagataaggctggcacctgggccccccgggagctggtgctggtggtccaggtgcataaccggcccgaatacctcagactgctgctggactcacttcgaaaagcccagggaattgacaacgtcctcgtcatctttagccatgacttctggtcgaccgagatcaatcagctgatcgccggggtgaatttctgtccggttctgcaggtgttctttcctttcagcattcagttgtaccctaacgagtttccaggtagtgaccctagagattgtcccagagacctgccgaagaatgccgctttgaaattggggtgcatcaatgctgagtatcccgactccttcggccattatagagaggccaaattctcccagaccaaacatcactggtggtggaagctgcatttgtgtgggaaagagtgaaaattcttcgagattatgctggccttatacttttcctagaagaggatcactacttagccccagacttttaccatgtcttcaaaaagatgtggaaactgaagcagcaagagtgccctgaatgtgatgttctctccctggggacctatagtgccagtcgcagtttctatggcatggctgacaaggtagatgtgaaaacttggaaatccacagagcacaatatgggtctagccttgacccggaatgcctatcagaagctgatcgagtgcacagacactttctgtacttatgatgattataactgggactggactcttcaatacttgactgtatcttgtcttccaaaattctggaaagtgctggttcctcaaattcctaggatctttcatgctggagactgtggtatgcatcacaagaaaacctgtagaccatccactcagagtgcccaaattgagtcactcttaaataataacaaacaatacatgtttccagaaactctaactatcagtgaaaagtttactgtggtagccatttccccacctagaaaaaatggagggtggggagatattagggaccatgaactctgtaaaagttatagaagactgcagtgaaaatcacagttacaaaagcgacagtcttctatttttgatatttgtccaaacaggacatacaattgaataaaagagtttaggaactggtttctgctttaatacaaaaacaaaatcttgtaaaaggtgtccaaatacatagtaatcttttccagttatgtctgattaagatttaaaactgaaggtttcattttgggagtagggttttaaagctcaatctgttatctgctaaaattgattattgttgatatgagagaagaggggaaattttatttaaattgcatttattaatctttttatctgaaactttgtacacttttccactttcaaaacctattttaagtacagcaaaatttatttaaaactgtcatagcagtaaaaagtattacgatgaaattgttagggtattaatggaacaaacccagtttcactctcttgacacacttattaggaagggattgcttcactggtttaataatttaaaagttatgtttgttaaacaccctgtcagaacagtcattttcagtattagattcctgtactattgtgttttgagtgtgttttggaaccttcatagaacacactttcttttggaatgtatttgattgataagaaagtttaaacattgttttcacctcaatgtagaaatacagtggttttgtttttttttttcttttagtgctgacaaaataaaatactcatttttgcata

SEQ ID NO: 439620 - DNA, 4022 bp, Homo sapiens
gggccggagggccgcggtgtgccgcggggcagttgcgggttgtcataacggtccccgccggagtgaggcgaggccgcgtcgctcagttctggccgtctagggcccctgtaaggatgagagcgcagaggacgcagggccgctggaggcgcaggtaacgaagctagggtgcggttgggaccgcggctgagctttttccgggacccgtggtgctgaatggagaggacggagacgaagccgagccgcgggcagccgcgggggccagttccgaccgtgacaggccaaggcgacggccgccgcccgcccgccccttccgtgcagaagcagctgctcctttccgcgcccgcccgcctgcgctcccggccctggagaccatgaggttccgcatctacaaacggaaggtgctaatcctgacgctcgtggtggccgcctgcggcttcgtcctctggagcagcaatgggcgacggtgccggcggccgcggtggggaccacccctctgtggctgtgggcatccgcagggtctccaacgtgtcggcggcttccctggtcccggcggtcccccagcccgaggcggacaacctgacgctgcggtaccggtccctggtgtaccagctgaactttgatcagaccctgaggaatgtagataaggctggcacctgggccccccgggagctggtgctggtggtccaggtgcataaccggcccgaatacctcagactgctgctggactcacttcgaaaagcccagggaattgacaacgtcctcgtcatctttagccatgacttctggtcgaccgagatcaatcagctgatcgccggggtgaatttctgtccggttctgcaggtgttctttcctttcagcattcagttgtaccctaacgagtttccaggtagtgaccctagagattgtcccagagacctgccgaagaatgccgctttgaaattggggtgcatcaatgctgagtatcccgactccttcggccattatagagaggccaaattctcccagaccaaacatcactggtggtggaagctgcatttgtgtgggaaagagtgaaaattcttcgagattatgctggccttatacttttcctagaagaggatcactacttagccccagacttttaccatgtcttcaaaaagatgtggaaactgaagcagcaagagtgccctgaatgtgatgttctctccctggggacctatagtgccagtcgcagtttctatggcatggctgacaaggtagatgtgaaaacttggaaatccacagagcacaatatgggtctagccttgacccggaatgcctatcagaagctgatcgagtgcacagacactttctgtacttatgatgattataactgggactggactcttcaatacttgactgtatcttgtcttccaaaattctggaaagtgctggttcctcaaattcctaggatctttcatgctggagactgtggtatgcatcacaagaaaacctgtagaccatccactcagagtgcccaaattgagtcactcttaaataataacaaacaatacatgtttccagaaactctaactatcagtgaaaagtttactgtggtagccatttccccacctagaaaaaatggagggtggggagatattagggaccatgaactctgtaaaagttatagaagactgcagtgaaaatcacagttacaaaagcgacagtcttctatttttgatatttgtccaaacaggacatacaattgaataaaagagtttaggaactggtttctgctttaatacaaaaacaaaatcttgtaaaaggtgtccaaatacatagtaatcttttccagttatgtctgattaagatttaaaactgaaggtttcattttgggagtagggttttaaagctcaatctgttatctgctaaaattgattattgttgatatgagagaagaggggaaattttatttaaattgcatttattaatctttttatctgaaactttgtacacttttccactttcaaaacctattttaagtacagcaaaatttatttaaaactgtcatagcagtaaaaagtattacgatgaaattgttagggtattaatggaacaaacccagtttcactctcttgacacacttattaggaagggattgcttcactggtttaataatttaaaagttatgtttgttaaacaccctgtcagaacagtcattttcagtattagattcctgtactattgtgttttgagtgtgttttggaaccttcatagaacacactttcttttggaatgtatttgattgataagaaagtttaaacattgttttcacctcaatgtagaaatacagtggttttgtttttttttttcttttagtgctgacaaaataaaatactcatttttgcataaaaaggttcctaatccttttgcagaataagttttgtttactctttataccaaaattcagtgaaggcattctacaagttttgagttagcattacattttaatatttactattgctacattgtataattgagtttgaaataaaacccagcttatgacaatgcattccctgtgcaagaaactgtttggctttcaaattacccaggcattgaaaatgaatgataaaaagttgctgtgtaagggaaatacagcctaaattgtttttgaaagccagaaatgatacaaagttcagtcatgccaaagtgaaatactttctagtgccagctttaacttaaatcatacgttttaaaaggacagatacagaaaattataggaaacaggcttaaattttgctccatatttaatgtagacgtttatagaagtttcccttaatttgtaattgcattcaaccgagaatttctcataaaagactaatttctgtgtaaagatattacgggctgggtgtggtggctcatgtctgtaatcccagcactctgggaggttgaggcaggcagattgcttgaactcaagagtttgagaccagcctgggcaacatggcgaaaacccatctctactaaaaatacaaaaaattagccgggtgtagtggtgcatctgtagtcccagctacttgagaggctgaggtgggaggatcctttgagtctcgaggcagaggttgcagtgagcctagagcgtgccactgcacgccagcctgagcaacagagcaaggctccatctaaagaaaaaaaaaaaaagttacttaaacttgtaactattaaatggcagtctcaaaattattgcatcaatttaagattcatagtagtttaagagcacatatgcttatctaaggtgaggcaaatagttctcttgctttacgagctacctttagacttacccacggcccagtctggtgcaagattttgcctgggggttataaataagggtgaatcaggaggctttgtacctatttctggtactctgacctgacatcactagttcaaagaactaaaaaattaggttatttccaggactgagctaagaaggccagagtgtgaagtagtagctgtttttgaaacaaatagatcagctcctggctttggggttagtgattaaatcaacaaatatttccctttctgtatttccttcctttcattttctttggctgccctaaaattttttgtaagaaaaaaacctgttaggatcttctctttgcctcacattttaggtgttataaaggaaattgattatgcaggaggctgagatgagaggatcacttgagcctaagagtttgaatccagtctggacaacatagcaagacccatctcttaaaaaaaaagaaagtgattaggaaacactggcttttttttgtttttctgtgtaataatgtaatgaaggcaattttcctatcagagcaaattgccagattttaaaaattccagttttactcttaaatttctataaaaccacaagatgttttaatatttcaataacttctaagaaatacttcaaaattgaattttgaaaatcattactaaataactaaatctattatatatactttatgtaacaaaaatatatatagtttgtgtgacaaaatatagagctgatgaaaaataaaaaa

SEQ ID NO: 439621 - DNA, 2903 bp, Homo sapiens
agtgatcctcttctaggaaaagtataaggccagcataatctcgaagaattttcactctttccccagacttttaccatgtcttcaaaaagatgtggaaactgcgactggcactataggtccccagggagagaacatcacattcagagcacaatatgggtctagccttgacccggaatgcctatcagaagctgatcgagtgcacagacactttctgtacttatgatgattataactgggactggactcttcaatacttgactgtatcttgtcttccaaaattctggaaagtgctggttcctcaaattcctaggatctttcatgctggagactgtggtatgcatcacaagaaaacctgtagaccatccactcagagtgcccaaattgagtcactcttaaataataacaaacaatacatgtttccagaaactctaactatcagtgaaaagtttactgtggtagccatttccccacctagaaaaaatggagggtggggagatattagggaccatgaactctgtaaaagttatagaagactgcagtgaaaatcacagttacaaaagcgacagtcttctatttttgatatttgtccaaacaggacatacaattgaataaaagagtttaggaactggtttctgctttaatacaaaaacaaaatcttgtaaaaggtgtccaaatacatagtaatcttttccagttatgtctgattaagatttaaaactgaaggtttcattttgggagtagggttttaaagctcaatctgttatctgctaaaattgattattgttgatatgagagaagaggggaaattttatttaaattgcatttattaatctttttatctgaaactttgtacacttttccactttcaaaacctattttaagtacagcaaaatttatttaaaactgtcatagcagtaaaaagtattacgatgaaattgttagggtattaatggaacaaacccagtttcactctcttgacacacttattaggaagggattgcttcactggtttaataatttaaaagttatgtttgttaaacaccctgtcagaacagtcattttcagtattagattcctgtactattgtgttttgagtgtgttttggaaccttcatagaacacactttcttttggaatgtatttgattgataagaaagtttaaacattgttttcacctcaatgtagaaatacagtggttttgtttttttttttcttttagtgctgacaaaataaaatactcatttttgcataaaaaggttcctaatccttttgcagaataagttttgtttactctttataccaaaattcagtgaaggcattctacaagttttgagttagcattacattttaatatttactattgctacattgtataattgagtttgaaataaaacccagcttatgacaatgcattccctgtgcaagaaactgtttggctttcaaattacccaggcattgaaaatgaatgataaaaagttgctgtgtaagggaaatacagcctaaattgtttttgaaagccagaaatgatacaaagttcagtcatgccaaagtgaaatactttctagtgccagctttaacttaaatcatacgttttaaaaggacagatacagaaaattataggaaacaggcttaaattttgctccatatttaatgtagacgtttatagaagtttcccttaatttgtaattgcattcaaccgagaatttctcataaaagactaatttctgtgtaaagatattacgggctgggtgtggtggctcatgtctgtaatcccagcactctgggaggttgaggcaggcagattgcttgaactcaagagtttgagaccagcctgggcaacatggcgaaaacccatctctactaaaaatacaaaaaattagccgggtgtagtggtgcatctgtagtcccagctacttgagaggctgaggtgggaggatcctttgagtctcgaggcagaggttgcagtgagcctagagcgtgccactgcacgccagcctgagcaacagagcaaggctccatctaaagaaaaaaaaaaaaagttacttaaacttgtaactattaaatggcagtctcaaaattattgcatcaatttaagattcatagtagtttaagagcacatatgcttatctaaggtgaggcaaatagttctcttgctttacgagctacctttagacttacccacggcccagtctggtgcaagattttgcctgggggttataaataagggtgaatcaggaggctttgtacctatttctggtactctgacctgacatcactagttcaaagaactaaaaaattaggttatttccaggactgagctaagaaggccagagtgtgaagtagtagctgtttttgaaacaaatagatcagctcctggctttggggttagtgattaaatcaacaaatatttccctttctgtatttccttcctttcattttctttggctgccctaaaattttttgtaagaaaaaaacctgttaggatcttctctttgcctcacattttaggtgttataaaggaaattgattatgcaggaggctgagatgagaggatcacttgagcctaagagtttgaatccagtctggacaacatagcaagacccatctcttaaaaaaaaagaaagtgattaggaaacactggcttttttttgtttttctgtgtaataatgtaatgaaggcaattttcctatcagagcaaattgccagattttaaaaattccagttttactcttaaatttctataaaaccacaagatgttttaatatttcaataacttctaagaaatacttcaaaattgaattttgaaaatcattactaaataactaaatctattatatatactttatgtaacaaaaatatatatagtttgtgtgacaaaatatagagctgatgaaaaataaaaaa

SEQ ID NO: 439622 - DNA, 424 bp, Homo sapiens
cagagttggggagtggggaggggactgagccggccggagggccccccgcacccccgctcccacccaccccgggactgataatgtgaagttcctcattttgcacaagtggcactagccccagggccaacccttccttcctcagtcaccaagggcggggagttctggagtcggaaggcgaagagcctaccaccaggtctcccactcccgcggtgccctcccttcccttccctgcggccccggaccatatttattgcatgcgccccggcggccccccatcccgagcccaggctgggctgggctggaacgcggtctctttagctccctcctcttcgtttgtatatttcctaccttgtacacaggctcttccagagccgcttccattttctatactcgaaccaaacagcaataaagcagtaaccaagga

SEQ ID NO: 439623 - DNA, 3927 bp, Homo sapiens
accgccttcgccgcggaccttcagctgccgcggtcgctccgagcggcgggccgcagaggttcaagcgattctcctgcttcagcctccggagtagctgggattacaggcacgtgccaacacacccagccaccaaaatgccagaagagatggacaagccactgatcagcctccacctggtggacagcgatagtagccttgccaaggtccccgatgaggcccccaaagtgggcatcctgggtagcggggactttgcccgctccctggccacacgcctggtgggctctggcttcaaagtggtggtggggagccgcaaccccaaacgcacagccaggctgtttccctcagcggcccaagtgactttccaagaggaggcagtgagctccccggaggtcatctttgtggctgtgttccgggagcactactcttcactgtgcagtctcagtgaccagctggcgggcaagatcctggtggatgtgagcaaccctacagagcaagagcaccttcagcatcgtgagtccaatgctgagtacctggcctccctcttccccacttgcacagtggtcaaggccttcaatgtcatctctgcctggaccctgcaggctggcccaagggatggtaacaggcaggtgcccatctgcggtgaccagccagaagccaagcgtgctgtctcggagatggcgctcgccatgggcttcatgcccgtggacatgggatccctggcgtcagcctgggaggtggaggccatgcccctgcgcctcctcccggcctggaaggtgcccaccctgctggccctggggctcttcgtctgcttctatgcctacaacttcgtccgggacgttctgcagccctatgtgcaggaaagccagaacaagttcttcaagctgcccgtgtccgtggtcaacaccacactgccgtgcgtggcctacgtgctgctgtcactcgtgtacttgcccggcgtgctggcggctgccctgcagctgcggcgcggcaccaagtaccagcgcttccccgactggctggaccactggctacagcaccgcaagcagatcgggctgctcagcttcttctgcgccgccctgcacgccctctacagcttctgcttgccgctgcgccgcgcccaccgctacgacctggtcaacctggcagtcaagcaggtcttggccaacaagagccacctctgggtggaggaggaggtctggcggatggagatctacctctccctgggagtgctggccctcggcacgttgtccctgctggccgtgacctcactgccgtccattgcaaactcgctcaactggagggagttcagcttcgttcagtcctcactgggctttgtggccctcgtgctgagcacactgcacacgctcacctacggctggacccgcgccttcgaggagagccgctacaagttctacctgcctcccaccttcacgctcacgctgctggtgccctgcgtcgtcatcctggccaaagccctgtttctcctgccctgcatcagccgcagactcgccaggatccggagaggctgggagagggagagcaccatcaagttcacgctgcccacagaccacgccctggccgagaagacgagccacgtatgaggtgcctgccctgggctctggaccccgggcacacgagggacggtgccctgagcccgttaggttttcttttcttggtggtgcaaagtggtataactgtgtgcaaataggaggtttgaggtccaaattcctgggactcaaatgtatgcagtactattcagaatgatatacacacatatgtgtatatgtatttacatatattccacatatataacaggatttgcaattatacatagctagctaaaaagttgggtctctgagatttcaacttgtagatttaaaaacaagtgccgtacgttaagagaagagcagatcatgctattgtgacatttgcagagatatacacacactttttgtacagaagaggcttgtgctgtggtgggttcgatttatccctgcccaccccatccccacaacttcccttttgctacttccccaaggctcttgcagagctagggctctgaaggggagggaaggcaacggctctgcccagagccatccctggagcatgtgagcagcggctggtctcttccctccacctggggcagcagcaggaggcctggggaggaggaaaatcaggcagtcggcctggagtctgtgcctggtcctttgcccggtggtgggaggatggagggattgggctgaagctgctccacctcatccttgctgagtgggggagacattttccctgaaagtcagaagtcaccatagagcctgcaaatggatcctcctgtgagagtgacgtcacctcctttccagagccattagtgagcctggcttgggaacaagtgtaatttccttccctcctttaacctggcgatgagcgtcctttaaaccactgtgccttctcaccctttccatcttcagtttgaacgactcccaggaaggcctagagcagaccctttagaaatcagcccaagggggagagcaagagaaaacactctagggagtaaagctccccgggcgtcagagttgagccctgcctgggctgaaggactgtcttcacgaagtcagtcctgaggaaaaatattggggactccaaatgtcctctggcagaggacccagaaaaccacactggctccaacttcctcctcatggggcattacacttcaaaacagtggggagcaacttttccaccaaagctacaaacctaaaatgctgctgccccaaagcacaagagggaagagcaccgccggggccacaggacgtctgtcctccagtcacaggccatccttgctgctccctactgactctagcttacttcccctgtgaagaaacaggtgttctcggctgagcccccaaccctctgcagaaccaggttgatctgccacagaaaaagcatctttgaagacaaagagggtgaggtcttcatgagtctcctgggcccaaagccatcttctgatggaaggaagagagtagggccagtgaaggctgcccagagagaatgtcacagatgaggctgcccctgccccctccccgccagggaggtttcatgagctcatgtctatgcagcacataagggttcttcagtgaaaagcaggagaagagcccactgcaaggatagctcattaggcacatgaccgatgcagggaaggccatgccggggaagctcttcctgcaggtattttccatctgctgtgccaaggctgagcggcagaaacttgtctcataaattggcactgatggagcatcagctgtggcccacagagagccttgctgagaagggggcaggtaaagcagagattttagcattgccttggcataacaagggcccatcgattccctactaatgagaggcagggagagcatgggcaatggagacccaccaatgatccccaaccccggtgggtactggctgcctgccctgggccagggaatggctccttataccaaagatgctggcacatagcagaacccagtgcacgtcctccccttcccacccacctctggctgaaggtgctcaagagggaagcaattataaggtgggtggcaggagggaacaggtgccacctgctggacaatcacacgaaaggcaggcgggctgtgtactgggccctgactgtgcgtccactgctgtcttccctacctcaccaggctactggcagcagcatcccgagagcacatcatctccacagcctggtaaattccatgtgcctctgggtacaaaagtgcctcaacgacatgctctggaaatcccaaatgccacagtctgaggttgatatctaaaatctatgccttcaaaagagtctctgttttttttttttaacctggtagacggtataaaagcagtgcaaataaacacctaaccttctgcaaaaaaaaaagcttt

SEQ ID NO: 439624 - DNA, 3884 bp, Homo sapiens
accgccttcgccgcggaccttcagctgccgcggtcgctccgagcggcgggccgcagaggttcaagcgattctcctgcttcagcctccggagtagctgggattacaggcacgtgccaacacacccagccaccaaaatgccagaagagatggacaagccactgatcagcctccacctggtggacagcgatagtagccttgccaaggtccccgatgaggcccccaaagtgggcatcctgggtagcggggactttgcccgctccctggccacacgcctggtgggctctggcttcaaagtggtggtggggagccgcaaccccaaacgcacagccaggctgtttccctcagcggcccaagtgactttccaagaggaggcagtgagctccccggaggtcatctttgtggctgtgttccgggagcactactcttcactgtgcagtctcagtgaccagctggcgggcaagatcctggtggatgtgagcaaccctacagagcaagagcaccttcagcatcgtgagtccaatgctgagtacctggcctccctcttccccacttgcacagtggtcaaggccttcaatgtcatctctgcctggaccctgcaggctggcccaagggatggtaacaggcaggtgcccatctgcggtgaccagccagaagccaagcgtgctgtctcggagatggcgctcgccatgggcttcatgcccgtggacatgggatccctggcgtcagcctgggaggtggaggccatgcccctgcgcctcctcccggcctggaaggtgcccaccctgctggccctggggctcttcgtctgcttctatgcctacaacttcgtccgggacgttctgcagccctatgtgcaggaaagccagaacaagttcttcaagctgcccgtgtccgtggtcaacaccacactgccgtgcgtggcctacgtgctgctgtcactcgtgtacttgcccggcgtgctggcggctgccctgcagctgcggcgcggcaccaagtaccagcgcttccccgactggctggaccactggctacagcaccgcaagcagatcgggctgctcagcttcttctgcgccgccctgcacgccctctacagcttctgcttgccgctgcgccgcgcccaccgctacgacctggtcaacctggcagtcaagcaggtcttggccaacaagagccacctctgggtggaggaggaggtctggcggatggagatctacctctccctgggagtgctggccctcggcacgttgtccctgctggccgtgacctcactgccgtccattgcaaactcgctcaactggagggagttcagcttcgttcagtcctcactgggctttgtggccctcgtgctgagcacactgcacacgctcacctacggctggacccgcgccttcgaggagagccgctacaagttctacctgcctcccaccttcacgctcacgctgctggtgccctgcgtcgtcatcctggccaaagccctgtttctcctgccctgcatcagccgcagactcgccaggatccggagaggctgggagagggagagcaccatcaagttcacgctgcccacagaccacgccctggccgagaagacgagccacgtatgaggtgcctgccctgggctctggaccccgggcacacgagggacggtgccctgagcccgttaggttttcttttcttggtggtgcaaagtggtataactgtgtgcaaataggaggtttgaggtccaaattcctgggactcaaatgtatgcagtactattcagaatgatatacacacatatgtgtatatgtatttacatatattccacatatataacaggatttgcaattatacatagctagctaaaaagttgggtctctgagatttcaacttgtagatttaaaaacaagtgccgtacgttaagagaagagcagatcatgctattgtgacatttgcagagatatacacacactttttgtacagaagaggcttgtgctgtggtgggttcgatttatccctgcccaccccatccccacaacttcccttttgctacttccccaaggctcttgcagagctagggctctgaaggggagggaaggcaacggctctgcccagagccatccctggagcatgtgagcagcggctggtctcttccctccacctggggcagcagcaggaggcctggggaggaggaaaatcaggcagtcggcctggagtctgtgcctggtcctttgcccggtggtgggaggatggagggattgggctgaagctgctccacctcatccttgctgagtgggggagacattttccctgaaagtcagaagtcaccatagagcctgcaaatggatcctcctgtgagagtgacgtcacctcctttccagagccattagtgagcctggcttgggaacaagtgtaatttccttccctcctttaacctggcgatgagcgtcctttaaaccactgtgccttctcaccctttccatcttcagtttgaacgactcccaggaaggcctagagcagaccctttagaaatcagcccaagggggagagcaagagaaaacactctagggagtaaagctccccgggcgtcagagttgagccctgcctgggctgaaggactgtcttcacgaagtcagtcctgaggaaaaatattggggactccaaatgtcctctggcagaggacccagaaaaccacactggctccaacttcctcctcatggggcattacacttcaaaacagtggggagcaacttttccaccaaagctacaaacctaaaatgctgctgccccaaagcacaagagggaagagcaccgccggggccacaggacgtctgtcctccagtcacaggccatccttgctgctccctactgactctagcttacttcccctgtgaagaaacaggtgttctcggctgagcccccaaccctctgcagaaccaggttgatctgccacagaaaaagcatctttgaagacaaagagggtgaggtcttcatgagtctccagtgaaggctgcccagagagaatgtcacagatgaggctgcccctgccccctccccgccagggaggtttcatgagctcatgtctatgcagcacataagggttcttcagtgaaaagcaggagaagagcccactgcaaggatagctcattaggcacatgaccgatgcagggaaggccatgccggggaagctcttcctgcaggtattttccatctgctgtgccaaggctgagcggcagaaacttgtctcataaattggcactgatggagcatcagctgtggcccacagagagccttgctgagaagggggcaggtaaagcagagattttagcattgccttggcataacaagggcccatcgattccctactaatgagaggcagggagagcatgggcaatggagacccaccaatgatccccaaccccggtgggtactggctgcctgccctgggccagggaatggctccttataccaaagatgctggcacatagcagaacccagtgcacgtcctccccttcccacccacctctggctgaaggtgctcaagagggaagcaattataaggtgggtggcaggagggaacaggtgccacctgctggacaatcacacgaaaggcaggcgggctgtgtactgggccctgactgtgcgtccactgctgtcttccctacctcaccaggctactggcagcagcatcccgagagcacatcatctccacagcctggtaaattccatgtgcctctgggtacaaaagtgcctcaacgacatgctctggaaatcccaaatgccacagtctgaggttgatatctaaaatctatgccttcaaaagagtctctgttttttttttttaacctggtagacggtataaaagcagtgcaaataaacacctaaccttctgcaaaaaaaaaagcttt

SEQ ID NO: 439625 - DNA, 3826 bp, Homo sapiens
accgccttcgccgcggaccttcagctgccgcggtcgctccgagcggcgggccgcagaggttcaagcgattctcctgcttcagcctccggagtagctgggattacaggcacgtgccaacacacccagccaccaaaatgccagaagagatggacaagccactgatcagcctccacctggtggacagcgatagtagccttgccaaggtccccgatgaggcccccaaagtgggcatcctgggtagcggggactttgcccgctccctggccacacgcctggtgggctctggcttcaaagtggtggtggggagccgcaaccccaaacgcacagccaggctgtttccctcagcggcccaagtgactttccaagaggaggcagtgagctccccggaggtcatctttgtggctgtgttccgggagcactactcttcactgtgcagtctcagtgaccagctggcgggcaagatcctggtggatgtgagcaaccctacagagcaagagcaccttcagcatcgtgagtccaatgctgagtacctggcctccctcttccccacttgcacagtggtcaaggccttcaatgtcatctctgcctggaccctgcaggctggcccaagggatggtaacaggcaggtgcccatctgcggtgaccagccagaagccaagcgtgctgtctcggagatggcgctcgccatgggcttcatgcccgtggacatgggatccctggcgtcagcctgggaggtggaggccatgcccctgcgcctcctcccggcctggaaggtgcccaccctgctggccctggggctcttcgtctgcttctatgcctacaacttcgtccgggacgttctgcagccctatgtgcaggaaagccagaacaagttcttcaagctgcccgtgtccgtggtcaacaccacactgccgtgcgtggcctacgtgctgctgtcactcgtgtacttgcccggcgtgctggcggctgccctgcagctgcggcgcggcaccaagtaccagcgcttccccgactggctggaccactggctacagcaccgcaagcagatcgggctgctcagcttcttctgcgccgccctgcacgccctctacagcttctgcttgccgctgcgccgcgcccaccgctacgacctggtcaacctggcagtcaagcaggtcttggccaacaagagccacctctgggtggaggaggaggtctggcggatggagatctacctctccctgggagtgctggccctcggcacgttgtccctgctggccgtgacctcactgccgtccattgcaaactcgctcaactggagggagttcagcttcgttcagtcctcactgggctttgtggccctcgtgctgagcacactgcacacgctcacctacggctggacccgcgccttcgaggagagccgctacaagttctacctgcctcccaccttcacgctcacgctgctggtgccctgcgtcgtcatcctggccaaagccctgtttctcctgccctgcatcagccgcagactcgccaggatccggagaggctgggagagggagagcaccatcaagttcacgctgcccacagaccacgccctggccgagaagacgagccacgtatgaggtgcctgccctgggctctggaccccgggcacacgagggacggtgccctgagcccgttaggttttcttttcttggtggtgcaaagtggtataactgtgtgcaaataggaggtttgaggtccaaattcctgggactcaaatgtatgcagtactattcagaatgatatacacacatatgtgtatatgtatttacatatattccacatatataacaggatttgcaattatacatagctagctaaaaagttgggtctctgagatttcaacttgtagatttaaaaacaagtgccgtacgttaagagaagagcagatcatgctattgtgacatttgcagagatatacacacactttttgtacagaagaggcttgtgctgtggtgggttcgatttatccctgcccaccccatccccacaacttcccttttgctacttccccaaggctcttgcagagctagggctctgaaggggagggaaggcaacggctctgcccagagccatccctggagcatgtgagcagcggctggtctcttccctccacctggggcagcagcaggaggcctggggaggaggaaaatcaggcagtcggcctggagtctgtgcctggtcctttgcccggtggtgggaggatggagggattgggctgaagctgctccacctcatccttgctgagtgggggagacattttccctgaaagtcagaagtcaccatagagcctgcaaatggatcctcctgtgagagtgacgtcacctcctttccagagccattagtgagcctggcttgggaacaagtgtaatttccttccctcctttaacctggcgatgagcgtcctttaaaccactgtgccttctcaccctttccatcttcagtttgaacgactcccaggaaggcctagagcagaccctttagaaatcagcccaagggggagagcaagagaaaacactctagggagtaaagctccccgggcgtcagagttgagccctgcctgggctgaaggactgtcttcacgaagtcagtcctgaggaaaaatattggggactccaaatgtcctctggcagaggacccagaaaaccacactggctccaacttcctcctcatggggcattacacttcaaaacaaagagggaagagcaccgccggggccacaggacgtctgtcctccagtcacaggccatccttgctgctccctactgactctagcttacttcccctgtgaagaaacaggtgttctcggctgagcccccaaccctctgcagaaccaggttgatctgccacagaaaaagcatctttgaagacaaagagggtgaggtcttcatgagtctccagtgaaggctgcccagagagaatgtcacagatgaggctgcccctgccccctccccgccagggaggtttcatgagctcatgtctatgcagcacataagggttcttcagtgaaaagcaggagaagagcccactgcaaggatagctcattaggcacatgaccgatgcagggaaggccatgccggggaagctcttcctgcaggtattttccatctgctgtgccaaggctgagcggcagaaacttgtctcataaattggcactgatggagcatcagctgtggcccacagagagccttgctgagaagggggcaggtaaagcagagattttagcattgccttggcataacaagggcccatcgattccctactaatgagaggcagggagagcatgggcaatggagacccaccaatgatccccaaccccggtgggtactggctgcctgccctgggccagggaatggctccttataccaaagatgctggcacatagcagaacccagtgcacgtcctccccttcccacccacctctggctgaaggtgctcaagagggaagcaattataaggtgggtggcaggagggaacaggtgccacctgctggacaatcacacgaaaggcaggcgggctgtgtactgggccctgactgtgcgtccactgctgtcttccctacctcaccaggctactggcagcagcatcccgagagcacatcatctccacagcctggtaaattccatgtgcctctgggtacaaaagtgcctcaacgacatgctctggaaatcccaaatgccacagtctgaggttgatatctaaaatctatgccttcaaaagagtctctgttttttttttttaacctggtagacggtataaaagcagtgcaaataaacacctaaccttctgcaaaaaaaaaagcttt

SEQ ID NO: 439626 - DNA, 3830 bp, Homo sapiens
accgccttcgccgcggaccttcagctgccgcggtcgctccgagcggcgggccgcagaggttcaagcgattctcctgcttcagcctccggagtagctgggattacaggcacgtgccaacacacccagccaccaaaatgccagaagagatggacaagccactgatcagcctccacctggtggacagcgatagtagccttgccaaggtccccgatgaggcccccaaagtgggcatcctgggtagcggggactttgcccgctccctggccacacgcctggtgggctctggcttcaaagtggtggtggggagccgcaaccccaaacgcacagccaggctgtttccctcagcggcccaagtgactttccaagaggaggcagtgagctccccggaggtcatctttgtggctgtgttccgggagcactactcttcactgtgcagtctcagtgaccagctggcgggcaagatcctggtggatgtgagcaaccctacagagcaagagcaccttcagcatcgtgagtccaatgctgagtacctggcctccctcttccccacttgcacagtggtcaaggccttcaatgtcatctctgcctggaccctgcaggctggcccaagggatggtaacaggcaggtgcccatctgcggtgaccagccagaagccaagcgtgctgtctcggagatggcgctcgccatgggcttcatgcccgtggacatgggatccctggcgtcagcctgggaggtggaggccatgcccctgcgcctcctcccggcctggaaggtgcccaccctgctggccctggggctcttcgtctgcttctatgcctacaacttcgtccgggacgttctgcagccctatgtgcaggaaagccagaacaagttcttcaagctgcccgtgtccgtggtcaacaccacactgccgtgcgtggcctacgtgctgctgtcactcgtgtacttgcccggcgtgctggcggctgccctgcagctgcggcgcggcaccaagtaccagcgcttccccgactggctggaccactggctacagcaccgcaagcagatcgggctgctcagcttcttctgcgccgccctgcacgccctctacagcttctgcttgccgctgcgccgcgcccaccgctacgacctggtcaacctggcagtcaagcaggtcttggccaacaagagccacctctgggtggaggaggaggtctggcggatggagatctacctctccctgggagtgctggccctcggcacgttgtccctgctggccgtgacctcactgccgtccattgcaaactcgctcaactggagggagttcagcttcgttcagtcctcactgggctttgtggccctcgtgctgagcacactgcacacgctcacctacggctggacccgcgccttcgaggagagccgctacaagttctacctgcctcccaccttcacgctcacgctgctggtgccctgcgtcgtcatcctggccaaagccctgtttctcctgccctgcatcagccgcagactcgccaggatccggagaggctgggagagggagagcaccatcaagttcacgctgcccacagaccacgccctggccgagaagacgagccacgtatgaggtgcctgccctgggctctggaccccgggcacacgagggacggtgccctgagcccgttaggttttcttttcttggtggtgcaaagtggtataactgtgtgcaaataggaggtttgaggtccaaattcctgggactcaaatgtatgcagtactattcagaatgatatacacacatatgtgtatatgtatttacatatattccacatatataacaggatttgcaattatacatagctagctaaaaagttgggtctctgagatttcaacttgtagatttaaaaacaagtgccgtacgttaagagaagagcagatcatgctattgtgacatttgcagagatatacacacactttttgtacagaagaggcttgtgctgtggtgggttcgatttatccctgcccaccccatccccacaacttcccttttgctacttccccaaggctcttgcagagctagggctctgaaggggagggaaggcaacggctctgcccagagccatccctggagcatgtgagcagcggctggtctcttccctccacctggggcagcagcaggaggcctggggaggaggaaaatcaggcagtcggcctggagtctgtgcctggtcctttgcccggtggtgggaggatggagggattgggctgaagctgctccacctcatccttgctgagtgggggagacattttccctgaaagtcagaagtcaccatagagcctgcaaatggatcctcctgtgagagtgacgtcacctcctttccagagccattagtgagcctggcttgggaacaagtgtaatttccttccctcctttaacctggcgatgagcgtcctttaaaccactgtgccttctcaccctttccatcttcagtttgaacgactcccaggaaggcctagagcagaccctttagaaatcagcccaagggggagagcaagagaaaacactctagggagtaaagctccccgggcgtcagagttgagccctgcctgggctgaaggactgtcttcacgaagtcagtcctgaggaactccaacttcctcctcatggggcattacacttcaaaacagtggggagcaacttttccaccaaagctacaaacctaaaatgctgctgccccaaagcacaagagggaagagcaccgccggggccacaggacgtctgtcctccagtcacaggccatccttgctgctccctactgactctagcttacttcccctgtgaagaaacaggtgttctcggctgagcccccaaccctctgcagaaccaggttgatctgccacagaaaaagcatctttgaagacaaagagggtgaggtcttcatgagtctccagtgaaggctgcccagagagaatgtcacagatgaggctgcccctgccccctccccgccagggaggtttcatgagctcatgtctatgcagcacataagggttcttcagtgaaaagcaggagaagagcccactgcaaggatagctcattaggcacatgaccgatgcagggaaggccatgccggggaagctcttcctgcaggtattttccatctgctgtgccaaggctgagcggcagaaacttgtctcataaattggcactgatggagcatcagctgtggcccacagagagccttgctgagaagggggcaggtaaagcagagattttagcattgccttggcataacaagggcccatcgattccctactaatgagaggcagggagagcatgggcaatggagacccaccaatgatccccaaccccggtgggtactggctgcctgccctgggccagggaatggctccttataccaaagatgctggcacatagcagaacccagtgcacgtcctccccttcccacccacctctggctgaaggtgctcaagagggaagcaattataaggtgggtggcaggagggaacaggtgccacctgctggacaatcacacgaaaggcaggcgggctgtgtactgggccctgactgtgcgtccactgctgtcttccctacctcaccaggctactggcagcagcatcccgagagcacatcatctccacagcctggtaaattccatgtgcctctgggtacaaaagtgcctcaacgacatgctctggaaatcccaaatgccacagtctgaggttgatatctaaaatctatgccttcaaaagagtctctgttttttttttttaacctggtagacggtataaaagcagtgcaaataaacacctaaccttctgcaaaaaaaaaagcttt

SEQ ID NO: 439627 - DNA, 3786 bp, Homo sapiens
accgccttcgccgcggaccttcagctgccgcggtcgctccgagcggcgggccgcagagccaccaaaatgccagaagagatggacaagccactgatcagcctccacctggtggacagcgatagtagccttgccaaggtccccgatgaggcccccaaagtgggcatcctgggtagcggggactttgcccgctccctggccacacgcctggtgggctctggcttcaaagtggtggtggggagccgcaaccccaaacgcacagccaggctgtttccctcagcggcccaagtgactttccaagaggaggcagtgagctccccggaggtcatctttgtggctgtgttccgggagcactactcttcactgtgcagtctcagtgaccagctggcgggcaagatcctggtggatgtgagcaaccctacagagcaagagcaccttcagcatcgtgagtccaatgctgagtacctggcctccctcttccccacttgcacagtggtcaaggccttcaatgtcatctctgcctggaccctgcaggctggcccaagggatggtaacaggcaggtgcccatctgcggtgaccagccagaagccaagcgtgctgtctcggagatggcgctcgccatgggcttcatgcccgtggacatgggatccctggcgtcagcctgggaggtggaggccatgcccctgcgcctcctcccggcctggaaggtgcccaccctgctggccctggggctcttcgtctgcttctatgcctacaacttcgtccgggacgttctgcagccctatgtgcaggaaagccagaacaagttcttcaagctgcccgtgtccgtggtcaacaccacactgccgtgcgtggcctacgtgctgctgtcactcgtgtacttgcccggcgtgctggcggctgccctgcagctgcggcgcggcaccaagtaccagcgcttccccgactggctggaccactggctacagcaccgcaagcagatcgggctgctcagcttcttctgcgccgccctgcacgccctctacagcttctgcttgccgctgcgccgcgcccaccgctacgacctggtcaacctggcagtcaagcaggtcttggccaacaagagccacctctgggtggaggaggaggtctggcggatggagatctacctctccctgggagtgctggccctcggcacgttgtccctgctggccgtgacctcactgccgtccattgcaaactcgctcaactggagggagttcagcttcgttcagtcctcactgggctttgtggccctcgtgctgagcacactgcacacgctcacctacggctggacccgcgccttcgaggagagccgctacaagttctacctgcctcccaccttcacgctcacgctgctggtgccctgcgtcgtcatcctggccaaagccctgtttctcctgccctgcatcagccgcagactcgccaggatccggagaggctgggagagggagagcaccatcaagttcacgctgcccacagaccacgcccctgagcccgttaggttttcttttcttggtggtgcaaagtggtataactgtgtgcaaataggaggtttgaggtccaaattcctgggactcaaatgtatgcagtactattcagaatgatatacacacatatgtgtatatgtatttacatatattccacatatataacaggatttgcaattatacatagctagctaaaaagttgggtctctgagatttcaacttgtagatttaaaaacaagtgccgtacgttaagagaagagcagatcatgctattgtgacatttgcagagatatacacacactttttgtacagaagaggcttgtgctgtggtgggttcgatttatccctgcccaccccatccccacaacttcccttttgctacttccccaaggctcttgcagagctagggctctgaaggggagggaaggcaacggctctgcccagagccatccctggagcatgtgagcagcggctggtctcttccctccacctggggcagcagcaggaggcctggggaggaggaaaatcaggcagtcggcctggagtctgtgcctggtcctttgcccggtggtgggaggatggagggattgggctgaagctgctccacctcatccttgctgagtgggggagacattttccctgaaagtcagaagtcaccatagagcctgcaaatggatcctcctgtgagagtgacgtcacctcctttccagagccattagtgagcctggcttgggaacaagtgtaatttccttccctcctttaacctggcgatgagcgtcctttaaaccactgtgccttctcaccctttccatcttcagtttgaacgactcccaggaaggcctagagcagaccctttagaaatcagcccaagggggagagcaagagaaaacactctagggagtaaagctccccgggcgtcagagttgagccctgcctgggctgaaggactgtcttcacgaagtcagtcctgaggaaaaatattggggactccaaatgtcctctggcagaggacccagaaaaccacactggctccaacttcctcctcatggggcattacacttcaaaacagtggggagcaacttttccaccaaagctacaaacctaaaatgctgctgccccaaagcacaagagggaagagcaccgccggggccacaggacgtctgtcctccagtcacaggccatccttgctgctccctactgactctagcttacttcccctgtgaagaaacaggtgttctcggctgagcccccaaccctctgcagaaccaggttgatctgccacagaaaaagcatctttgaagacaaagagggtgaggtcttcatgagtctcctgggcccaaagccatcttctgatggaaggaagagagtagggccagtgaaggctgcccagagagaatgtcacagatgaggctgcccctgccccctccccgccagggaggtttcatgagctcatgtctatgcagcacataagggttcttcagtgaaaagcaggagaagagcccactgcaaggatagctcattaggcacatgaccgatgcagggaaggccatgccggggaagctcttcctgcaggtattttccatctgctgtgccaaggctgagcggcagaaacttgtctcataaattggcactgatggagcatcagctgtggcccacagagagccttgctgagaagggggcaggtaaagcagagattttagcattgccttggcataacaagggcccatcgattccctactaatgagaggcagggagagcatgggcaatggagacccaccaatgatccccaaccccggtgggtactggctgcctgccctgggccagggaatggctccttataccaaagatgctggcacatagcagaacccagtgcacgtcctccccttcccacccacctctggctgaaggtgctcaagagggaagcaattataaggtgggtggcaggagggaacaggtgccacctgctggacaatcacacgaaaggcaggcgggctgtgtactgggccctgactgtgcgtccactgctgtcttccctacctcaccaggctactggcagcagcatcccgagagcacatcatctccacagcctggtaaattccatgtgcctctgggtacaaaagtgcctcaacgacatgctctggaaatcccaaatgccacagtctgaggttgatatctaaaatctatgccttcaaaagagtctctgttttttttttttaacctggtagacggtataaaagcagtgcaaataaacacctaaccttctgcaaaaaaaaaagcttt

SEQ ID NO: 439628 - DNA, 3873 bp, Homo sapiens
accgccttcgccgcggaccttcagctgccgcggtcgctccgagcggcgggccgcagaggttcaagcgattctcctgcttcagcctccggagtagctgggattacaggcacgtgccaacacacccagccaccaaaatgccagaagagatggacaagccactgatcagcctccacctggtggacagcgatagtagccttgccaaggtccccgatgaggcccccaaagtgggcatcctgggtagcggggactttgcccgctccctggccacacgcctggtgggctctggcttcaaagtggtggtggggagccgcaaccccaaacgcacagccaggctgtttccctcagcggcccaagtgactttccaagaggaggcagtgagctccccggaggtcatctttgtggctgtgttccgggagcactactcttcactgtgcagtctcagtgaccagctggcgggcaagatcctggtggatgtgagcaaccctacagagcaagagcaccttcagcatcgtgagtccaatgctgagtacctggcctccctcttccccacttgcacagtggtcaaggccttcaatgtcatctctgcctggaccctgcaggctggcccaagggatggtaacaggcaggtgcccatctgcggtgaccagccagaagccaagcgtgctgtctcggagatggcgctcgccatgggcttcatgcccgtggacatgggatccctggcgtcagcctgggaggtggaggccatgcccctgcgcctcctcccggcctggaaggtgcccaccctgctggccctggggctcttcgtctgcttctatgcctacaacttcgtccgggacgttctgcagccctatgtgcaggaaagccagaacaagttcttcaagctgcccgtgtccgtggtcaacaccacactgccgtgcgtggcctacgtgctgctgtcactcgtgtacttgcccggcgtgctggcggctgccctgcagctgcggcgcggcaccaagtaccagcgcttccccgactggctggaccactggctacagcaccgcaagcagatcgggctgctcagcttcttctgcgccgccctgcacgccctctacagcttctgcttgccgctgcgccgcgcccaccgctacgacctggtcaacctggcagtcaagcaggtcttggccaacaagagccacctctgggtggaggaggaggtctggcggatggagatctacctctccctgggagtgctggccctcggcacgttgtccctgctggccgtgacctcactgccgtccattgcaaactcgctcaactggagggagttcagcttcgttcagtcctcactgggctttgtggccctcgtgctgagcacactgcacacgctcacctacggctggacccgcgccttcgaggagagccgctacaagttctacctgcctcccaccttcacgctcacgctgctggtgccctgcgtcgtcatcctggccaaagccctgtttctcctgccctgcatcagccgcagactcgccaggatccggagaggctgggagagggagagcaccatcaagttcacgctgcccacagaccacgccctggccgagaagacgagccacgtatgaggtgcctgccctgggctctggaccccgggcacacgagggacggtgccctgagcccgttaggttttcttttcttggtggtgcaaagtggtataactgtgtgcaaataggaggtttgaggtccaaattcctgggactcaaatgtatgcagtactattcagaatgatatacacacatatgtgtatatgtatttacatatattccacatatataacaggatttgcaattatacatagctagctaaaaagttgggtctctgagatttcaacttgtagatttaaaaacaagtgccgtacgttaagagaagagcagatcatgctattgtgacatttgcagagatatacacacactttttgtacagaagaggcttgtgctgtggtgggttcgatttatccctgcccaccccatccccacaacttcccttttgctacttccccaaggctcttgcagagctagggctctgaaggggagggaaggcaacggctctgcccagagccatccctggagcatgtgagcagcggctggtctcttccctccacctggggcagcagcaggaggcctggggaggaggagatggagggattgggctgaagctgctccacctcatccttgctgagtgggggagacattttccctgaaagtcagaagtcaccatagagcctgcaaatggatcctcctgtgagagtgacgtcacctcctttccagagccattagtgagcctggcttgggaacaagtgtaatttccttccctcctttaacctggcgatgagcgtcctttaaaccactgtgccttctcaccctttccatcttcagtttgaacgactcccaggaaggcctagagcagaccctttagaaatcagcccaagggggagagcaagagaaaacactctagggagtaaagctccccgggcgtcagagttgagccctgcctgggctgaaggactgtcttcacgaagtcagtcctgaggaaaaatattggggactccaaatgtcctctggcagaggacccagaaaaccacactggctccaacttcctcctcatggggcattacacttcaaaacagtggggagcaacttttccaccaaagctacaaacctaaaatgctgctgccccaaagcacaagagggaagagcaccgccggggccacaggacgtctgtcctccagtcacaggccatccttgctgctccctactgactctagcttacttcccctgtgaagaaacaggtgttctcggctgagcccccaaccctctgcagaaccaggttgatctgccacagaaaaagcatctttgaagacaaagagggtgaggtcttcatgagtctcctgggcccaaagccatcttctgatggaaggaagagagtagggccagtgaaggctgcccagagagaatgtcacagatgaggctgcccctgccccctccccgccagggaggtttcatgagctcatgtctatgcagcacataagggttcttcagtgaaaagcaggagaagagcccactgcaaggatagctcattaggcacatgaccgatgcagggaaggccatgccggggaagctcttcctgcaggtattttccatctgctgtgccaaggctgagcggcagaaacttgtctcataaattggcactgatggagcatcagctgtggcccacagagagccttgctgagaagggggcaggtaaagcagagattttagcattgccttggcataacaagggcccatcgattccctactaatgagaggcagggagagcatgggcaatggagacccaccaatgatccccaaccccggtgggtactggctgcctgccctgggccagggaatggctccttataccaaagatgctggcacatagcagaacccagtgcacgtcctccccttcccacccacctctggctgaaggtgctcaagagggaagcaattataaggtgggtggcaggagggaacaggtgccacctgctggacaatcacacgaaaggcaggcgggctgtgtactgggccctgactgtgcgtccactgctgtcttccctacctcaccaggctactggcagcagcatcccgagagcacatcatctccacagcctggtaaattccatgtgcctctgggtacaaaagtgcctcaacgacatgctctggaaatcccaaatgccacagtctgaggttgatatctaaaatctatgccttcaaaagagtctctgttttttttttttaacctggtagacggtataaaagcagtgcaaataaacacctaaccttctgcaaaaaaaaaagcttt

SEQ ID NO: 439629 - DNA, 2947 bp, Homo sapiens
accgccttcgccgcggaccttcagctgccgcggtcgctccgagcggcgggccgcagaggttcaagcgattctcctgcttcagcctccggagtagctgggattacaggcacgtgccaacacacccagccaccaaaatgccagaagagatggacaagccactgatcagcctccacctggtggacagcgatagtagccttgccaaggtccccgatgaggcccccaaagtgggcatcctgggtagcggggactttgcccgctccctggccacacgcctggtgggctctggcttcaaagtggtggtggggagccgcaaccccaaacgcacagccaggctgtttccctcagcggcccaagtgactttccaagaggaggcagtgagctccccggaggtcatctttgtggctgtgttccgggagcactactcttcactgtgcagtctcagtgaccagctggcgggcaagatcctggtggatgtgagcaaccctacagagcaagagcaccttcagcatcgtgagtccaatgctgagtacctggcctccctcttccccacttgcacagtggtcaaggccttcaatgtcatctctgcctggaccctgcaggctggcccaagggatggtaacaggcaggtgcccatctgcggtgaccagccagaagccaagcgtgctgtctcggagatggcgctcgccatgggcttcatgcccgtggacatgggatccctggcgtcagcctgggaggtggaggccatgcccctgcgcctcctcccggcctggaaggtgcccaccctgctggccctggggctcttcgtctgcttctatgcctacaacttcgtccgggacgttctgcagccctatgtgcaggaaagccagaacaagttcttcaagctgcccgtgtccgtggtcaacaccacactgccgtgcgtggcctacgtgctgctgtcactcgtgtacttgcccggcgtgctggcggctgccctgcagctgcggcgcggcaccaagtaccagcgcttccccgactggctggaccactggctacagcaccgcaagcagatcgggctgctcagcttcttctgcgccgccctgcacgccctctacagcttctgcttgccgctgcgccgcgcccaccgctacgacctggtcaacctggcagtcaagcaggtcttggccaacaagagccacctctgggtggaggaggaggtctggcggatggagatctacctctccctgggagtgctggccctcggcacgttgtccctgctggccgtgacctcactgccgtccattgcaaactcgctcaactggagggagttcagcttcgttcagtcctcactgggctttgtggccctcgtgctgagcacactgcacacgctcacctacggctggacccgcgccttcgaggagagccgctacaagttctacctgcctcccaccttcacgctcacgctgctggtgccctgcgtcgtcatcctggccaaagccctgtttctcctgccctgcatcagccgcagactcgccaggatccggagaggctgggagagggagagcaccatcaagttcacgctgcccacagaccacgccctggccgagaagacgagccacgtatgaggtgcctgccctgggctctggaccccgggcacacgagggacggtgccctgagcccgttaggttttcttttcttggtggtgcaaagtggtataactgtgtgcaaataggaggtttgaggtccaaattcctgggactcaaatgtatgcagtactattcagaatgatatacacacatatgtgtatatgtatttacatatattccacatatataacaggatttgcaattatacatagctagctaaaaagttgggtctctgagatttcaacttgtagatttaaaaacaagtgccgtacgttaagagaagagcagatcatgctattgtgacatttgcagagatatacacacactttttgtacagaagaggcttgtgctgtggtgggttcgatttatccctgcccaccccatccccacaacttcccttttgctacttccccaaggctcttgcagagctagggctctgaaggggagggaaggcaacggctctgcccagagccatccctggagcatgtgagcagcggctggtctcttccctccacctggggcagcagcaggaggcctggggaggaggaaaatcaggcagtcggcctggagtctgtgcctggtcctttgcccggtggtgggaggatggagggattgggctgaagctgctccacctcatccttgctgagtgggggagacattttccctgaaagtcagaagtcaccatagagcctgcaaatggatcctcctgtgagagtgacgtcacctcctttccagagccattagtgagcctggcttgggaacaagtgtaatttccttccctcctttaacctggcgatgagcgtcctttaaaccactgtgccttctcaccctttccatcttcagtttgaacgactcccaggaaggcctagagcagaccctttagaaatcagcccaagggggagagcaagagaaaacactctagggagtaaagctccccgggcgtcagagttgagccctgcctgggctgaaggactgtcttcacgaagtcagtcctgaggaatcaggcagtcggcctggagtctgtgcctggtcctttgcccggtggtgggaggatggagggattgggctgctgtcttccctacctcaccaggctactggcagcagcatcccgagagcacatcatctccacagcctggtaaattccatgtgcctctgggtacaaaagtgcctcaacgacatgctctggaaatcccaaatgccacagtctgaggttgatatctaaaatctatgccttcaaaagagtctctgttttttttttttaacctggtagacggtataaaagcagtgcaaataaacacctaaccttctgcaaaaaaaaaagcttt

SEQ ID NO: 439630 - DNA, 1192 bp, Homo sapiens
gggttgcgccagggagccggaaagccgactcccgaagttggggtcctgggaaaacttgggtcctgggttgactgagaagcggcggggaaaggaggcgggccaggaggagggggcctggcggacgccggccggggggcggggcgcggcggggctgtcggtcacgcccctcagtccgccccgccccgccccgcctgccggggaagggccacgttgcccgcccggccgtccggccccggcgcgccgcagaaagggctggcgagtcgaaaggcgaggcggccgcggcagcgcttgggacgcgcctgggcaccgggctcgctccctgcgccccggagcaggccaagttcggggccaggacgtcgggaggacctggtgcatggctgcctcctaatcccatagtccagaggaggcatccctaggactgcgggcaagggagccgggcaagcccagggcagccttgaaccgtcccctggcctgccctccccggtgggggccaggatgctgaagaagcagtctgcagggcttgtgctgtggggcgctatcctcgacatatttgtggccaaaatgatactaaccaaaggggcttccttgtcagggcctggtggagttggtgggtcatcggggctcactgcctcctgcccttctctcctgtctgacccccacttagcccttctctccttgcagcctagcagtttatagttctgagatggaaagttgaagggggcaagcaagacctctcctcagcccatgcccagctgtcaggagagaggtgcagggaggaaggccttgtgctgggacaacctctctcttgccttacctcagagagggactatgccctgacccctcctttctgaaaatcagtgccctccctgttgctctaggaggctcctgctggcttggtagaagacagaattcgatctgcctgtccctttttcccctggggtttgacacacaggctcctctcagcatgaggtggagcagtgaccaggtggagcagtgaccaggacgcctctggcccagtgctgcccagcctccccgcccgctcccaggcgccccatgtcctcacaggccaggacgccatggcaggatggagaggacttggtggatttttgtttcttgcctgacctcagtttcatgaaagaaagtggaagctacagaattattttctaaaataaaggctgaattgtctgaaaaa

SEQ ID NO: 439631 - DNA, 2924 bp, Homo sapiens
gggttgcgccagggagccggaaagccgactcccgaagttggggtcctgggaaaacttgggtcctgggttgactgagaagcggcggggaaaggaggcgggccaggaggagggggcctggcggacgccggccggggggcggggcgcggcggggctgtcggtcacgcccctcagtccgccccgccccgccccgcctgccggggaagggccacgttgcccgcccggccgtccggccccggcgcgccgcagaaagggctggcgagtcgaaaggcgaggcggccgcggcagcgcttgggacgcgcctgggcaccgggctcgctccctgcgccccggagcaggccaagttcggggccaggacgtcgggaggacctggtgcatggctgcctcctaatcccatagtccagaggaggcatccctaggactgcgggcaagggagccgggcaagcccagggcagccttgaaccgtcccctggcctgccctccccggtgggggccaggatgctgaagaagcagtctgcagggcttgtgctgtggggcgctatcctctttgtggcctggaatgccctgctgctcctcttcttctggacgcgcccagcacctggcaggccaccctcagtcagcgctctcgatggcgaccccgccagcctcacccgggaagtgattcgcctggcccaagacgccgaggtggagctggagcggcagcgtgggctgctgcagcagatcggggatgccctgtcgagccagcgggggagggtgcccaccgcggcccctcccgcccagccgcgtgtgcctgtgacccccgcgccggcggtgattcccatcctggtcatcgcctgtgaccgcagcactgttcggcgctgcctggacaagctgctgcattatcggccctcggctgagctcttccccatcatcgttagccaggactgcgggcacgaggagacggcccaggccatcgcctcctacggcagcgcggtcacgcacatccggcagcccgacctgagcagcattgcggtgccgccggaccaccgcaagttccagggctactacaagatcgcgcgccactaccgctgggcgctgggccaggtcttccggcagtttcgcttccccgcggccgtggtggtggaggatgacctggaggtggccccggacttcttcgagtactttcgggccacctatccgctgctgaaggccgacccctccctgtggtgcgtctcggcctggaatgacaacggcaaggagcagatggtggacgccagcaggcctgagctgctctaccgcaccgactttttccctggcctgggctggctgctgttggccgagctctgggctgagctggagcccaagtggccaaaggccttctgggacgactggatgcggcggccggagcagcggcaggggcgggcctgcatacgccctgagatctcaagaacgatgacctttggccgcaagggtgtgagccacgggcagttctttgaccagcacctcaagtttatcaagctgaaccagcagtttgtgcacttcacccagctggacctgtcttacctgcagcgggaggcctatgaccgagatttcctcgcccgcgtctacggtgctccccagctgcaggtggagaaagtgaggaccaatgaccggaaggagctgggggaggtgcgggtgcagtatacgggcagggacagcttcaaggctttcgccaaggctctgggtgtcatggatgaccttaagtcgggggttccgagagctggctaccggggtattgtcaccttccagttccggggccgccgtgtccacctggcgcccccaccgacgtgggagggctatgatcctagctggaattagcacctgcctgtccttcctgggcccctccttgccacatcatgagctgaggtgggaccacagtccccaggctgcatcggcctgcctgtgtttccctcttaggtgcatttatctttttgatttttccgagtggcatttaagtgcacaaatgataacaagaggattattctcccgttctcaagggagtcagatcaggggaactattctagggtatgttgcggggtattaagcaggaaaccactgtgtggtggggggcactgggcttgttggggccagaaatgtccacgtcctgagctttctcctggagcatgtgcagagagtttggcaacgttcgctctcttgaccagaccccttctccctgacctggctcttccagccagggcacgagccctccttctatacctgctccccttcccccagtggggactgagttatgggagaaggggacatatttgtggccaaaatgatactaaccaaaggggcttccttgtcagggcctggtggagttggtgggtcatcggggctcactgcctcctgcccttctctcctgtctgacccccacttagcccttctctccttgcagcctagcagtttatagttctgagatggaaagttgaagggggcaagcaagacctctcctcagcccatgcccagctgtcaggagagaggtgcagggaggaaggccttgtgctgggacaacctctctcttgccttacctcagagagggactatgccctgacccctcctttctgaaaatcagtgccctccctgttgctctaggaggctcctgctggcttggtagaagacagaattcgatctgcctgtccctttttcccctggggtttgacacacaggctcctctcagcatgaggtggagcagtgaccaggtggagcagtgaccaggacgcctctggcccagtgctgcccagcctccccgcccgctcccaggcgccccatgtcctcacaggccaggacgccatggcaggatggagaggacttggtggatttttgtttcttgcctgacctcagtttcatgaaagaaagtggaagctacagaattattttctaaaataaaggctgaattgtctgaaaaa

SEQ ID NO: 439632 - DNA, 826 bp, Homo sapiens
agggcatagtccctctctgaggtaaggcaagagagaggttgtcccagcacaaggccttcctccctgcacctctctcctgacagctgggcatgggctgaggagaggtcttgcctgacccctcctttctgaaaatcagtgccctccctgttgctctaggaggctcctgctggcttggtagaagacagaattcgatctgcctgtccctttttcccctggggtttgacacacaggctcctctcagcatgaggtggagcagtgaccaggtggagcagtgaccaggacgcctctggcccagtgctgcccagcctccccgcccgctcccaggcgccccatgtcctcacaggccaggacgccatggcaggatggagaggacttggtggatttttgtttcttgcctgacctcagtttcatgaaagaaagtggaagctacagaattattttctaaaataaaggctgaattgtctgaaaaaaaaaaaaaacaaaaaaaaaacaaaaaacaaaaaaaaaaaaaaaaaaaaaaaaagagaaaaagaaaaaaaaaaagaaaaaagaaagaaaaaccaaaacaaaaaagaaaaaagtaaagagatagaaccacaggaagcaaacagaggggaccgacgcagcaagcataaagaaagagcaacagagcaataggacaacagaagaagaagtgaaggagccctacacatgaaataagatcagcagcagaaagacgcacaccaaaaaagcaagaagcacaaagaaagagaaagacaatggcgccaaccacaggcgcacgaaagcgcacaaccgagatgaagaagggtgaggaaaattaacggtg

SEQ ID NO: 439633 - DNA, 743 bp, Homo sapiens
gagtgtgtgtggatggatgtgtgttgagagagagaatggatgtgtgtgtgtttacgaataaacttggaggggagggggcaacaggggtgggttttcgggctgagaaatgggaacactgtggggctgctgcaagcaggacttgggccttaaacattccaggagagtgttctcgggagtagccccgggaaggactttaacagaggttgggaattacatctctggcacagttttgcaagcagagggggagcttagttaaaggagcaaagaatgcaagtggaagatgccagcatctcggtctggaaaggatttattaactagttgaagagggctggtggattaaaacactcagcaccctaagaagcttgggagattcgattattatgttgcgctttagacaggagggcaggagaaagggcgttcttttctcgatttcttagaagagtctccggttacttttctgtggtgagaacgggtacgatccatcttttatcctgaatcatgtatgtttgtacatacatataatatgtttatattatatgtgtttatatatgtaaacactattgatgaggtgactgtgttctggcgtgtgatacgtgagttaagtaggtgctttgtataaccttgcggagtgtttaacgaaggtgttttgatgatagagcctagtatggactcttaggtggggagtggaaactagaaggttttaggactctatttgggtatctagattagagagcgttataatg

SEQ ID NO: 439634 - DNA, 1149 bp, Homo sapiens
aaataaccgggagacaagctttcggaggcttttgactgactggatgtgggaatgttgtggaagacttctggcctgccatttcctgagaacgggactgctgagagaggagctgggaggagcactgcaaatttcactttggacacgtgagagcctggcagagagcaggtgtgtgatacacgtcgtcaggtgactgaccgaggaattcagggcaaacagatcatctcaatttgccttgctgatgtgccagctgggattacgctgatggatgaagctcttcagagctatgggcaatatctacatatttgattgtcaagaaacttcgtgtggaaatagcttcaaacttacacaaattgcaagaataaaaaatagtataaggatattcgtacacactctctttactcagattcacctgttaatattttgctccatttgctctctatgtgtgcagagtatgtttttgttctgaaccatttgagaagttgcatctatcctggtcctctacttctcaatacttcagtgtgtattacctaagaattggaattaatcagttatcactgatactttaacctactgtccatattccacctttgtcattttacccaataacgtctttttaaaaaaagttttttgaggtttcattgacatacaattgatatcaatatgtgcaaagaactgcatataaagtgtacaatttgataagttttgacatatatgtgtgtgtgtgtatatatatatatatatatatacctgtaaaagtatcaccacaatcaagataataaacatatccacccttctagaagcttcctaatgcccctgtgtagtaactaccctactgcccttctctgcctccatccccaggcaacaactgatctgctttctgtaatatagattagtttctattttcggcagttttatgtcaatggaatcacagtgtatgtgctcttttttgtttttcccaaaaagacccatattgtgtaattatttggagattgtgttgtgtatgtcagtggtttattcagttttattgctgaatattattccattctatgagtaaaccacaatttgtttatctgtatttccctgttgatgggcctttgggttatttccagttttgagtgattatgaataaagttaccatcaacactcctg

SEQ ID NO: 439635 - DNA, 441 bp, Homo sapiens
aaataaccgggagacaagctttcggaggcttttgactgactggatgtgggaatgttgtggaagacttctggcctgccatttcctgagaacgggactgctgagagaggagctgggaggagcactgcaaatttcactttggacacgtgagagtggcagcatggagaggtggggcctttaagaggtgattggatcatgaaggctctattcccactaatgaatggattcatcatgggagaactggcggctttataaaagaggaagagagacctgcgctagcaccttagcacgctcagtccccctgccatgtcatgccctgaacccctcaggactctgcagagagttcctaccatcaagagggctctcaccaaatgcagcccctcaactttggacttctcagcctccagagctgtaagaaataaattccctttccttataaattac

SEQ ID NO: 439636 - DNA, 499 bp, Homo sapiens
ctgggccagcgctggggatcgggcctggggcctggattgcgacccgcggcgggccgcggctcctagccgagacggggcgggcgggaaccaggttaacacagaaatctgcctcctgggccatgccgcttctaaggcctgtttcttctcatgagccccagcacaagacagatgggccagttctcacagtggataacttcccctgcctgagcaagagatgggatagtatctgggatctgtccatcaccagactctgagcttaataaggcagctgaatgaagggagaaggtgttgagctggcgagttcgcggaggctactattcaggaaatcttatccagatgagtacactggaagctacacctctccattactctgtccaggtcccttacaagttgttacgaggagcaaatgaaacaaggattttgaaaagtatccagggccgtgtacacaggaaacaataacatcgatgttgctctacgtgccttaaaagcacagaaacaa

SEQ ID NO: 439637 - DNA, 3186 bp, Homo sapiens
gagtgtgtgtggatggatgtgtgttgagagagagaatggatgtgtgtgtgtttacgaataaacttggaggggagggggcaacaggggtgggttttcgggctgagaaatgggaacactgtggggctgctgcaagcaggacttgggccttaaacattccaggagagtgttctcgggagtagccccgggaaggactttaacagaggttaacacagaaatctgcctcctgggccatgccgcttctaaggcctgtttcttctcatgagccccagcacaagacagatgggccagttctcacagtggataacttcccctgcctgagcaagagatgggatagtatctgggatctgtccatcaccagactctgagcttaataaggcagctgaatgaagggaggtaacggacccctgagaggggcactgaagtctgcagtggggggggaggggcctggacacaccccttcccccccagactcctccccgtcagggtcagctcagccatggactttggacctggataagaagagagaagctgcactttggtggatctgatttgggattctcagttttgaaaatggagtgctgaatggggatttgatgatctcctggagagcaactgagacaagagaagaaaggtgcatggctgcctcctaatcccatagtccagaggaggcatccctaggactgcgggcaagggagccgggcaagcccagggcagccttgaaccgtcccctggcctgccctccccggtgggggccaggatgctgaagaagcagtctgcagggcttgtgctgtggggcgctatcctctttgtggcctggaatgccctgctgctcctcttcttctggacgcgcccagcacctggcaggccaccctcagtcagcgctctcgatggcgaccccgccagcctcacccgggaagtgattcgcctggcccaagacgccgaggtggagctggagcggcagcgtgggctgctgcagcagatcggggatgccctgtcgagccagcgggggagggtgcccaccgcggcccctcccgcccagccgcgtgtgcctgtgacccccgcgccggcggtgattcccatcctggtcatcgcctgtgaccgcagcactgttcggcgctgcctggacaagctgctgcattatcggccctcggctgagctcttccccatcatcgttagccaggactgcgggcacgaggagacggcccaggccatcgcctcctacggcagcgcggtcacgcacatccggcagcccgacctgagcagcattgcggtgccgccggaccaccgcaagttccagggctactacaagatcgcgcgccactaccgctgggcgctgggccaggtcttccggcagtttcgcttccccgcggccgtggtggtggaggatgacctggaggtggccccggacttcttcgagtactttcgggccacctatccgctgctgaaggccgacccctccctgtggtgcgtctcggcctggaatgacaacggcaaggagcagatggtggacgccagcaggcctgagctgctctaccgcaccgactttttccctggcctgggctggctgctgttggccgagctctgggctgagctggagcccaagtggccaaaggccttctgggacgactggatgcggcggccggagcagcggcaggggcgggcctgcatacgccctgagatctcaagaacgatgacctttggccgcaagggtgtgagccacgggcagttctttgaccagcacctcaagtttatcaagctgaaccagcagtttgtgcacttcacccagctggacctgtcttacctgcagcgggaggcctatgaccgagatttcctcgcccgcgtctacggtgctccccagctgcaggtggagaaagtgaggaccaatgaccggaaggagctgggggaggtgcgggtgcagtatacgggcagggacagcttcaaggctttcgccaaggctctgggtgtcatggatgaccttaagtcgggggttccgagagctggctaccggggtattgtcaccttccagttccggggccgccgtgtccacctggcgcccccaccgacgtgggagggctatgatcctagctggaattagcacctgcctgtccttcctgggcccctccttgccacatcatgagctgaggtgggaccacagtccccaggctgcatcggcctgcctgtgtttccctcttaggtgcatttatctttttgatttttccgagtggcatttaagtgcacaaatgataacaagaggattattctcccgttctcaagggagtcagatcaggggaactattctagggtatgttgcggggtattaagcaggaaaccactgtgtggtggggggcactgggcttgttggggccagaaatgtccacgtcctgagctttctcctggagcatgtgcagagagtttggcaacgttcgctctcttgaccagaccccttctccctgacctggctcttccagccagggcacgagccctccttctatacctgctccccttcccccagtggggactgagttatgggagaaggggacatatttgtggccaaaatgatactaaccaaaggggcttccttgtcagggcctggtggagttggtgggtcatcggggctcactgcctcctgcccttctctcctgtctgacccccacttagcccttctctccttgcagcctagcagtttatagttctgagatggaaagttgaagggggcaagcaagacctctcctcagcccatgcccagctgtcaggagagaggtgcagggaggaaggccttgtgctgggacaacctctctcttgccttacctcagagagggactatgccctgacccctcctttctgaaaatcagtgccctccctgttgctctaggaggctcctgctggcttggtagaagacagaattcgatctgcctgtccctttttcccctggggtttgacacacaggctcctctcagcatgaggtggagcagtgaccaggtggagcagtgaccaggacgcctctggcccagtgctgcccagcctccccgcccgctcccaggcgccccatgtcctcacaggccaggacgccatggcaggatggagaggacttggtggatttttgtttcttgcctgacctcagtttcatgaaagaaagtggaagctacagaattattttctaaaataaaggctgaattgtctgaaaaa

SEQ ID NO: 439638 - DNA, 2841 bp, Homo sapiens
gcccttcttggggaagtcagctacccagcagcctgtagtcctcggctacccaccctcaccgcctggggtcccatggtgagacagctgggtgggcatcaggcttctgcagagggccaggccggagggagctgggcgagggagtggggctggctcctggcttgcaccggcctcgtggaatccaggcctcagacctgatcgctggcgaaactggctctgtgcgctggagcccctggtcttctgcgtctgtcctcctcccggccagactttactcctggctcagcgacaggtgcatggctgcctcctaatcccatagtccagaggaggcatccctaggactgcgggcaagggagccgggcaagcccagggcagccttgaaccgtcccctggcctgccctccccggtgggggccaggatgctgaagaagcagtctgcagggcttgtgctgtggggcgctatcctctttgtggcctggaatgccctgctgctcctcttcttctggacgcgcccagcacctggcaggccaccctcagtcagcgctctcgatggcgaccccgccagcctcacccgggaagtgattcgcctggcccaagacgccgaggtggagctggagcggcagcgtgggctgctgcagcagatcggggatgccctgtcgagccagcgggggagggtgcccaccgcggcccctcccgcccagccgcgtgtgcctgtgacccccgcgccggcggtgattcccatcctggtcatcgcctgtgaccgcagcactgttcggcgctgcctggacaagctgctgcattatcggccctcggctgagctcttccccatcatcgttagccaggactgcgggcacgaggagacggcccaggccatcgcctcctacggcagcgcggtcacgcacatccggcagcccgacctgagcagcattgcggtgccgccggaccaccgcaagttccagggctactacaagatcgcgcgccactaccgctgggcgctgggccaggtcttccggcagtttcgcttccccgcggccgtggtggtggaggatgacctggaggtggccccggacttcttcgagtactttcgggccacctatccgctgctgaaggccgacccctccctgtggtgcgtctcggcctggaatgacaacggcaaggagcagatggtggacgccagcaggcctgagctgctctaccgcaccgactttttccctggcctgggctggctgctgttggccgagctctgggctgagctggagcccaagtggccaaaggccttctgggacgactggatgcggcggccggagcagcggcaggggcgggcctgcatacgccctgagatctcaagaacgatgacctttggccgcaagggtgtgagccacgggcagttctttgaccagcacctcaagtttatcaagctgaaccagcagtttgtgcacttcacccagctggacctgtcttacctgcagcgggaggcctatgaccgagatttcctcgcccgcgtctacggtgctccccagctgcaggtggagaaagtgaggaccaatgaccggaaggagctgggggaggtgcgggtgcagtatacgggcagggacagcttcaaggctttcgccaaggctctgggtgtcatggatgaccttaagtcgggggttccgagagctggctaccggggtattgtcaccttccagttccggggccgccgtgtccacctggcgcccccaccgacgtgggagggctatgatcctagctggaattagcacctgcctgtccttcctgggcccctccttgccacatcatgagctgaggtgggaccacagtccccaggctgcatcggcctgcctgtgtttccctcttaggtgcatttatctttttgatttttccgagtggcatttaagtgcacaaatgataacaagaggattattctcccgttctcaagggagtcagatcaggggaactattctagggtatgttgcggggtattaagcaggaaaccactgtgtggtggggggcactgggcttgttggggccagaaatgtccacgtcctgagctttctcctggagcatgtgcagagagtttggcaacgttcgctctcttgaccagaccccttctccctgacctggctcttccagccagggcacgagccctccttctatacctgctccccttcccccagtggggactgagttatgggagaaggggacatatttgtggccaaaatgatactaaccaaaggggcttccttgtcagggcctggtggagttggtgggtcatcggggctcactgcctcctgcccttctctcctgtctgacccccacttagcccttctctccttgcagcctagcagtttatagttctgagatggaaagttgaagggggcaagcaagacctctcctcagcccatgcccagctgtcaggagagaggtgcagggaggaaggccttgtgctgggacaacctctctcttgccttacctcagagagggactatgccctgacccctcctttctgaaaatcagtgccctccctgttgctctaggaggctcctgctggcttggtagaagacagaattcgatctgcctgtccctttttcccctggggtttgacacacaggctcctctcagcatgaggtggagcagtgaccaggtggagcagtgaccaggacgcctctggcccagtgctgcccagcctccccgcccgctcccaggcgccccatgtcctcacaggccaggacgccatggcaggatggagaggacttggtggatttttgtttcttgcctgacctcagtttcatgaaagaaagtggaagctacagaattattttctaaaataaaggctgaattgtctgaaaaa

SEQ ID NO: 439639 - DNA, 2630 bp, Homo sapiens
gcccttcttggggaagtcagctacccagcagcctgtagtcctcggctacccaccctcaccgcctggggtcccatggtgcatggctgcctcctaatcccatagtccagaggaggcatccctaggactgcgggcaagggagccgggcaagcccagggcagccttgaaccgtcccctggcctgccctccccggtgggggccaggatgctgaagaagcagtctgcagggcttgtgctgtggggcgctatcctctttgtggcctggaatgccctgctgctcctcttcttctggacgcgcccagcacctggcaggccaccctcagtcagcgctctcgatggcgaccccgccagcctcacccgggaagtgattcgcctggcccaagacgccgaggtggagctggagcggcagcgtgggctgctgcagcagatcggggatgccctgtcgagccagcgggggagggtgcccaccgcggcccctcccgcccagccgcgtgtgcctgtgacccccgcgccggcggtgattcccatcctggtcatcgcctgtgaccgcagcactgttcggcgctgcctggacaagctgctgcattatcggccctcggctgagctcttccccatcatcgttagccaggactgcgggcacgaggagacggcccaggccatcgcctcctacggcagcgcggtcacgcacatccggcagcccgacctgagcagcattgcggtgccgccggaccaccgcaagttccagggctactacaagatcgcgcgccactaccgctgggcgctgggccaggtcttccggcagtttcgcttccccgcggccgtggtggtggaggatgacctggaggtggccccggacttcttcgagtactttcgggccacctatccgctgctgaaggccgacccctccctgtggtgcgtctcggcctggaatgacaacggcaaggagcagatggtggacgccagcaggcctgagctgctctaccgcaccgactttttccctggcctgggctggctgctgttggccgagctctgggctgagctggagcccaagtggccaaaggccttctgggacgactggatgcggcggccggagcagcggcaggggcgggcctgcatacgccctgagatctcaagaacgatgacctttggccgcaagggtgtgagccacgggcagttctttgaccagcacctcaagtttatcaagctgaaccagcagtttgtgcacttcacccagctggacctgtcttacctgcagcgggaggcctatgaccgagatttcctcgcccgcgtctacggtgctccccagctgcaggtggagaaagtgaggaccaatgaccggaaggagctgggggaggtgcgggtgcagtatacgggcagggacagcttcaaggctttcgccaaggctctgggtgtcatggatgaccttaagtcgggggttccgagagctggctaccggggtattgtcaccttccagttccggggccgccgtgtccacctggcgcccccaccgacgtgggagggctatgatcctagctggaattagcacctgcctgtccttcctgggcccctccttgccacatcatgagctgaggtgggaccacagtccccaggctgcatcggcctgcctgtgtttccctcttaggtgcatttatctttttgatttttccgagtggcatttaagtgcacaaatgataacaagaggattattctcccgttctcaagggagtcagatcaggggaactattctagggtatgttgcggggtattaagcaggaaaccactgtgtggtggggggcactgggcttgttggggccagaaatgtccacgtcctgagctttctcctggagcatgtgcagagagtttggcaacgttcgctctcttgaccagaccccttctccctgacctggctcttccagccagggcacgagccctccttctatacctgctccccttcccccagtggggactgagttatgggagaaggggacatatttgtggccaaaatgatactaaccaaaggggcttccttgtcagggcctggtggagttggtgggtcatcggggctcactgcctcctgcccttctctcctgtctgacccccacttagcccttctctccttgcagcctagcagtttatagttctgagatggaaagttgaagggggcaagcaagacctctcctcagcccatgcccagctgtcaggagagaggtgcagggaggaaggccttgtgctgggacaacctctctcttgccttacctcagagagggactatgccctgacccctcctttctgaaaatcagtgccctccctgttgctctaggaggctcctgctggcttggtagaagacagaattcgatctgcctgtccctttttcccctggggtttgacacacaggctcctctcagcatgaggtggagcagtgaccaggtggagcagtgaccaggacgcctctggcccagtgctgcccagcctccccgcccgctcccaggcgccccatgtcctcacaggccaggacgccatggcaggatggagaggacttggtggatttttgtttcttgcctgacctcagtttcatgaaagaaagtggaagctacagaattattttctaaaataaaggctgaattgtctgaaaaa

SEQ ID NO: 439640 - DNA, 2900 bp, Homo sapiens
gggttgcgccagggagccggaaagccgactcccgaagttggggtcctgggaaaacttgggtcctgggttgactgagaagcggcggggaaaggaggcgggccaggaggagggggcctggcggacgccggccggggggcggggcgcggcggggctgtcggtcacgcccctcagtccgccccgccccgccccgcctgccggggaagggccacgttgcccgcccggccgtccggccccggcgcgccgcagaaagggctggcgagtcgaaaggcgaggcggccgcggcagcgcttgggacgcgcctgggcaccgggctcgctccctgcgccccggagcaggccaagttcggggccaggacgtcgggaggacctggtgcatggctgcctcctaatcccatagtccagaggaggcatccctaggactgcgggcaagggagccgggcaagcccagggcagccttgaaccgtcccctggcctgccctccccggtgggggccaggatgctgaagaagcagtctgcagggcttgtgctgtggggcgctatcctctttgtggcctggaatgccctgctgctcctcttcttctggacgcgcccagcacctggcaggccaccctcagtcagcgctctcgatggcgaccccgccagcctcacccgggaagtgattcgcctggcccaagacgccgaggtggagctggagcggcagcgtgggctgctgcagcagatcggggatgccctgtcgagccagcgggggagggtgcccaccgcggcccctcccgcccagccgcgtgtgcctgtgacccccgcgccggcggtgattcccatcctggtcatcgcctgtgaccgcagcactgttcggcgctgcctggacaagctgctgcattatcggccctcggctgagctcttccccatcatcgttagccaggactgcgggcacgaggagacggcccaggccatcgcctcctacggcagcgcggtcacgcacatccggcagcccgacctgagcagcattgcggtgccgccggaccaccgcaagttccagggctactacaagatcgcgcgccactaccgctgggcgctgggccaggtcttccggcagtttcgcttccccgcggccgtggtggtggaggatgacctggaggtggccccggacttcttcgagtactttcgggccacctatccgctgctgaaggccgacccctccctgtggtgcgtctcggcctggaatgacaacggcaaggagcagatggtggacgccagcaggcctgagctgctctaccgcaccgactttttccctggcctgggctggctgctgttggccgagctctgggctgagctggagcccaagtggccaaaggccttctgggacgactggatgcggcggccggagcagcggcaggggcgggcctgcatacgccctgagatctcaagaacgatgacctttggccgcaagggtgtgagccacgggcagttctttgaccagcacctcaagtttatcaagctgaaccagcagtttgtgcacttcacccagctggacctgtcttacctgcagcgggaggcctatgaccgagatttcctcgcccgcgtctacggtgctccccagctgcaggtggagaaagtgaggaccaatgaccggaaggagctgggggaggtgcgggtgcagtatacgggcagggacagcttcaaggctttcgccaaggctctgggtgtcatggatgaccttaagtcgggggttccgagagctggctaccggggtattgtcaccttccagttccggggccgccgtgtccacctggcgcccccaccgacgtgggagggctatgatcctagctggaattagcacctgcctgtccttcctgggcccctccttgccacatcatgagctgaggtgggaccacagtccccaggctgcatcggcctgcctgtgtttccctcttaggtgcatttatctttttgatttttccgagtggcatttaagtgcacaaatgataacaagaggattattctcccgttctcaagggagtcagatcaggggaactattctagggtatgttgcggggtattaagcaggaaaccactgtgtggtggggggcactgggcttgttggggccagaaatgtccacgtcctgagctttctcctggagcatgtgcagagagtttggcaacgttcgctctcttgaccagaccccttctccctgacctggctcttccagccagggcacgagccctccttctatacctgctccccttcccccagtggggactgagttatgggagaaggggacatatttgtggccaaaatgatactaaccaaaggggcttccttgtcatcggggctcactgcctcctgcccttctctcctgtctgacccccacttagcccttctctccttgcagcctagcagtttatagttctgagatggaaagttgaagggggcaagcaagacctctcctcagcccatgcccagctgtcaggagagaggtgcagggaggaaggccttgtgctgggacaacctctctcttgccttacctcagagagggactatgccctgacccctcctttctgaaaatcagtgccctccctgttgctctaggaggctcctgctggcttggtagaagacagaattcgatctgcctgtccctttttcccctggggtttgacacacaggctcctctcagcatgaggtggagcagtgaccaggtggagcagtgaccaggacgcctctggcccagtgctgcccagcctccccgcccgctcccaggcgccccatgtcctcacaggccaggacgccatggcaggatggagaggacttggtggatttttgtttcttgcctgacctcagtttcatgaaagaaagtggaagctacagaattattttctaaaataaaggctgaattgtctgaaaaa

SEQ ID NO: 439641 - DNA, 3280 bp, Homo sapiens
gggttgcgccagggagccggaaagccgactcccgaagttggggtcctgggaaaacttgggtcctgggttgactgagaagcggcggggaaaggaggcgggccaggaggagggggcctggcggacgccggccggggggcggggcgcggcggggctgtcggtcacgcccctcagtccgccccgccccgccccgcctgccggggaagggccacgttgcccgcccggccgtccggccccggcgcgccgcagaaagggctggcgagtcgaaaggcgaggcggccgcggcagcgcttgggacgcgcctgggcaccgggctcgctccctgcgccccggagcaggccaagttcggggccaggacgtcgggaggacctggtgcatggctgcctcctaatcccatagtccagaggaggcatccctaggactgcgggcaagggagccgggcaagcccagggcagccttgaaccgtcccctggcctgccctccccggtgggggccaggatgctgaagaagcagtctgcagggcttgtgctgtggggcgctatcctctttgtggcctggaatgccctgctgctcctcttcttctggacgcgcccagcacctggcaggccaccctcagtcagcgctctcgatggcgaccccgccagcctcacccgggaagtgattcgcctggcccaagacgccgaggtggagctggagcggcagcgtgggctgctgcagcagatcggggatgccctgtcgagccagcgggggagggtgcccaccgcggcccctcccgcccagccgcgtgtgcctgtgacccccgcgccggcggtgattcccatcctggtcatcgcctgtgaccgcagcactgttcggcgctgcctggacaagctgctgcattatcggccctcggctgagctcttccccatcatcgttagccaggactgcgggcacgaggagacggcccaggccatcgcctcctacggcagcgcggtcacgcacatccggcagcccgacctgagcagcattgcggtgccgccggaccaccgcaagttccagggctactacaagatcgcgcgccactaccgctgggcgctgggccaggtcttccggcagtttcgcttccccgcggccgtggtggtggaggatgacctggaggtggccccggacttcttcgagtactttcgggccacctatccgctgctgaaggccgacccctccctgtggtgcgtctcggcctggaatgacaacggcaaggagcagatggtggacgccagcaggcctgagctgctctaccgcaccgactttttccctggcctgggctggctgctgttggccgagctctgggctgagctggagcccaagtggccaaaggccttctgggacgactggatgcggcggccggagcagcggcaggggcgggcctgcatacgccctgagatctcaagaacgatgacctttggccgcaagggtgtgagccacgggcagttctttgaccagcacctcaagtttatcaagctgaaccagcagtttgtgcacttcacccagctggacctgtcttacctgcagcgggaggcctatgaccgagatttcctcgcccgcgtctacggtgctccccagctgcaggtggagaaagtgaggaccaatgaccggaaggagctgggggaggtgcgggtgcagtatacgggcagggacagcttcaaggctttcgccaaggctctgggtgtcatggatgaccttaagtcgggggttccgagagctggctaccggggtattgtcaccttccagttccggggccgccgtgtccacctggcgcccccaccgacgtgggagggctatgatcctagctggaattagcacctgcctgtccttcctgggcccctccttgccacatcatgagctgaggtgggaccacagtccccaggctgcatcggcctgcctgtgtttccctcttaggtgcatttatctttttgatttttccgagtggcatttaagtgcacaaatgataacaagaggattattctcccgttctcaagggagtcagatcaggggaactattctagggtatgttgcggggtattaagcaggaaaccactgtgtggtggggggcactgggcttgttggggccagaaatgtccacgtcctgagctttctcctggagcatgtgcagagagtttggcaacgttcgctctcttgaccagaccccttctccctgacctggctcttccagccagggcacgagccctccttctatacctgctccccttcccccagtggggactgagttatgggagaaggggacatatttgtggccaaaatgatactaaccaaaggggcttccttgtcagggcctggtggagttggtgggtcatcggggctcactgcctcctgcccttctctcctgtctgacccccacttagcccttctctccttgcagcctagcagtttatagttctgagatggaaagttgaagggggcaagcaagacctctcctcagcccatgcccagctgtcaggagagaggtgcagggaggaaggccttgtgctgggacaacctctctcttgccttacctcagagagggactatgccctgacccctcctttctgaaaatcagtgccctccctgttgctctaggaggctcctgctggcttggtagaagacagaattcgatctgcctgtccctttttcccctggggtttgacacacaggctcctctcagcatgaggtggagcagtgaccaggtggagcagtgaccaggacgcctctggcccagtgctgcccagcctccccgcccgctcccaggcgccccatgtcctcacaggccaggacgccatggcaggatggagaggacttggtggatttttgtttcttgcctgacctcagtttcatgaaagaaagtggaagctacagaattattttctaaaataaaggctgaattgtctgaaaaaaaaaaaaaacaaaaaaaaaacaaaaaacaaaaaaaaaaaaaaaaaaaaaaaaagagaaaaagaaaaaaaaaaagaaaaaagaaagaaaaaccaaaacaaaaaagaaaaaagtaaagagatagaaccacaggaagcaaacagaggggaccgacgcagcaagcataaagaaagagcaacagagcaataggacaacagaagaagaagtgaaggagccctacacatgaaataagatcagcagcagaaagacgcacaccaaaaaagcaagaagcacaaagaaagagaaagacaatggcgccaaccacaggcgcacgaaagcgcacaaccgagatgaagaagggtgaggaaaattaacggtg

SEQ ID NO: 439642 - DNA, 2720 bp, Homo sapiens
gggttgcgccagggagccggaaagccgactcccgaagttggggtcctgggaaaacttgggtcctgggttgactgagaagcggcggggaaaggaggcgggccaggaggagggggcctggcggacgccggccggggggcggggcgcggcggggctgtcggtcacgcccctcagtccgccccgccccgccccgcctgccggggaagggccacgttgcccgcccggccgtccggccccggcgcgccgcagaaagggctggcgagtcgaaaggcgaggcggccgcggcagcgcttgggacgcgcctgggcaccgggctcgctccctgcgccccggagcaggccaagttcggggccaggacgtcgggaggacctggtgcatggctgcctcctaatcccatagtccagaggaggcatccctaggactgcgggcaagggagccgggcaagcccagggcagccttgaaccgtcccctggcctgccctccccggtgggggccaggatgctgaagaagcagtctgcagggcttgtgctgtggggcgctatcctctttgtggcctggaatgccctgctgctcctcttcttctggacgcgcccagcacctggcaggccaccctcagtcagcgctctcgatggcgaccccgccagcctcacccgggaagtgattcgcctggcccaagacgccgaggtggagctggagcggcagcgtgggctgctgcagcagatcggggatgccctgtcgagccagcgggggagggtgcccaccgcggcccctcccgcccagccgcgtgtgcctgtgacccccgcgccggcggtgattcccatcctggtcatcgcctgtgaccgcagcactgttcggcgctgcctggacaagctgctgcattatcggccctcggctgagctcttccccatcatcgttagccaggactgcgggcacgaggagacggcccaggccatcgcctcctacggcagcgcggtcacgcacatccggcagcccgacctgagcagcattgcggtgccgccggaccaccgcaagttccagggctactacaagatcgcgcgccactaccgctgggcgctgggccaggtcttccggcagtttcgcttccccgcggccgtggtggtggaggatgacctggaggtggccccggacttcttcgagtactttcgggccacctatccgctgctgaaggccgacccctccctgtggtgcgtctcggcctggaatgacaacggcaaggagcagatggtggacgccagcaggcctgagctgctctaccgcaccgactttttccctggcctgggctggctgctgttggccgagctctgggctgagctggagcccaagtggccaaaggccttctgggacgactggatgcggcggccggagcagcggcaggggcgggcctgcatacgccctgagatctcaagaacgatgacctttggccgcaagggtgtgagccacgggcagttctttgaccagcacctcaagtttatcaagctgaaccagcagtttgtgcacttcacccagctggacctgtcttacctgcagcgggaggcctatgaccgagatttcctcgcccgcgtctacggtgctccccagctgcaggtggagaaagtgaggaccaatgaccggaaggagctgggggaggtgcgggtgcagtatacgggcagggacagcttcaaggctttcgccaaggctctgggtgtcatggatgaccttaagtcgggggttccgagagctggctaccggggtattgtcaccttccagttccggggccgccgtgtccacctggcgcccccaccgacgtgggagggctatgatcctagctggaattagcacctgcctgtccttcctgggcccctccttgccacatcatgagctgaggtgggaccacagtccccaggctgcatcggcctgcctgtgtttccctcttaggtgcatttatctttttgatttttccgagtggcatttaagtgcacaaatgataacaagaggattattctcccgttctcaagggagtcagatcaggggaactattctagggtatgttgcggggtattaagcaggaaaccactgtgtggtggggggcactgggcttgttggggccagaaatgtccacgtcctgagctttctcctggagcatgtgcagagagtttggcaacgttcgctctcttgaccagaccccttctccctgacctggctcttccagccagggcacgagccctccttctatacctgctccccttcccccagtggggactgagttatgggagaaggggacatatttgtggccaaaatgatactaaccaaaggggcttccttgtcagggcctggtggagttggtgggtcatcggggctcactgcctcctgcccttctctcctgtctgacccccacttagcccttctctccttgcagcctagcagtttatagttctgagatggaaagttgaagggggcaagcaagacctctcctcagcccatgcccagctgtcaggagagaggtgcagggaggaaggccttgtgctgggacaacctctctcttgccttacctcagagagggactatgccctgacccctcctttctgaaaatcagtgccctccctgttgctctaggaggctcctgctggcttggtagaagacagaattcgatctgcctgtcactgctccacctggtcactgctccacctcatgctgagaggagcctgtgtgtcaataccccaggg

SEQ ID NO: 439643 - DNA, 2558 bp, Homo sapiens
gggttgcgccagggagccggaaagccgactcccgaagttggggtcctgggaaaacttgggtcctgggttgactgagaagcggcggggaaaggaggcgggccaggaggagggggcctggcggacgccggccggggggcggggcgcggcggggctgtcggtcacgcccctcagtccgccccgccccgccccgcctgccggggaagggccacgttgcccgcccggccgtccggccccggcgcgccgcagaaagggctggcgagtcgaaaggcgaggcggccgcggcagcgcttgggacgcgcctgggcaccgggctcgctccctgcgccccggagcaggccaagttcggggccaggacgtcgggaggacctggtgcatggctgcctcctaatcccatagtccagaggaggcatccctaggactgcgggcaagggagccgggcaagcccagggcagccttgaaccgtcccctggcctgccctccccggtgggggccaggatgctgaagaagcagtctgcagggcttgtgctgtggggcgctatcctctttgtggcctggaatgccctgctgctcctcttcttctggacgcgcccagcacctggcaggccaccctcagtcagcgctctcgatggcgaccccgccagcctcacccgggaagtgattcgcctggcccaagacgccgaggtggagctggagcggcagcgtgggctgctgcagcagatcggggatgccctgtcgagccagcgggggagggtgcccaccgcggcccctcccgcccagccgcgtgtgcctgtgacccccgcgccggcggtgattcccatcctggtcatcgcctgtgaccgcagcactgttcggcgctgcctggacaagctgctgcattatcggccctcggctgagctcttccccatcatcgttagccaggactgcgggcacgaggagacggcccaggccatcgcctcctacggcagcgcggtcacgcacatccggcagcccgacctgagcagcattgcggtgccgccggaccaccgcaagttccagggctactacaagatcgcgcgccactaccgctgggcgctgggccaggtcttccggcagtttcgcttccccgcggccgtggtggtggaggatgacctggaggtggccccggacttcttcgagtactttcgggccacctatccgctgctgaaggccgacccctccctgtggtgcgtctcggcctggaatgacaacggcaaggagcagatggtggacgccagcaggcctgagctgctctaccgcaccgactttttccctggcctgggctggctgctgttggccgagctctgggctgagctggagcccaagtggccaaaggccttctgggacgactggatgcggcggccggagcagcggcaggggcgggcctgcatacgccctgagatctcaagaacgatgacctttggccgcaagggtgtgagccacgggcagttctttgaccagcacctcaagtttatcaagctgaaccagcagtttgtgcacttcacccagctggacctgtcttacctgcagcgggaggcctatgaccgagatttcctcgcccgcgtctacggtgctccccagctgcaggtggagaaagtgaggaccaatgaccggaaggagctgggggaggtgcgggtgcagtatacgggcagggacagcttcaaggctttcgccaaggctctgggtgtcatggatgaccttaagtcgggggttccgagagctggctaccggggtattgtcaccttccagttccggggccgccgtgtccacctggcgcccccaccgacgtgggagggctatgatcctagctggaattagcacctgcctgtccttcctgggcccctccttgccacatcatgagctgaggtgggaccacagtccccaggctgcatcggcctgcctgtgtttccctcttaggtgcatttatctttttgatttttccgagtggcatttaagtgcacaaatgataacaagaggattattctcccgttctcaagggagtcagatcaggggaactattctagggtatgttgcggggtattaagcaggaaaccactgtgtggtggggggcactgggcttgttggggccagaaatgtccacgtcctgagctttctcctggagcatgtgcagagagtttggcaacgttcgctctctcttgccttacctcagagagggactatgccctgacccctcctttctgaaaatcagtgccctccctgttgctctaggaggctcctgctggcttggtagaagacagaattcgatctgcctgtccctttttcccctggggtttgacacacaggctcctctcagcatgaggtggagcagtgaccaggtggagcagtgaccaggacgcctctggcccagtgctgcccagcctccccgcccgctcccaggcgccccatgtcctcacaggccaggacgccatggcaggatggagaggacttggtggatttttgtttcttgcctgacctcagtttcatgaaagaaagtggaagctacagaattattttctaaaataaaggctgaattgtctgaaaaa

SEQ ID NO: 439644 - DNA, 2365 bp, Homo sapiens
gggttgcgccagggagccggaaagccgactcccgaagttggggtcctgggaaaacttgggtcctgggttgactgagaagcggcggggaaaggaggcgggccaggaggagggggcctggcggacgccggccggggggcggggcgcggcggggctgtcggtcacgcccctcagtccgccccgccccgccccgcctgccggggaagggccacgttgcccgcccggccgtccggccccggcgcgccgcagaaagggctggcgagtcgaaaggcgaggcggccgcggcagcgcttgggacgcgcctgggcaccgggctcgctccctgcgccccggagcaggccaagttcggggccaggacgtcgggaggacctggtgcatggctgcctcctaatcccatagtccagaggaggcatccctaggactgcgggcaagggagccgggcaagcccagggcagccttgaaccgtcccctggcctgccctccccggtgggggccaggatgctgaagaagcagtctgcagggcttgtgctgtggggcgctatcctctttgtggcctggaatgccctgctgctcctcttcttctggacgcgcccagcacctggcaggccaccctcagtcagcgctctcgatggcgaccccgccagcctcacccgggaagtgattcgcctggcccaagacgccgaggtggagctggagcggcagcgtgggctgctgcagcagatcggggatgccctgtcgagccagcgggggagggtgcccaccgcggcccctcccgcccagccgcgtgtgcctgtgacccccgcgccggcggtgattcccatcctggtcatcgcctgtgaccgcagcactgttcggcgctgcctggacaagctgctgcattatcggccctcggctgagctcttccccatcatcgttagccaggactgcgggcacgaggagacggcccaggccatcgcctcctacggcagcgcggtcacgcacatccggcagcccgacctgagcagcattgcggtgccgccggaccaccgcaagttccagggctactacaagatcgcgcgccactaccgctgggcgctgggccaggtcttccggcagtttcgcttccccgcggccgtggtggtggaggatgacctggaggtggccccggacttcttcgagtactttcgggccacctatccgctgctgaaggccgacccctccctgtggtgcgtctcggcctggaatgacaacggcaaggagcagatggtggacgccagcaggcctgagctgctctaccgcaccgactttttccctggcctgggctggctgctgttggccgagctctgggctgagctggagcccaagtggccaaaggccttctgggacgactggatgcggcggccggagcagcggcaggggcgggcctgcatacgccctgagatctcaagaacgatgacctttggccgcaagggtgtgagccacgggcagttctttgaccagcacctcaagtttatcaagctgaaccagcagtttgtgcacttcacccagctggacctgtcttacctgcagcgggaggcctatgaccgagatttcctcgcccgcgtctacggtgctccccagctgcaggtggagaaagtgaggaccaatgaccggaaggagctgggggaggtgcgggtgcagtatacgggcagggacagcttcaaggctttcgccaaggctctgggtgtcatggatgaccttaagtcgggggttccgagagctggctaccggggtattgtcaccttccagttccggggccgccgtgtccacctggcgcccccaccgacgtgggagggctatgatcctagctggaattagcacctgcctgtccttcctgggcccctccttgccacatcatgagctgaggtgggaccacagtccccaggctgcatcggcctgcctgtgtttccctcttaggtgcatttatctttttgatttttccgagtggcatttaagtgcacaaatgataacaagaggattattctcccgttctcaagggagtcagatcaggggaactattctagggtatgttgcggggtattaagcaggaaaccactgtgtggtggggggcactgggcttgttggggccagaaatgtccacgtcctgagctttcctctcagcatgaggtggagcagtgaccaggtggagcagtgaccaggacgcctctggcccagtgctgcccagcctccccgcccgctcccaggcgccccatgtcctcacaggccaggacgccatggcaggatggagaggacttggtggatttttgtttcttgcctgacctcagtttcatgaaagaaagtggaagctacagaattattttctaaaataaaggctgaattgtctgaaaaa

SEQ ID NO: 439645 - DNA, 1367 bp, Homo sapiens
gggttgcgccagggagccggaaagccgactcccgaagttggggtcctgggaaaacttgggtcctgggttgactgagaagcggcggggaaaggaggcgggccaggaggagggggcctggcggacgccggccggggggcggggcgcggcggggctgtcggtcacgcccctcagtccgccccgccccgccccgcctgccggggaagggccacgttgcccgcccggccgtccggccccggcgcgccgcagaaagggctggcgagtcgaaaggcgaggcggccgcggcagcgcttgggacgcgcctgggcaccgggctcgctccctgcgccccggagcaggccaagttcggggccaggacgtcgggaggacctggtgcatggctgcctcctaatcccatagtccagaggaggcatccctaggactgcgggcaagggagccgggcaagcccagggcagccttgaaccgtcccctggcctgccctccccggtgggggccaggatgctgaagaagcagtctgcagggcttgtgctgtggggcgctatcctctttgtggcctggaatgccctgctgctcctcttcttctggacgcgcccagcacctggcaggccaccctcagtcagcgctctcgatggcgaccccgccagcctcacccgggaagtgattcgcctggcccaagacgccgaggtggagctggagcggcagcgtgggctgctgcagcagatcggggatgccctgtcgagccagcgggggagggtgcccaccgcggcccctcccgcccagccgcgtgtgcctgtgacccccgcgccggcggtgattcccatcctggtcatcgcctgtgaccgcagcactgttcggcgctgcctggacaagctgctgcattatcggccctcggctgagctcttccccatcatcgttagccaggactgcgggcacgaggagacggcccaggccatcgcctcctacggcagcgcggtcacgcacatccggcagcccgacctgagcagcattgcggtgccgccggaccaccgcaagttccagggctactacaagatcgcgcgccactaccgctgggcgctgggccaggtcttccggcagtttcgcttccccgcggccgtggtggtggaggatgacctggaggtggccccggacttcttcgagtactttcgggccacctatccgctgctgaaggccgacccctccctgtggtgcgtctcggcctggaatgacaacggcaaggagcagatggtggacgccatggcaggatggagaggacttggtggatttttgtttcttgcctgacctcagtttcatgaaagaaagtggaagctacagaattattttctaaaataaaggctgaattgtctgaaaaa

SEQ ID NO: 439646 - DNA, 979 bp, Homo sapiens
gcccttcttggggaagtcagctacccagcagcctgtagtcctcggctacccaccctcaccgcctggggtcccatggtgagacagctgggtgggcatcaggcttctgcagagggccaggccggagggagctgggcgagggagtggggctggctcctggcttgcaccggcctcgtggaatccaggcctcagacctgatcgctggcgaaactggctctgtgcgctggagcccctggtcttctgcgtctgtcctcctcccggccagactttactcctggctcagcgacaggtgcatggctgcctcctaatcccatagtccagaggaggcatccctaggactgcgggcaagggagccgggcaagcccagggcagccttgaaccgtcccctggcctgccctccccggtgggggccaggatgctgaagaagcagtctgcagggcttgtgctgtggggcgctatcctctttgtggcctggaatgccctgctgctcctcttcttctggacgcgcccagcacctggcaggccaccctcagtcagcgctctcgatggcgaccccgccagcctcacccgggaagtgattcgcctggcccaagacgccgaggtggagctggagcggcagcgtgggctgctgcagcagatcggggatgccctgtcgagccagcgggggagggtgcccaccgcggcccctcccgcccagccgcgtgtgcctgtgacccccgcgccggcggtgattcccatcctggtcatcgcctgtgaccgcagcactgttcggcgctgcctggacaagctgctgcattatcggccctcggctgagctcttccccatcatcgttagccaggccccatgtcctcacaggccaggacgccatggcaggatggagaggacttggtggatttttgtttcttgcctgacctcagtttcatgaaagaaagtggaagctacagaattattttctaaaataaaggctgaattgtctgaaaaa

SEQ ID NO: 439647 - DNA, 1778 bp, Homo sapiens
gagtgtgtgtggatggatgtgtgttgagagagagaatggatgtgtgtgtgtttacgaataaacttggaggggagggggcaacaggggtgggttttcgggctgagaaatgggaacactgtggggctgctgcaagcaggacttgggccttaaacattccaggagagtgttctcgggagtagccccgggaaggactttaacagaggttaacacagaaatctgcctcctgggccatgccgcttctaaggcctgtttcttctcatgagccccagcacaagacagatgggccagttctcacagtggataacttcccctgcctgagcaagagatgggatagtatctgggatctgtccatcaccagactctgagcttaataaggcagctgaatgaagggaggtaacggacccctgagaggggcactgaagtctgcagtggggggggaggggcctggacacaccccttcccccccagactcctccccgtcagggtcagctcagccatggactttggacctggataagaagagagaagctgcactttggtggatctgatttgggattctcagttttgaaaatggagtgctgaatggggatttgatgatctcctggagagcaactgagacaagagaagaaaggtaaggctcctgtctcatttcccacttaatgtcttgctgtgcctgtgcagaaggtgttgagctggcgagttcgcggaggctactattcaggaaatcttatccagatgagtacactggaagctacacctctccattactctgtccagagcctggcagagagcaggtgtgtgatacacgtcgtcaggtgactgaccgaggaattcagggcaaacagatcatctcaatttgccttgctgatgtgccagctgggattacgctgatggatgaagctcttcagagctatgggcaatatctacatatttgattgtcaagaaacttcgtgtggaaatagcttcaaacttacacaaattgcaagaataaaaaatagtataaggatattcgtacacactctctttactcagattcacctgttaatattttgctccatttgctctctatgtgtgcagagtatgtttttgttctgaaccatttgagaagttgcatctatcctggtcctctacttctcaatacttcagtgtgtattacctaagaattggaattaatcagttatcactgatactttaacctactgtccatattccacctttgtcattttacccaataacgtctttttaaaaaaagttttttgaggtttcattgacatacaattgatatcaatatgtgcaaagaactgcatataaagtgtacaatttgataagttttgacatatatgtgtgtgtgtgtatatatatatatatatatatacctgtaaaagtatcaccacaatcaagataataaacatatccacccttctagaagcttcctaatgcccctgtgtagtaactaccctactgcccttctctgcctccatccccaggcaacaactgatctgctttctgtaatatagattagtttctattttcggcagttttatgtcaatggaatcacagtgtatgtgctcttttttgtttttcccaaaaagacccatattgtgtaattatttggagattgtgttgtgtatgtcagtggtttattcagttttattgctgaatattattccattctatgagtaaaccacaatttgtttatctgtatttccctgttgatgggcctttgggttatttccagttttgagtgattatgaataaagttaccatcaacactcctg

SEQ ID NO: 439648 - DNA, 793 bp, Homo sapiens
gagtgtgtgtggatggatgtgtgttgagagagagaatggatgtgtgtgtgtttacgaataaacttggaggggagggggcaacaggggtgggttttcgggctgagaaatgggaacactgtggggctgctgcaagcaggacttgggccttaaacattccaggagagtgttctcgggagtagccccgggaaggactttaacagaggttaacacagaaatctgcctcctgggccatgccgcttctaaggcctgtttcttctcatgagccccagcacaagacagatgggccagttctcacagtggataacttcccctgcctgagcaagagatgggatagtatctgggatctgtccatcaccagactctgagcttaataaggcagctgaatgaagggaggtaacggacccctgagaggggcactgaagtctgcagtggggggggaggggcctggacacaccccttcccccccagactcctccccgtcagggtcagctcagccatggactttggacctggataagaagagagaagctgcactttggtggatctgatttgggattctcagttttgaaaatggagtgctgaatggggatttgatgatctcctggagagcaactgagacaagagaagaaaggtaaggctcctgtctcatgccccatgtcctcacaggccaggacgccatggcaggatggagaggacttggtggatttttgtttcttgcctgacctcagtttcatgaaagaaagtggaagctacagaattattttctaaaataaaggctgaattgtctgaaaaa

SEQ ID NO: 439649 - DNA, 1370 bp, Homo sapiens
gggttgcgccagggagccggaaagccgactcccgaagttggggtcctgggaaaacttgggtcctgggttgactgagaagcggcggggaaaggaggcgggccaggaggagggggcctggcggacgccggccggggggcggggcgcggcggggctgtcggtcacgcccctcagtccgccccgccccgccccgcctgccggggaagggccacgttgcccgcccggccgtccggccccggcgcgccgcagaaagggctggcgagtcgaaaggcgaggcggccgcggcagcgcttgggacgcgcctgggcaccgggctcgctccctgcgccccggagcaggccaagttcggggccaggacgtcgggaggacctgagcctggcagagagcaggtgtgtgatacacgtcgtcaggtgactgaccgaggaattcagggcaaacagatcatctcaatttgccttgctgatgtgccagctgggattacgctgatggatgaagctcttcagagctatgggcaatatctacatatttgattgtcaagaaacttcgtgtggaaatagcttcaaacttacacaaattgcaagaataaaaaatagtataaggatattcgtacacactctctttactcagattcacctgttaatattttgctccatttgctctctatgtgtgcagagtatgtttttgttctgaaccatttgagaagttgcatctatcctggtcctctacttctcaatacttcagtgtgtattacctaagaattggaattaatcagttatcactgatactttaacctactgtccatattccacctttgtcattttacccaataacgtctttttaaaaaaagttttttgaggtttcattgacatacaattgatatcaatatgtgcaaagaactgcatataaagtgtacaatttgataagttttgacatatatgtgtgtgtgtgtatatatatatatatatatatacctgtaaaagtatcaccacaatcaagataataaacatatccacccttctagaagcttcctaatgcccctgtgtagtaactaccctactgcccttctctgcctccatccccaggcaacaactgatctgctttctgtaatatagattagtttctattttcggcagttttatgtcaatggaatcacagtgtatgtgctcttttttgtttttcccaaaaagacccatattgtgtaattatttggagattgtgttgtgtatgtcagtggtttattcagttttattgctgaatattattccattctatgagtaaaccacaatttgtttatctgtatttccctgttgatgggcctttgggttatttccagttttgagtgattatgaataaagttaccatcaacactcctg

SEQ ID NO: 439650 - DNA, 3075 bp, Homo sapiens
ctgggccagcgctggggatcgggcctggggcctggattgcgacccgcggcgggccgcggctcctagccgagacggggcgggcgggaaccaggttaacacagaaatctgcctcctgggccatgccgcttctaaggcctgtttcttctcatgagccccagcacaagacagatgggccagttctcacagtggataacttcccctgcctgagcaagagatgggatagtatctgggatctgtccatcaccagactctgagcttaataaggcagctgaatgaagggaggtaacggacccctgagaggggcactgaagtctgcagtggggggggaggggcctggacacaccccttcccccccagactcctccccgtcagggtcagctcagccatggactttggacctggataagaagagagaagctgcactttggtggatctgatttgggattctcagttttgaaaatggagtgctgaatggggatttgatgatctcctggagagcaactgagacaagagaagaaaggtgcatggctgcctcctaatcccatagtccagaggaggcatccctaggactgcgggcaagggagccgggcaagcccagggcagccttgaaccgtcccctggcctgccctccccggtgggggccaggatgctgaagaagcagtctgcagggcttgtgctgtggggcgctatcctctttgtggcctggaatgccctgctgctcctcttcttctggacgcgcccagcacctggcaggccaccctcagtcagcgctctcgatggcgaccccgccagcctcacccgggaagtgattcgcctggcccaagacgccgaggtggagctggagcggcagcgtgggctgctgcagcagatcggggatgccctgtcgagccagcgggggagggtgcccaccgcggcccctcccgcccagccgcgtgtgcctgtgacccccgcgccggcggtgattcccatcctggtcatcgcctgtgaccgcagcactgttcggcgctgcctggacaagctgctgcattatcggccctcggctgagctcttccccatcatcgttagccaggactgcgggcacgaggagacggcccaggccatcgcctcctacggcagcgcggtcacgcacatccggcagcccgacctgagcagcattgcggtgccgccggaccaccgcaagttccagggctactacaagatcgcgcgccactaccgctgggcgctgggccaggtcttccggcagtttcgcttccccgcggccgtggtggtggaggatgacctggaggtggccccggacttcttcgagtactttcgggccacctatccgctgctgaaggccgacccctccctgtggtgcgtctcggcctggaatgacaacggcaaggagcagatggtggacgccagcaggcctgagctgctctaccgcaccgactttttccctggcctgggctggctgctgttggccgagctctgggctgagctggagcccaagtggccaaaggccttctgggacgactggatgcggcggccggagcagcggcaggggcgggcctgcatacgccctgagatctcaagaacgatgacctttggccgcaagggtgtgagccacgggcagttctttgaccagcacctcaagtttatcaagctgaaccagcagtttgtgcacttcacccagctggacctgtcttacctgcagcgggaggcctatgaccgagatttcctcgcccgcgtctacggtgctccccagctgcaggtggagaaagtgaggaccaatgaccggaaggagctgggggaggtgcgggtgcagtatacgggcagggacagcttcaaggctttcgccaaggctctgggtgtcatggatgaccttaagtcgggggttccgagagctggctaccggggtattgtcaccttccagttccggggccgccgtgtccacctggcgcccccaccgacgtgggagggctatgatcctagctggaattagcacctgcctgtccttcctgggcccctccttgccacatcatgagctgaggtgggaccacagtccccaggctgcatcggcctgcctgtgtttccctcttaggtgcatttatctttttgatttttccgagtggcatttaagtgcacaaatgataacaagaggattattctcccgttctcaagggagtcagatcaggggaactattctagggtatgttgcggggtattaagcaggaaaccactgtgtggtggggggcactgggcttgttggggccagaaatgtccacgtcctgagctttctcctggagcatgtgcagagagtttggcaacgttcgctctcttgaccagaccccttctccctgacctggctcttccagccagggcacgagccctccttctatacctgctccccttcccccagtggggactgagttatgggagaaggggacatatttgtggccaaaatgatactaaccaaaggggcttccttgtcagggcctggtggagttggtgggtcatcggggctcactgcctcctgcccttctctcctgtctgacccccacttagcccttctctccttgcagcctagcagtttatagttctgagatggaaagttgaagggggcaagcaagacctctcctcagcccatgcccagctgtcaggagagaggtgcagggaggaaggccttgtgctgggacaacctctctcttgccttacctcagagagggactatgccctgacccctcctttctgaaaatcagtgccctccctgttgctctaggaggctcctgctggcttggtagaagacagaattcgatctgcctgtccctttttcccctggggtttgacacacaggctcctctcagcatgaggtggagcagtgaccaggtggagcagtgaccaggacgcctctggcccagtgctgcccagcctccccgcccgctcccaggcgccccatgtcctcacaggccaggacgccatggcaggatggagaggacttggtggatttttgtttcttgcctgacctcagtttcatgaaagaaagtggaagctacagaattattttctaaaataaaggctgaattgtctgaaaaa

SEQ ID NO: 439651 - DNA, 2875 bp, Homo sapiens
ctgggccagcgctggggatcgggcctggggcctggattgcgacccgcggcgggccgcggctcctagccgagacggggcgggcgggaaccaggttaacacagaaatctgcctcctgggccatgccgcttctaaggcctgtttcttctcatgagccccaactcctccccgtcagggtcagctcagccatggactttggacctggataagaagagagaagctgcactttggtggatctgatttgggattctcagttttgaaaatggagtgctgaatggggatttgatgatctcctggagagcaactgagacaagagaagaaaggtgcatggctgcctcctaatcccatagtccagaggaggcatccctaggactgcgggcaagggagccgggcaagcccagggcagccttgaaccgtcccctggcctgccctccccggtgggggccaggatgctgaagaagcagtctgcagggcttgtgctgtggggcgctatcctctttgtggcctggaatgccctgctgctcctcttcttctggacgcgcccagcacctggcaggccaccctcagtcagcgctctcgatggcgaccccgccagcctcacccgggaagtgattcgcctggcccaagacgccgaggtggagctggagcggcagcgtgggctgctgcagcagatcggggatgccctgtcgagccagcgggggagggtgcccaccgcggcccctcccgcccagccgcgtgtgcctgtgacccccgcgccggcggtgattcccatcctggtcatcgcctgtgaccgcagcactgttcggcgctgcctggacaagctgctgcattatcggccctcggctgagctcttccccatcatcgttagccaggactgcgggcacgaggagacggcccaggccatcgcctcctacggcagcgcggtcacgcacatccggcagcccgacctgagcagcattgcggtgccgccggaccaccgcaagttccagggctactacaagatcgcgcgccactaccgctgggcgctgggccaggtcttccggcagtttcgcttccccgcggccgtggtggtggaggatgacctggaggtggccccggacttcttcgagtactttcgggccacctatccgctgctgaaggccgacccctccctgtggtgcgtctcggcctggaatgacaacggcaaggagcagatggtggacgccagcaggcctgagctgctctaccgcaccgactttttccctggcctgggctggctgctgttggccgagctctgggctgagctggagcccaagtggccaaaggccttctgggacgactggatgcggcggccggagcagcggcaggggcgggcctgcatacgccctgagatctcaagaacgatgacctttggccgcaagggtgtgagccacgggcagttctttgaccagcacctcaagtttatcaagctgaaccagcagtttgtgcacttcacccagctggacctgtcttacctgcagcgggaggcctatgaccgagatttcctcgcccgcgtctacggtgctccccagctgcaggtggagaaagtgaggaccaatgaccggaaggagctgggggaggtgcgggtgcagtatacgggcagggacagcttcaaggctttcgccaaggctctgggtgtcatggatgaccttaagtcgggggttccgagagctggctaccggggtattgtcaccttccagttccggggccgccgtgtccacctggcgcccccaccgacgtgggagggctatgatcctagctggaattagcacctgcctgtccttcctgggcccctccttgccacatcatgagctgaggtgggaccacagtccccaggctgcatcggcctgcctgtgtttccctcttaggtgcatttatctttttgatttttccgagtggcatttaagtgcacaaatgataacaagaggattattctcccgttctcaagggagtcagatcaggggaactattctagggtatgttgcggggtattaagcaggaaaccactgtgtggtggggggcactgggcttgttggggccagaaatgtccacgtcctgagctttctcctggagcatgtgcagagagtttggcaacgttcgctctcttgaccagaccccttctccctgacctggctcttccagccagggcacgagccctccttctatacctgctccccttcccccagtggggactgagttatgggagaaggggacatatttgtggccaaaatgatactaaccaaaggggcttccttgtcagggcctggtggagttggtgggtcatcggggctcactgcctcctgcccttctctcctgtctgacccccacttagcccttctctccttgcagcctagcagtttatagttctgagatggaaagttgaagggggcaagcaagacctctcctcagcccatgcccagctgtcaggagagaggtgcagggaggaaggccttgtgctgggacaacctctctcttgccttacctcagagagggactatgccctgacccctcctttctgaaaatcagtgccctccctgttgctctaggaggctcctgctggcttggtagaagacagaattcgatctgcctgtccctttttcccctggggtttgacacacaggctcctctcagcatgaggtggagcagtgaccaggtggagcagtgaccaggacgcctctggcccagtgctgcccagcctccccgcccgctcccaggcgccccatgtcctcacaggccaggacgccatggcaggatggagaggacttggtggatttttgtttcttgcctgacctcagtttcatgaaagaaagtggaagctacagaattattttctaaaataaaggctgaattgtctgaaaaa

SEQ ID NO: 439652 - DNA, 2962 bp, Homo sapiens
gggttgcgccagggagccggaaagccgactcccgaagttggggtcctgggaaaacttgggtcctgggttgactgagaagcggcggggaaaggaggcgggccaggaggagggggcctggcggacgccggccggggggcggggcgcggcggggctgtcggtcacgcccctcagtccgccccgccccgccccgcctgccggggaagggccacgttgcccgcccggccgtccggccccggcgcgccgcagaaagggctggcgagtcgaaaggcgaggcggccgcggcagcgcttgggacgcgcctgggcaccgggctcgctccctgcgccccggagcaggccaagttcggggccaggacgtcgggaggacctgagcctggcagagagcaggtgtgtgatacacgtcgtcaggtgcatggctgcctcctaatcccatagtccagaggaggcatccctaggactgcgggcaagggagccgggcaagcccagggcagccttgaaccgtcccctggcctgccctccccggtgggggccaggatgctgaagaagcagtctgcagggcttgtgctgtggggcgctatcctctttgtggcctggaatgccctgctgctcctcttcttctggacgcgcccagcacctggcaggccaccctcagtcagcgctctcgatggcgaccccgccagcctcacccgggaagtgattcgcctggcccaagacgccgaggtggagctggagcggcagcgtgggctgctgcagcagatcggggatgccctgtcgagccagcgggggagggtgcccaccgcggcccctcccgcccagccgcgtgtgcctgtgacccccgcgccggcggtgattcccatcctggtcatcgcctgtgaccgcagcactgttcggcgctgcctggacaagctgctgcattatcggccctcggctgagctcttccccatcatcgttagccaggactgcgggcacgaggagacggcccaggccatcgcctcctacggcagcgcggtcacgcacatccggcagcccgacctgagcagcattgcggtgccgccggaccaccgcaagttccagggctactacaagatcgcgcgccactaccgctgggcgctgggccaggtcttccggcagtttcgcttccccgcggccgtggtggtggaggatgacctggaggtggccccggacttcttcgagtactttcgggccacctatccgctgctgaaggccgacccctccctgtggtgcgtctcggcctggaatgacaacggcaaggagcagatggtggacgccagcaggcctgagctgctctaccgcaccgactttttccctggcctgggctggctgctgttggccgagctctgggctgagctggagcccaagtggccaaaggccttctgggacgactggatgcggcggccggagcagcggcaggggcgggcctgcatacgccctgagatctcaagaacgatgacctttggccgcaagggtgtgagccacgggcagttctttgaccagcacctcaagtttatcaagctgaaccagcagtttgtgcacttcacccagctggacctgtcttacctgcagcgggaggcctatgaccgagatttcctcgcccgcgtctacggtgctccccagctgcaggtggagaaagtgaggaccaatgaccggaaggagctgggggaggtgcgggtgcagtatacgggcagggacagcttcaaggctttcgccaaggctctgggtgtcatggatgaccttaagtcgggggttccgagagctggctaccggggtattgtcaccttccagttccggggccgccgtgtccacctggcgcccccaccgacgtgggagggctatgatcctagctggaattagcacctgcctgtccttcctgggcccctccttgccacatcatgagctgaggtgggaccacagtccccaggctgcatcggcctgcctgtgtttccctcttaggtgcatttatctttttgatttttccgagtggcatttaagtgcacaaatgataacaagaggattattctcccgttctcaagggagtcagatcaggggaactattctagggtatgttgcggggtattaagcaggaaaccactgtgtggtggggggcactgggcttgttggggccagaaatgtccacgtcctgagctttctcctggagcatgtgcagagagtttggcaacgttcgctctcttgaccagaccccttctccctgacctggctcttccagccagggcacgagccctccttctatacctgctccccttcccccagtggggactgagttatgggagaaggggacatatttgtggccaaaatgatactaaccaaaggggcttccttgtcagggcctggtggagttggtgggtcatcggggctcactgcctcctgcccttctctcctgtctgacccccacttagcccttctctccttgcagcctagcagtttatagttctgagatggaaagttgaagggggcaagcaagacctctcctcagcccatgcccagctgtcaggagagaggtgcagggaggaaggccttgtgctgggacaacctctctcttgccttacctcagagagggactatgccctgacccctcctttctgaaaatcagtgccctccctgttgctctaggaggctcctgctggcttggtagaagacagaattcgatctgcctgtccctttttcccctggggtttgacacacaggctcctctcagcatgaggtggagcagtgaccaggtggagcagtgaccaggacgcctctggcccagtgctgcccagcctccccgcccgctcccaggcgccccatgtcctcacaggccaggacgccatggcaggatggagaggacttggtggatttttgtttcttgcctgacctcagtttcatgaaagaaagtggaagctacagaattattttctaaaataaaggctgaattgtctgaaaaa

SEQ ID NO: 439653 - DNA, 3106 bp, Homo sapiens
gggttgcgccagggagccggaaagccgactcccgaagttggggtcctgggaaaacttgggtcctgggttgactgagaagcggcggggaaaggaggcgggccaggaggagggggcctggcggacgccggccggggggcggggcgcggcggggctgtcggtcacgcccctcagtccgccccgccccgccccgcctgccggggaagggccacgttgcccgcccggccgtccggccccggcgcgccgcagaaagggctggcgagtcgaaaggcgaggcggccgcggcagcgcttgggacgcgcctgggcaccgggctcgctccctgcgccccggagcaggccaagttcggggccaggacgtcgggaggacctggtgcatggctgcctcctaatcccatagtccagaggaggcatccctaggactgcgggcaagggagccgggcaagcccagggcagccttgaaccgtcccctggcctgccctccccggtgggggccaggatgctgaagaagcagtctgcagggcttgtgctgtggggcgctatcctctttgtggcctggaatgccctgctgctcctcttcttctggacgcgcccagcacctggcaggccaccctcagtcagcgctctcgatggcgaccccgccagcctcacccgggaagtgattcgcctggcccaagacgccgaggtggagctggagcggcagcgtgggctgctgcagcagatcggggatgccctgtcgagccagcgggggagggtgcccaccgcggcccctcccgcccagccgcgtgtgcctgtgacccccgcgccggcggtgattcccatcctggtcatcgcctgtgaccgcagcactgttcggcgctgcctggacaagctgctgcattatcggccctcggctgagctcttccccatcatcgttagccaggactgcgggcacgaggagacggcccaggccatcgcctcctacggcagcgcggtcacgcacatccggcagcccgacctgagcagcattgcggtgccgccggaccaccgcaagttccagggctactacaagatcgcgcgccactaccgctgggcgctgggccaggtcttccggcagtttcgcttccccgcggccgtggtggtggaggatgacctggaggtggccccggacttcttcgagtactttcgggccacctatccgctgctgaaggccgacccctccctgtggtgcgtctcggcctggaatgacaacggcaaggagcagatggtggacgccagcaggcctgagctgctctaccgcaccgactttttccctggcctgggctggctgctgttggccgagctctgggctgagctggagcccaagtggccaaaggccttctgggacgactggatgcggcggccggagcagcggcaggggcgggcctgcatacgccctgagatctcaagaacgatgacctttggccgcaagggtgtgagccacgggcagttctttgaccagcacctcaagtttatcaagctgaaccagcagtttgtgcacttcacccagctggacctgtcttacctgcagcgggaggcctatgaccgagatttcctcgcccgcgtctacggtgctccccagctgcaggtggagaaagtgaggaccaatgaccggaaggagctgggggaggtgcgggtgcagtatacgggcagggacagcttcaaggctttcgccaaggctctgggtgtcatggatgaccttaagtcgggggttccgagagctggctaccggggtattgtcaccttccagttccggggccgccgtgtccacctggcgcccccaccgacgtgggagggctatgatcctagctggaattagcacctgcctgtccttcctgggcccctccttgccacatcatgagctgaggtgggaccacagtccccaggctgcatcggcctgcctgtgtttccctcttaggtgcatttatctttttgatttttccgagtggcatttaagtgcacaaatgataacaagaggattattctcccgttctcaagggagtcagatcaggggaactattctagggtatgttgcggggtattaagcaggaaaccactgtgtggtggggggcactgggcttgttggggccagaaatgtccacgtcctgagctttctcctggagcatgtgcagagagtttggcaacgttcgctctcttgaccagaccccttctccctgacctggctcttccagccagggcacgagccctccttctatacctgctccccttcccccagtggggactgagttatgggagaaggggacatatttgtggccaaaatgatactaaccaaaggggcttccttgtcagggcctggtggagttggtgggtcatcggggctcactgcctcctgcccttctctcctgtctgacccccacttagcccttctctccttgcagcctagcagtttatagttctgagatggaaagttgaagggggcaagcaagacctctcctcagcccatgcccagctgtcaggagagaggtgcagggaggaaggccttgtgctgggacaacctctctcttgccttacctcagagagggactatgccctgacccctcctttctgaaaatcagtgccctccctgttgctctaggaggctcctgctggcttggtagaagacagaattcgatctgcctgtccctttttcccctggggtttgacacacaggctcctctcagcatgaggtggagcagtgaccaggtggagcagtgaccaggacgcctctggcccagtgctgcccagcctccccgcccgctcccaggcgccccatgtcctcacaggccaggacgccatggcaggatggagaggacttggtggatttttgtttcttgcctgacctcagtttcatgaaagaaagtggaagctacagaattattttctaaaataaaggctgaattgtctgaaaaaaaaaaaaaccacgcacaaaaaaactttgtgggcccccgggccccgaaaaagttcttaacacccttcctggggccgggcccacacggcaggcaccgggcccagcgggtcccgggggacccgggccggacggctgggtctccccataaagcccggggcaccggcgtttggcacccaagggtcgg

SEQ ID NO: 439654 - DNA, 3310 bp, Homo sapiens
gggttgcgccagggagccggaaagccgactcccgaagttggggtcctgggaaaacttgggtcctgggttgactgagaagcggcggggaaaggaggcgggccaggaggagggggcctggcggacgccggccggggggcggggcgcggcggggctgtcggtcacgcccctcagtccgccccgccccgccccgcctgccggggaagggccacgttgcccgcccggccgtccggccccggcgcgccgcagaaagggctggcgagtcgaaaggcgaggcggccgcggcagcgcttgggacgcgcctgggcaccgggctcgctccctgcgccccggagcaggccaagttcggggccaggacgtcgggaggacctggtgcatggctgcctcctaatcccatagtccagaggaggcatccctaggactgcgggcaagggagccgggcaagcccagggcagccttgaaccgtcccctggcctgccctccccggtgggggccaggatgctgaagaagcagtctgcagggcttgtgctgtggggcgctatcctctttgtggcctggaatgccctgctgctcctcttcttctggacgcgcccagcacctggcaggccaccctcagtcagcgctctcgatggcgaccccgccagcctcacccgggaagtgattcgcctggcccaagacgccgaggtggagctggagcggcagcgtgggctgctgcagcagatcggggatgccctgtcgagccagcgggggagggtgcccaccgcggcccctcccgcccagccgcgtgtgcctgtgacccccgcgccggcggtgattcccatcctggtcatcgcctgtgaccgcagcactgttcggcgctgcctggacaagctgctgcattatcggccctcggctgagctcttccccatcatcgttagccaggactgcgggcacgaggagacggcccaggccatcgcctcctacggcagcgcggtcacgcacatccggcagcccgacctgagcagcattgcggtgccgccggaccaccgcaagttccagggctactacaagatcgcgcgccactaccgctgggcgctgggccaggtcttccggcagtttcgcttccccgcggccgtggtggtggaggatgacctggaggtggccccggacttcttcgagtactttcgggccacctatccgctgctgaaggccgacccctccctgtggtgcgtctcggcctggaatgacaacggcaaggagcagatggtggacgccagcaggcctgagctgctctaccgcaccgactttttccctggcctgggctggctgctgttggccgagctctgggctgagctggagcccaagtggccaaaggccttctgggacgactggatgcggcggccggagcagcggcaggggcgggcctgcatacgccctgagatctcaagaacgatgacctttggccgcaagggtgtgagccacgggcagttctttgaccagcacctcaagtttatcaagctgaaccagcagtttgtgcacttcacccagctggacctgtcttacctgcagcgggaggcctatgaccgagatttcctcgcccgcgtctacggtgctccccagctgcaggtggagaaagtgaggaccaatgaccggaaggagctgggggaggtgcgggtgcagtatacgggcagggacagcttcaaggctttcgccaaggctctgggtgtcatggatgaccttaagtcgggggttccgagagctggctaccggggtattgtcaccttccagttccggggccgccgtgtccacctggcgcccccaccgacgtgggagggctatgatcctagctggaattagcacctgcctgtccttcctgggcccctccttgccacatcatgagctgaggtgggaccacagtccccaggctgcatcggcctgcctgtgtttccctcttaggtgcatttatctttttgatttttccgagtggcatttaagtgcacaaatgataacaagaggattattctcccgttctcaagggagtcagatcaggggaactattctagggtatgttgcggggtattaagcaggaaaccactgtgtggtggggggcactgggcttgttggggccagaaatgtccacgtcctgagctttctcctggagcatgtgcagagagtttggcaacgttcgctctcttgaccagaccccttctccctgacctggctcttccagccagggcacgagccctccttctatacctgctccccttcccccagtggggactgagttatgggagaaggggacatatttgtggccaaaatgatactaaccaaaggggcttccttgtcagggcctggtggagttggtgggtcatcggggctcactgcctcctgcccttctctcctgtctgacccccacttagcccttctctccttgcagcctagcagtttatagttctgagatggaaagttgaagggggcaagcaagacctctcctcagcccatgcccagctgtcaggagagaggtgcagggaggaaggccttgtgctgggacaacctctctcttgccttacctcagagagggactatgccctgacccctcctttctgaaaatcagtgccctccctgttgctctaggaggctcctgctggcttggtagaagacagaattcgatctgcctgtccctttttcccctggggtttgacacacaggctcctctcagcatgaggtggagcagtgaccaggtggagcagtgaccaggacgcctctggcccagtgctgcccagcctccccgcccgctcccaggcgccccatgtcctcacaggccaggacgccatggcaggatggagaggacttggtggatttttgtttcttgcctgacctcagtttcatgaaagaaagtggaagctacagaattattttctaaaataaaggctgaattgtctgaaaaaaaaaaaaaaacggcacgaggtaatatttcctgtggttgggaatcctagaatgcctgatctattttatctgttcaggtagttttgttattgtaccctcttttgggtcatattctagtatttctcacagggggtatgagaaacagaaagctatatgtagcagctggtcttgagaagtagaagcatcttaactgtcataagagcatagattttttgtttttcacaacagctggaataagttcctgcattataagtataaagggaaccgagatttaatttggagatcatcactgttaaaacgataccagacatttgtcacagtgtcttatttggggaaagtttgctaatatacattttgtctgtgaaaatatagtaaattttaaaatact

SEQ ID NO: 439655 - DNA, 2487 bp, Homo sapiens
gggttgcgccagggagccggaaagccgactcccgaagttggggtcctgggaaaacttgggtcctgggttgactgagaagcggcggggaaaggaggcgggccaggaggagggggcctggcggacgccggccggggggcggggcgcggcggggctgtcggtcacgcccctcagtccgccccgccccgccccgcctgccggggaagggccacgttgcccgcccggccgtccggccccggcgcgccgcagaaagggctggcgagtcgaaaggcgaggcggccgcggcagcgcttgggacgcgcctgggcaccgggctcgctccctgcgccccggagcaggccaagttcggggccaggacgtcgggaggacctggtgcatggctgcctcctaatcccatagtccagaggaggcatccctaggactgcgggcaagggagccgggcaagcccagggcagccttgaaccgtcccctggcctgccctccccggtgggggccaggatgctgaagaagcagtctgcagggcttgtgctgtggggcgctatcctctttgtggcctggaatgccctgctgctcctcttcttctggacgcgcccagcacctggcaggccaccctcagtcagcgctctcgatggcgaccccgccagcctcacccgggaagtgattcgcctggcccaagacgccgaggtggagctggagcggcagcgtgggctgctgcagcagatcggggatgccctgtcgagccagcgggggagggtgcccaccgcggcccctcccgcccagccgcgtgtgcctgtgacccccgcgccggcggtgattcccatcctggtcatcgcctgtgaccgcagcactgttcggcgctgcctggacaagctgctgcattatcggccctcggctgagctcttccccatcatcgttagccaggactgcgggcacgaggagacggcccaggccatcgcctcctacggcagcgcggtcacgcacatccggcagcccgacctgagcagcattgcggtgccgccggaccaccgcaagttccagggctactacaagatcgcgcgccactaccgctgggcgctgggccaggtcttccggcagtttcgcttccccgcggccgtggtggtggaggatgacctggaggtggccccggacttcttcgagtactttcgggccacctatccgctgctgaaggccgacccctccctgtggtgcgtctcggcctggaatgacaacggcaaggagcagatggtggacgccagcaggcctgagctgctctaccgcaccgactttttccctggcctgggctggctgctgttggccgagctctgggctgagctggagcccaagtggccaaaggccttctgggacgactggatgcggcggccggagcagcggcaggggcgggcctgcatacgccctgagatctcaagaacgatgacctttggccgcaagggtgtgagccacgggcagttctttgaccagcacctcaagtttatcaagctgaaccagcagtttgtgcacttcacccagctggacctgtcttacctgcagcgggaggcctatgaccgagatttcctcgcccgcgtctacggtgctccccagctgcaggtggagaaagtgaggaccaatgaccggaaggagctgggggaggtgcgggtgcagtatacgggcagggacagcttcaaggctttcgccaaggctctgggtgtcatggatgaccttaagtcgggggttccgagagctggctaccggggtattgtcaccttccagttccggggccgccgtgtccacctggcgcccccaccgacgtgggagggctatgatcctagctggaattagcacctgcctgtccttcctgggcccctccttgccacatcatgagctgaggtgggaccacagtccccaggctgcatcggcctgcctgtgtttccctcttaggtgcatttatctttttgatttttccgagtggcatttaagtgcacaaatgataacaagaggattattctcccgttctcaagggagtcagatcaggggaactattctagggtatgttgcggggtattaagcaggaaaccactgtgtggtggggggcactgggcttgttggggccagaaatgtccacgtcctgagctttctgacccctcctttctgaaaatcagtgccctccctgttgctctaggaggctcctgctggcttggtagaagacagaattcgatctgcctgtccctttttcccctggggtttgacacacaggctcctctcagcatgaggtggagcagtgaccaggtggagcagtgaccaggacgcctctggcccagtgctgcccagcctccccgcccgctcccaggcgccccatgtcctcacaggccaggacgccatggcaggatggagaggacttggtggatttttgtttcttgcctgacctcagtttcatgaaagaaagtggaagctacagaattattttctaaaataaaggctgaattgtctgaaaaa

SEQ ID NO: 439656 - DNA, 2324 bp, Homo sapiens
gggttgcgccagggagccggaaagccgactcccgaagttggggtcctgggaaaacttgggtcctgggttgactgagaagcggcggggaaaggaggcgggccaggaggagggggcctggcggacgccggccggggggcggggcgcggcggggctgtcggtcacgcccctcagtccgccccgccccgccccgcctgccggggaagggccacgttgcccgcccggccgtccggccccggcgcgccgcagaaagggctggcgagtcgaaaggcgaggcggccgcggcagcgcttgggacgcgcctgggcaccgggctcgctccctgcgccccggagcaggccaagttcggggccaggacgtcgggaggacctggtgcatggctgcctcctaatcccatagtccagaggaggcatccctaggactgcgggcaagggagccgggcaagcccagggcagccttgaaccgtcccctggcctgccctccccggtgggggccaggatgctgaagaagcagtctgcagggcttgtgctgtggggcgctatcctctttgtggcctggaatgccctgctgctcctcttcttctggacgcgcccagcacctggcaggccaccctcagtcagcgctctcgatggcgaccccgccagcctcacccgggaagtgattcgcctggcccaagacgccgaggtggagctggagcggcagcgtgggctgctgcagcagatcggggatgccctgtcgagccagcgggggagggtgcccaccgcggcccctcccgcccagccgcgtgtgcctgtgacccccgcgccggcggtgattcccatcctggtcatcgcctgtgaccgcagcactgttcggcgctgcctggacaagctgctgcattatcggccctcggctgagctcttccccatcatcgttagccaggactgcgggcacgaggagacggcccaggccatcgcctcctacggcagcgcggtcacgcacatccggcagcccgacctgagcagcattgcggtgccgccggaccaccgcaagttccagggctactacaagatcgcgcgccactaccgctgggcgctgggccaggtcttccggcagtttcgcttccccgcggccgtggtggtggaggatgacctggaggtggccccggacttcttcgagtactttcgggccacctatccgctgctgaaggccgacccctccctgtggtgcgtctcggcctggaatgacaacggcaaggagcagatggtggacgccagcaggcctgagctgctctaccgcaccgactttttccctggcctgggctggctgctgttggccgagctctgggctgagctggagcccaagtggccaaaggccttctgggacgactggatgcggcggccggagcagcggcaggggcgggcctgcatacgccctgagatctcaagaacgatgacctttggccgcaagggtgtgagccacgggcagttctttgaccagcacctcaagtttatcaagctgaaccagcagtttgtgcacttcacccagctggacctgtcttacctgcagcgggaggcctatgaccgagatttcctcgcccgcgtctacggtgctccccagctgcaggtggagaaagtgaggaccaatgaccggaaggagctgggggaggtgcgggtgcagtatacgggcagggacagcttcaaggctttcgccaaggctctgggtgtcatggatgaccttaagtcgggggttccgagagctggctaccggggtattgtcaccttccagttccggggccgccgtgtccacctggcgcccccaccgacgtgggagggctatgatcctagctggaattagcacctgcctgtccttcctgggcccctccttgccacatcatgagctgaggtgggaccacagtccccaggctgcatcggcctgcctgtgtttccctcttaggtgcatttatctttttgatttttccgagtggcatttaagtgcacaaatgataacaagaggattattctcccgttctcaagggagtcagatcaggggaactattctagggtatgttgcggggtattaagcaggaaaccactgtgtggtggggggcacctctcagcatgaggtggagcagtgaccaggtggagcagtgaccaggacgcctctggcccagtgctgcccagcctccccgcccgctcccaggcgccccatgtcctcacaggccaggacgccatggcaggatggagaggacttggtggatttttgtttcttgcctgacctcagtttcatgaaagaaagtggaagctacagaattattttctaaaataaaggctgaattgtctgaaaaa

SEQ ID NO: 439657 - DNA, 1062 bp, Homo sapiens
gggttgcgccagggagccggaaagccgactcccgaagttggggtcctgggaaaacttgggtcctgggttgactgagaagcggcggggaaaggaggcgggccaggaggagggggcctggcggacgccggccggggggcggggcgcggcggggctgtcggtcacgcccctcagtccgccccgccccgccccgcctgccggggaagggccacgttgcccgcccggccgtccggccccggcgcgccgcagaaagggctggcgagtcgaaaggcgaggcggccgcggcagcgcttgggacgcgcctgggcaccgggctcgctccctgcgccccggagcaggccaagttcggggccaggacgtcgggaggacctggtgcatggctgcctcctaatcccatagtccagaggaggcatccctaggactgcgggcaagggagccgggcaagcccagggcagccttgaaccgtcccctggcctgccctccccggtgggggccaggatgctgaagaagcagtctgcagggcttgtgctgtggggcgctatcctctttgtggcctggaatgccctgctgctcctcttcttctggacgcgcccagcacctggcaggccaccctcagtcagcgctctcgatggcgaccccgccagcctcacccgggaagtgattcgcctggcccaagacgccgaggtggagctggagcggcagcgtgggctgctgcagcagatcggggatgccctgtcgagccagcgggggagggtgcccaccgcggcccctcccgcccagccgcgtgtgcctgtgacccccgcgccggcggtgattcccatcctggtcatcgcctgtgaccgcagcactgttcggcgctgcctggacaagctgctgcattatcggccctcggctgagctcttccccatcatcgttagccaggccccatgtcctcacaggccaggacgccatggcaggatggagaggacttggtggatttttgtttcttgcctgacctcagtttcatgaaagaaagtggaagctacagaattattttctaaaataaaggctgaattgtctgaaaaa

SEQ ID NO: 439658 - DNA, 646 bp, Homo sapiens
tggtgggcgcttataatcccagctactcgggaggctgaggcagaagaatcgcttgaacccaggaggcggaagttgcagtaagccgagatcgccccactgtactccagcctgggcaacagagtgagactcttttttgagagtctgtctcaaaacaaacaaaaaaaattaattagactaaaaagtcctacaaaattttgaaggtagctgatgagtacacaagagttcatatattttttgtaggcttgaacatttctgtaagtttcaggaaactaagtcctataagttgaagaaaaatatttttaaaattctaacatctatagctgattatgtttatcaacccagtccataatctaaccctgttgttcttcttgctgaagtgaatactgtaaaatcttttcttggctcaagaattttctttgggcattgacatcatgttgactggagggttcagaagttaagaagctgggtgggactggtctgaaggcagtgagtcaactgaattgattattcacagtcagttacgcatccaactctttattctactcttccccccttctcactactgcatttgacacttgtgggtttttttcaattactcttttttttggagacagggtctcgccctgtcacccaggctggagtacag

SEQ ID NO: 439659 - DNA, 705 bp, Homo sapiens
agcggactacatttcccagggggctgcgggactgccgggaggagtgggggcggtgcctcacgtctggtacagtcatcacaagcctgttcggcgggactgtgatggccagagagatgacgatcttaggatcggctgttttgactctcctgttggccggctatttggcacaacagtatttaccattgcctactcctaaagtgattggtattgatcttggcaccacctattgttctgttggggtgttttttcctggcacaggaaaagtaaaggtgattccagatgaaaatgggcatatcagcatacccagcatggtgtcttttactgacaatgatgtatatgtgggatatgaaagcgtagagctggcagattcaaatcctcaaaacacaatatatgatgccaaaagattcataggcaagatttttaccgcagaagagttggaggctgaaattggcagatacccatttaaggttttaaacaaaaatggaatggttgagttttctgtgacaagtaatgagaccatcacagtgtccccagaatatgttggctctcgactattgttgaagttaaaggaaatggcagaggcatatcttggaatgccagttgccaatgctgtcatttctgtaccagcagaatttgatctaaaacagagaaattcaacaattgaagctgctaaccttgcaggtaacagtacccttgactgagatg

SEQ ID NO: 439660 - DNA, 3547 bp, Homo sapiens
  misc_feature (3485)..(3485): n is a, c, g, or t
  misc_feature (3487)..(3487): n is a, c, g, or t
  misc_feature (3493)..(3493): n is a, c, g, or t
  misc_feature (3495)..(3495): n is a, c, g, or t
  misc_feature (3505)..(3505): n is a, c, g, or t
  misc_feature (3509)..(3509): n is a, c, g, or t
agcggactacatttcccagggggctgcgggactgccgggaggagtgggggcggtgcctcacgtctggtacagtcatcacaagcctgttcggcgggactgtgatggccagagagatgacgatcttaggatcggctgttttgactctcctgttggccggctatttggcacaacagtatttaccattgcctactcctaaagtgattggtattgatcttggcaccacctattgttctgttggggtgttttttcctggcacaggaaaagtaaaggtgattccagatgaaaatgggcatatcagcatacccagcatggtgtcttttactgacaatgatgtatatgtgggatatgaaagcgtagagctggcagattcaaatcctcaaaacacaatatatgatgccaaaagattcataggcaagatttttaccgcagaagagttggaggctgaaattggcagatacccatttaaggttttaaacaaaaatggaatggttgagttttctgtgacaagtaatgagaccatcacagtgtccccagaatatgttggctctcgactattgttgaagttaaaggaaatggcagaggcatatcttggaatgccagttgccaatgctgtcatttctgtaccagcagaatttgatctaaaacagagaaattcaacaattgaagctgctaaccttgcaggactgaagattttgagggtaataaatgaacccacagcagcagctatggcctatggtctccacaaggctgacgtcttccacgtcttggtgatagacttgggcggaggaactctagatgtgtctttactgaataaacaaggagggatgtttctaacccgagcaatgtctggaaacaataaacttggaggacaggacttcaatcagagattgcttcagtacttatataaacagatctatcaaacatatggcttcgtgccctctaggaaagaggaaatccacagattgagacaagctgtggaaatggtcaaattaaatctgactcttcatcaatctgctcagttgtcagtattactaacggtggaggagcaggacaggaaggaacctcacagtagtgacactgaactgccaaaagacaaactttcctcagcagatgaccatcgcgtgaacagtgggtttggacgtggcctttctgataagaaaagtggagaaagtcaggttttatttgaaacagaaatatcacggaaactctttgatacccttaatgaagacctctttcagaaaatactggtacccattcagcaagtattgaaagaaggccacctggaaaagactgagattgatgaggtggttttagttgggggctccactcgtattcctcggatccgtcaagtcattcaagagttctttggaaaagatcccaacacatctgtagaccctgacctagcagtagtaacgggagtggctatccaagcagggattgatggaggctcttggcctctccaagtcagtgctttagaaattcccaataagcatttacaaaaaaccaacttcaactgaattctgcagaaataatggttatttgtgaacttgtctgatgatctcttcccatttatcagattaccttttccacaaaagaaagtctctaaaatatcacagatttacctagagggcaacatttagatacaggaaaattttacatagtgttttgtcttaggattagacgtgaccagattgatcctgtttgattttggagagatcctattctaacaaatactctaaaatgataaaattgaggtacaactctcttaaaagagtatggataactatattttctggattctggaggttgataaccatatgcacttaacattatattctataaacattaagtagtgccagttatgagattcccagttcttactaaattgtattagcaggagctggtaattacttgtattatcacatgtaactaataatttgaactatacttgaaggaccgtgttgatgtcaggtatttacagtggttggaagatagcagtattattagcataagctgcatacgtaatattcagtaactgccatattatataacaaatttacattcacaaattcagtatcctgttaagtgtcatattcttgtaatctgcattctccaggagttttatgtgtttaatagatgaatttattttatttctaaaggtattcaaatgtttcagcaccatatagtagaaatacccaattatattctagttcctttatgtcctgtacatcattctctgcttggatttccattattctgtttggttagagaataaaattggtaattgcatttgaagaatgtgttaatgtcataataaagccatgattgctatcttatttttgttatccaagacctttgcaaacattggcaaatagcatcaattacctactgtatttgtttctttgtttatattttcagtaagccctggggaatatagcatggaattgagctactaaatggttttggttccgttttacggagatttttcctcatatttagttttgaatgaggaaaatgtgctcaattataaaagctgtgttattgttttctattattatttttaaataatcacacttggactcttttcaaacattaggttagtttgtaatgaaagcaaaaaatttgtgaatactggaagtaacgtggaaatctaatgtggaagccattgtggcaaggtttctacaaatcggcatttggagcagagttgtttgttttgttgttgtttcctttaagaaaaaccacagggaccaagaaagaaaatataacagtttgatttctgtcatacccattgtatttgaagatatatggatacagattatatatatatatacatattttccttaatagaggaatgcttcatattattcaaaaattatatcctgatcacctttttttgttttttattgtaaagtatctctgctttatccattgctgaattcgataggatgttgaaatgctggtcaccaaaaaaggaaactgagcaaattcatttcaacaacatcaaaacttcagcttctcatagtaaaaagctgaatgttactaatatttttcatatctaaaaaaaaattcttagcaatgaaatggctgttaaaacacaaatttcaatcaaatacttttgtgtatagaaaatatgtatagtaggtagatagaaaagtataaaatgtttgttgaagtatcttattttagaatgaatggagaaatgccaaagatgaatccttcactgcattatgaaaatatttcacatgttctcttggactttatataaatctgtaatagattttagaattgaaaaattctttgtgaaggtcttctaaaagtgttccaatttatctcaaaatctccatatataggatcagcttaaaacataaagaaaaccttgaatttctcaaatgtttgagatgttcaagacaggtctaacgggatgtttgggacactgcacaaagggggggcacttcagtcgaggggagtaaaaaccttgcgcaaananacgggngngggagggaancttnatagccaaaaaggggccacattgggggaacaaacacga

SEQ ID NO: 439661 - DNA, 4050 bp, Homo sapiens
agcggactacatttcccagggggctgcgggactgccgggaggagtgggggcggtgcctcacgtctggtacagtcatcacaagcctgttcggcgggactgtgatggccagagagatgacgatcttaggatcggctgttttgactctcctgttggccggctatttggcacaacagtatttaccattgcctactcctaaagtgattggtattgatcttggcaccacctattgttctgttggggtgttttttcctggcacaggaaaagtaaaggtgattccagatgaaaatgggcatatcagcatacccagcatggtgtcttttactgacaatgatgtatatgtgggatatgaaagcgtagagctggcagattcaaatcctcaaaacacaatatatgatgccaaaagattcataggcaagatttttaccgcagaagagttggaggctgaaattggcagatacccatttaagtaaaggggtttttgtttaagagaagccgaaaataaaaaatttggggaaaaattgtggggttgaagtttttctgtgacaagtaatgagaccatcacagtgtccccagaatatgttggctctcgactattgttgaagttaaaggaaatggcagaggcatatcttggaatgccagttgccaatgctgtcatttctgtaccagcagaatttgatctaaaacagagaaattcaacaattgaagctgctaaccttgcaggactgaagattttgagggtaataaatgaacccacagcagcagctatggcctatggtctccacaaggctgacgtcttccacgtcttggtgatagacttgggcggaggaactctagatgtgtctttactgaataaacaaggagggatgtttctaacccgagcaatgtctggaaacaataaacttggaggacaggacttcaatcagagattgcttcagtacttatataaacagatctatcaaacatatggcttcgtgccctctaggaaagaggaaatccacagattgagacaagctgtggaaatggtcaaattaaatctgactcttcatcaatctgctcagttgtcagtattactaacggtggaggagcaggacaggaaggaacctcacagtagtgacactgaactgccaaaagacaaactttcctcagcagatgaccatcgcgtgaacagtgggtttggacgtggcctttctgataagaaaagtggagaaagtcaggttttatttgaaacagaaatatcacggaaactctttgatacccttaatgaagacctctttcagaaaatactggtacccattcagcaagtattgaaagaaggccacctggaaaagactgagattgatgaggtggttttagttgggggctccactcgtattcctcggatccgtcaagtcattcaagagttctttggaaaagatcccaacacatctgtagaccctgacctagcagtagtaacgggagtggctatccaagcagggattgatggaggctcttggcctctccaagtcagtgctttagaaattcccaataagcatttacaaaaaaccaacttcaactgaattctgcagaaataatggttatttgtgaacttgtctgatgatctcttcccatttatcagattaccttttccacaaaagaaagtctctaaaatatcacagatttacctagagggcaacatttagatacaggaaaattttacatagtgttttgtcttaggattagacgtgaccagattgatcctgtttgattttggagagatcctattctaacaaatactctaaaatgataaaattgaggtacaactctcttaaaagagtatggataactatattttctggattctggaggttgataaccatatgcacttaacattatattctataaacattaagtagtgccagttatgagattcccagttcttactaaattgtattagcaggagctggtaattacttgtattatcacatgtaactaataatttgaactatacttgaaggaccgtgttgatgtcaggtatttacagtggttggaagatagcagtattattagcataagctgcatacgtaatattcagtaactgccatattatataacaaatttacattcacaaattcagtatcctgttaagtgtcatattcttgtaatctgcattctccaggagttttatgtgtttaatagatgaatttattttatttctaaaggtattcaaatgtttcagcaccatatagtagaaatacccaattatattctagttcctttatgtcctgtacatcattctctgcttggatttccattattctgtttggttagagaataaaattggtaattgcatttgaagaatgtgttaatgtcataataaagccatgattgctatcttatttttgttatccaagacctttgcaaacattggcaaatagcatcaattacctactgtatttgtttctttgtttatattttcagtaagccctggggaatatagcatggaattgagctactaaatggttttggttccgttttacggagatttttcctcatatttagttttgaatgaggaaaatgtgctcaattataaaagctgtgttattgttttctattattatttttaaataatcacacttggactcttttcaaacattaggttagtttgtaatgaaagcaaaaaatttgtgaatactggaagtaacgtggaaatctaatgtggaagccattgtggcaaggtttctacaaatcggcatttggagcagagttgtttgttttgttgttgtttcctttaagaaaaaccacagggaccaagaaagaaaatataacagtttgatttctgtcatacccattgtatttgaagatatatggatacagattatatatatatatacatattttccttaatagaggaatgcttcatattattcaaaaattatatcctgatcacctttttttgttttttattgtaaagtatctctgctttatccattgctgaattcgataggatgttgaaatgctggtcaccaaaaaaggaaactgagcaaattcatttcaacaacatcaaaacttcagcttctcatagtaaaaagctgaatgttactaatatttttcatatctaaaaaaaaattcttagcaatgaaatggctgttaaaacacaaatttcaatcaaatacttttgtgtatagaaaatatgtatagtaggtagatagaaaagtataaaatgtttgttgaagtatcttattttagaatgaatggagaaatgccaaagatgaatccttcactgcattatgaaaatatttcacatgttctcttggactttatataaatctgtaatagattttagaattgaaaaattctttgtgaaggtcttctaaaagtgttccaatttatctcaaaatctccatatataggatcagcttaaaacataaagaaaaccttgaatttctcaaatgtttgagatgttcaagacagtctcttaatccgttaatgcttttggaaacaattgacaaaatagggcaggcagctcatctcatgtcctgaagttggaatttaaataattcctatttgcaaattagaatgacagtgttggaatttggaggcagtagttgagcatattctctagtatatagctacacctttaataaaatgaaggaatgtcttcaatcatattttagtgggctatttataaatagtcttgaagtcaatttagtttatttatttaaaagataatgcatcctgaaagggatcatttatgaataacaatctgaagtcttttcataaaaaaaattaataaactttagttgtacatttagccagtgttatttgaagtatgtaacttttaaaatattaagtgtcttgtatgattagaatatgtgaatgagtaacttattttgtatcaggaatgttttggtactgtgttttcactcaaaccactgacttaacagatactgctgtgtataacatgtactaaatattacagttattgtgcataacagattgttcctcttatatttgtgtgtatacaggcaattcatgttttaatgtaaataaataccattttgcagtttgttt

SEQ ID NO: 439662 - DNA, 4011 bp, Homo sapiens
agcggactacatttcccagggggctgcgggactgccgggaggagtgggggcggtgcctcacgtctggtacagtcatcacaagcctgttcggcgggactgtgatggccagagagatgacgatcttaggatcggctgttttgactctcctgttggccggctatttggcacaacagtatttaccattgcctactcctaaagtgattggtattgatcttggcaccacctattgttctgttggggtgttttttcctggcacaggaaaagtaaaggtgattccagatgaaaatgggcatatcagcatacccagcatggtgtcttttactgacaatgatgtatatgtgggatatgaaagcgtagagctggcagattcaaatcctcaaaacacaatatatgatgccaaaagattcataggcaagatttttaccgcagaagagttggaggctgaaattggcagatacccatttaaggttttaaacaaaaatggaatggttgagttttctgtgacaagtaatgagaccatcacagtgtccccagaatatgttggctctcgactattgttgaagttaaaggaaatggcagaggcatatcttggaatgccagttgccaatgctgtcatttctgtaccagcagaatttgatctaaaacagagaaattcaacaattgaagctgctaaccttgcaggactgaagattttgagggtaataaatgaacccacagcagcagctatggcctatggtctccacaaggctgacgtcttccacgtcttggtgatagacttgggcggaggaactctagatgtgtctttactgaataaacaaggagggatgtttctaacccgagcaatgtctggaaacaataaacttggaggacaggacttcaatcagagattgcttcagtacttatataaacagatctatcaaacatatggcttcgtgccctctaggaaagaggaaatccacagattgagacaagctgtggaaatggtcaaattaaatctgactcttcatcaatctgctcagttgtcagtattactaacggtggaggagcaggacaggaaggaacctcacagtagtgacactgaactgccaaaagacaaactttcctcagcagatgaccatcgcgtgaacagtgggtttggacgtggcctttctgataagaaaagtggagaaagtcaggttttatttgaaacagaaatatcacggaaactctttgatacccttaatgaagacctctttcagaaaatactggtacccattcagcaagtattgaaagaaggccacctggaaaagactgagattgatgaggtggttttagttgggggctccactcgtattcctcggatccgtcaagtcattcaagagttctttggaaaagatcccaacacatctgtagaccctgacctagcagtagtaacgggagtggctatccaagcagggattgatggaggctcttggcctctccaagtcagtgctttagaaattcccaataagcatttacaaaaaaccaacttcaactgaattctgcagaaataatggttatttgtgaacttgtctgatgatctcttcccatttatcagattaccttttccacaaaagaaagtctctaaaatatcacagatttacctagagggcaacatttagatacaggaaaattttacatagtgttttgtcttaggattagacgtgaccagattgatcctgtttgattttggagagatcctattctaacaaatactctaaaatgataaaattgaggtacaactctcttaaaagagtatggataactatattttctggattctggaggttgataaccatatgcacttaacattatattctataaacattaagtagtgccagttatgagattcccagttcttactaaattgtattagcaggagctggtaattacttgtattatcacatgtaactaataatttgaactatacttgaaggaccgtgttgatgtcaggtatttacagtggttggaagatagcagtattattagcataagctgcatacgtaatattcagtaactgccatattatataacaaatttacattcacaaattcagtatcctgttaagtgtcatattcttgtaatctgcattctccaggagttttatgtgtttaatagatgaatttattttatttctaaaggtattcaaatgtttcagcaccatatagtagaaatacccaattatattctagttcctttatgtcctgtacatcattctctgcttggatttccattattctgtttggttagagaataaaattggtaattgcatttgaagaatgtgttaatgtcataataaagccatgattgctatcttatttttgttatccaagacctttgcaaacattggcaaatagcatcaattacctactgtatttgtttctttgtttatattttcagtaagccctggggaatatagcatggaattgagctactaaatggttttggttccgttttacggagatttttcctcatatttagttttgaatgaggaaaatgtgctcaattataaaagctgtgttattgttttctattattatttttaaataatcacacttggactcttttcaaacattaggttagtttgtaatgaaagcaaaaaatttgtgaatactggaagtaacgtggaaatctaatgtggaagccattgtggcaaggtttctacaaatcggcatttggagcagagttgtttgttttgttgttgtttcctttaagaaaaaccacagggaccaagaaagaaaatataacagtttgatttctgtcatacccattgtatttgaagatatatggatacagattatatatatatatacatattttccttaatagaggaatgcttcatattattcaaaaattatatcctgatcacctttttttgttttttattgtaaagtatctctgctttatccattgctgaattcgataggatgttgaaatgctggtcaccaaaaaaggaaactgagcaaattcatttcaacaacatcaaaacttcagcttctcatagtaaaaagctgaatgttactaatatttttcatatctaaaaaaaaattcttagcaatgaaatggctgttaaaacacaaatttcaatcaaatacttttgtgtatagaaaatatgtatagtaggtagatagaaaagtataaaatgtttgttgaagtatcttattttagaatgaatggagaaatgccaaagatgaatccttcactgcattatgaaaatatttcacatgttctcttggactttatataaatctgtaatagattttagaattgaaaaattctttgtgaaggtcttctaaaagtgttccaatttatctcaaaatctccatatataggatcagcttaaaacataaagaaaaccttgaatttctcaaatgtttgagatgttcaagacagtctcttaatccgttaatgcttttggaaacaattgacaaaatagggcaggcagctcatctcatgtcctgaagttggaatttaaataattcctatttgcaaattagaatgacagtgttggaatttggaggcagtagttgagcatattctctagtatatagctacacctttaataaaatgaaggaatgtcttcaatcatattttagtgggctatttataaatagtcttgaagtcaatttagtttatttatttaaaagataatgcatcctgaaagggatcatttatgaataacaatctgaagtcttttcataaaaaaaattaataaactttagttgtacatttagccagtgttatttgaagtatgtaacttttaaaatattaagtgtcttgtatgattagaatatgtgaatgagtaacttattttgtatcaggaatgttttggtactgtgttttcactcaaaccactgacttaacagatactgctgtgtataacatgtactaaatattacagttattgtgcataacagattgttcctcttatatttgtgtgtatacaggcaattcatgttttaatgtaaataaataccattttgcagtttgttt

SEQ ID NO: 439663 - DNA, 4099 bp, Homo sapiens
ttcccagaatgcaaagcgcggggcggggctaaagagatagcctgttttccctcaagtaggatcgcgggaccacaggtttgattataaacgccagtctctcgccacggcgctcctccccctcagtctcactggtcctgccggccgttgcgtggaagggggactcagtcgtcactggcagcggttgaatggaggctctttgccccgcgccctcacggatcggctgttttgactctcctgttggccggctatttggcacaacagtatttaccattgcctactcctaaagtgattggtattgatcttggcaccacctattgttctgttggggtgttttttcctggcacaggaaaagtaaaggtgattccagatgaaaatgggcatatcagcatacccagcatggtgtcttttactgacaatgatgtatatgtgggatatgaaagcgtagagctggcagattcaaatcctcaaaacacaatatatgatgccaaaagattcataggcaagatttttaccgcagaagagttggaggctgaaattggcagatacccatttaaggttttaaacaaaaatggaatggttgagttttctgtgacaagtaatgagaccatcacagtgtccccagaatatgttggctctcgactattgttgaagttaaaggaaatggcagaggcatatcttggaatgccagttgccaatgctgtcatttctgtaccagcagaatttgatctaaaacagagaaattcaacaattgaagctgctaaccttgcaggactgaagattttgagggtaataaatgaacccacagcagcagctatggcctatggtctccacaaggctgacgtcttccacgtcttggtgatagacttgggcggaggaactctagatgtgtctttactgaataaacaaggagggatgtttctaacccgagcaatgtctggaaacaataaacttggaggacaggacttcaatcagagattgcttcagtacttatataaacagatctatcaaacatatggcttcgtgccctctaggaaagaggaaatccacagattgagacaagctgtggaaatggtcaaattaaatctgactcttcatcaatctgctcagttgtcagtattactaacggtggaggagcaggacaggaaggaacctcacagtagtgacactgaactgccaaaagacaaactttcctcagcagatgaccatcgcgtgaacagtgggtttggacgtggcctttctgataagaaaagtggagaaagtcaggttttatttgaaacagaaatatcacggaaactctttgatacccttaatgaagacctctttcagaaaatactggtacccattcagcaagtattgaaagaaggccacctggaaaagactgagattgatgaggtggttttagttgggggctccactcgtattcctcggatccgtcaagtcattcaagagttctttggaaaagatcccaacacatctgtagaccctgacctagcagtagtaacgggagtggctatccaagcagggattgatggaggctcttggcctctccaagtcagtgctttagaaattcccaataagcatttacaaaaaaccaacttcaactgaattctgcagaaataatggttatttgtgaacttgtctgatgatctcttcccatttatcagattaccttttccacaaaagaaagtctctaaaatatcacagatttacctagagggcaacatttagatacaggaaaattttacatagtgttttgtcttaggattagacgtgaccagattgatcctgtttgattttggagagatcctattctaacaaatactctaaaatgataaaattgaggtacaactctcttaaaagagtatggataactatattttctggattctggaggttgataaccatatgcacttaacattatattctataaacattaagtagtgccagttatgagattcccagttcttactaaattgtattagcaggagctggtaattacttgtattatcacatgtaactaataatttgaactatacttgaaggaccgtgttgatgtcaggtatttacagtggttggaagatagcagtattattagcataagctgcatacgtaatattcagtaactgccatattatataacaaatttacattcacaaattcagtatcctgttaagtgtcatattcttgtaatctgcattctccaggagttttatgtgtttaatagatgaatttattttatttctaaaggtattcaaatgtttcagcaccatatagtagaaatacccaattatattctagttcctttatgtcctgtacatcattctctgcttggatttccattattctgtttggttagagaataaaattggtaattgcatttgaagaatgtgttaatgtcataataaagccatgattgctatcttatttttgttatccaagacctttgcaaacattggcaaatagcatcaattacctactgtatttgtttctttgtttatattttcagtaagccctggggaatatagcatggaattgagctactaaatggttttggttccgttttacggagatttttcctcatatttagttttgaatgaggaaaatgtgctcaattataaaagctgtgttattgttttctattattatttttaaataatcacacttggactcttttcaaacattaggttagtttgtaatgaaagcaaaaaatttgtgaatactggaagtaacgtggaaatctaatgtggaagccattgtggcaaggtttctacaaatcggcatttggagcagagttgtttgttttgttgttgtttcctttaagaaaaaccacagggaccaagaaagaaaatataacagtttgatttctgtcatacccattgtatttgaagatatatggatacagattatatatatatatacatattttccttaatagaggaatgcttcatattattcaaaaattatatcctgatcacctttttttgttttttattgtaaagtatctctgctttatccattgctgaattcgataggatgttgaaatgctggtcaccaaaaaaggaaactgagcaaattcatttcaacaacatcaaaacttcagcttctcatagtaaaaagctgaatgttactaatatttttcatatctaaaaaaaaattcttagcaatgaaatggctgttaaaacacaaatttcaatcaaatacttttgtgtatagaaaatatgtatagtaggtagatagaaaagtataaaatgtttgttgaagtatcttattttagaatgaatggagaaatgccaaagatgaatccttcactgcattatgaaaatatttcacatgttctcttggactttatataaatctgtaatagattttagaattgaaaaattctttgtgaaggtcttctaaaagtgttccaatttatctcaaaatctccatatataggatcagcttaaaacataaagaaaaccttgaatttctcaaatgtttgagatgttcaagacagtctcttaatccgttaatgcttttggaaacaattgacaaaatagggcaggcagctcatctcatgtcctgaagttggaatttaaataattcctatttgcaaattagaatgacagtgttggaatttggaggcagtagttgagcatattctctagtatatagctacacctttaataaaatgaaggaatgtcttcaatcatattttagtgggctatttataaatagtcttgaagtcaatttagtttatttatttaaaagataatgcatcctgaaagggatcatttatgaataacaatctgaagtcttttcataaaaaaaattaataaactttagttgtacatttagccagtgttatttgaagtatgtaacttttaaaatattaagtgtcttgtatgattagaatatgtgaatgagtaacttattttgtatcaggaatgttttggtactgtgttttcactcaaaccactgacttaacagatactgctgtgtataacatgtactaaatattacagttattgtgcataacagattgttcctcttatatttgtgtgtatacaggcaattcatgttttaatgtaaataaataccattttgcagtttgttt

SEQ ID NO: 439664 - DNA, 938 bp, Homo sapiens
agcggactacatttcccagggggctgcgggactgccgggaggagtgggggcggtgcctcacgtctggtacagtcatcacaagcctgttcggcgggactgtgatggccagagagatgacgatcttaggatcggctgttttgactctcctgttggccggctatttggcacaacagtatttaccattgcctactcctaaagtgattggtattgatcttggcaccacctattgttctgttggggtgttttttcctggcacaggaaaagtaaaggtgattccagatgaaaatgggcatatcagcatacccagcatggtgtcttttactgacaatgatgtatatgtgggatatgaaagcgtagagctggcagattcaaatcctcaaaacacaatatatgatgccaaaagattcataggcaagatttttaccgcagaagagttggaggctgaaattggcagatacccatttaaggttttaaacaaaaatggaatggttgagttttctgtgacaagtaatgagaccatcacagtgtccccagaatatgttggctctcgactattgttgaagttaaaggaaatggcagaggcatatcttggaatgccagttgccaatgctgtcatttctgtaccagcagaatttgatctaaaacagagaaattcaacaattgaagctgctaaccttgcaggactgaagattttgagggtaataaatgaacccacagcagcagctatggcctatggtctccacaaggctgacgtcttccacgtcttggtgatagacttgggcggaggaactctagatgtgtctttactgaataaacaaggagggatgtttctaacccgagcaatgtctggaaacaataaacttggaggacaggacttcaatcagagattgcttcagtacttatataaacagatcgggatcctctagttcacccgcacg

SEQ ID NO: 439665 - DNA, 467 bp, Homo sapiens
aaagttcagatttttaatttgagagggtttttatttcatggaggcagtgttaactaaaattaagcttagatttagctcctgtattattcataatatgagaaattttattaaaggcagactttggtaaaagtgccaacacacttacttgtatagaaaagacttcattctatgggatttatataagtaagtgctttctctatattcaaaatatttcataaggacctgtggtttttttccccttaaaaagcaactctaggccgggcacagtggctcatgcctgtaatccacctgccttggcctttcaaagtgtggggattataggcgcgagccaccgcacctggccaggcaaaatttcaagaataacccaacacctaagtaaaggcagcggatcctgcaaaactttaaaaagacttctactttcaaatgatccagcatcatacacatctaaaacaacacgactacaaaac

SEQ ID NO: 439666 - DNA, 2315 bp, Homo sapiens
aaagttcagatttttaatttgagagggtttttatttcatggaggcagtgttaactaaaattaagcttagatttagctcctgtattattcataatatgagaaattttattaaaggcagactttggtaaaagtgccaacacacttacttgtatagaaaagacttcattctatgggatttatataagtaagtgctttctctatattcaaaatatttcataaggacctgtggtttttttccccttaaaaagcaactctaggccgggcacagtggctcatgcctgtaatcccagcactttgggaggccaaggcaggtggatcacttgaggtcaggagttcgagaccagctggttaacatggtgaaaccccatctctactaaaaatacaaaaattagccaggtgtggtggcacgcgcctgtaatcccagctacatgggaggttgaggcaggagaatctcttgaacccaggaggtggaggttgcagtgagccgcaattacaccactgcactccagcctgggtgacacagcgagtctccatctccaaaaaaaattcaactcttggtcttgtttctcagcacttagtttattgttattagaatttagccatacagccaactttgacaaaatgggtcacagaacaagcatgtacatcaagaggaagttccatatcccccttgtaccatttctccttgggaactcatgctatgggctaccttaaaggtaaaactcatcttatggagtctttctgataggtcactaggtaaaactccttggatagggtgaaaatggatgcacactctattacatactctggtttatcataaggaattttccagaaagctaagctttatactaataagatattggttggtagtaggaacttcaaaaatgaatgagtttgccataactttaattttctggattagaaacacaaaacttgaaatgcaattatcaatattttgtaatatatattcctacagtttgggtagaaataaggaacatgtctgctagatctggtttatgaaaaagtgaaaaatattaaatacaccagagactcaaaccctttcaaggcacacaataactgttctggatttacctgacaaacctagttgagtagcattttgacagaaaatatcagactgaaagttcattcaaatgtacttaaatgtacaatacagtgttcaatagtttttattgcagtgatgtttttccaataatttaagtaattctcttcctagtataatacagttttcataaataatgtttacttgctttctttatattttcaaataaaattaaaatgctcgagcacttcctttcagaaagttataaaattaaaaataattattttaaatgctcattcaaatgtgtctgtatacttgctatgcccctttttctataattccaaactgagactgatttttcagagatttttaactttaataattttaaatctagaatcaagtgaaacagatatgttaaatactgagtctagttttcttccatcttatggagcttcatggaataagaaactaatctagtgcaaatgaagattaaatatttctgggtgatggagagatagtcaacaaatttatttatccatcctctgcacatcagtccactggagcaggagttctacacattaaaaatgtaatgggatcagcctagcattgtttggtgttcttttgttgtattttttagaatgggggtgggggcctaagtgtccttatgaagctgtggtccacgacaggagcttgttgggggagtaccagggttctgctgctttcctgcatctgagcaacacaacagagatcatcagttttaaatagagtagccctcacaatcaaaatatcatagaatatattgtaaagttatgttgctaattttcctttgaaatataaaatattttaagctttttgtcaaaagtggtaacatcttaatacaaataaaaacctttttgtggttgtaagatttagcttataaatcattcaaattgaagtgaaagaattaccaggtcattgttaatgacttagtctattaagaatatatgtatttttgtaaaggaaaagcacttgtagatatttaatcagtacaagatatgtcttttgcagaaataaaatgctgcttagagattctccttaaatattttttatttttgtgctcaaatgtattttctgttgatctatggaatgttctgtacaaagctgtataattgtactgttgggctagatactttttttttttaatctggacttagccaagtatatttcaccatgttaaaatacagtatctttgttattaaaaattaaattgcataatt

SEQ ID NO: 439667 - DNA, 2261 bp, Homo sapiens
aaagttcagatttttaatttgagagggtttttatttcatggaggcagtgttaactaaaattaagcttagatttagctcctgtattattcataatatgagaaattttattaaaggcagactttggtaaaagtgccaacacacttacttgtatagaaaagacttcattctatgggatttatataagtaagtgctttctctatattcaaaatatttcataaggacctgtggtttttttccccttaaaaagcaactctaggccgggcacagtggctcatgcctgtaatcccagcactttgggaggccaaggcaggtggatcacttgaggtcaggagttcgagaccagctggttaacatggtgaaaccccatctctactaaaaatacaaaaattagccaggtgtggtggcacgcgcctgtaatcccagctacatgggaggttgaggcaggagaatctcttgaacccaggaggtggaggttgcagtgagccgcaattacaccactgcactccagcctgggtgacacagcgagtctccatctccaaaaaaaattcaactcttggtcttgtttctcagcacttagtttattgttattagaatttagccatacagccaactttgacaaaatgggtcacagaacaagcatgtacatcaagaggaagttccatatcccccttgtaccatttctccttgggaactcatgctatgggctaccttaaaggtaaaactcatcttatggagtctttctgataggtcactaggtaaaactccttggatagggtgaaaatggatgcacactctattacatactctggtttatcataaggaattttccagaaagctaagctttatactaataagatattggttggtagtaggaacttcaaaaatgaatgagtttgccataactttaattttctggattagaaacacaaaacttgaaatgcaattatcaatattttgtaatatatattcctacagtttgggtagaaataaggaacatgtctgctagatctggtttatgaaaaagtgaaaaatattaaatacaccagagactcaaaccctttcaaggcacacaataactgttctggatttacctgacaaacctagttgagtagcattttgacagaaaatatcagactgaaagttcattcaaatgtacttaaatgtacaatacagtgttcaatagtttttattgcagtgatgtttttccaataatttaagtaattctcttcctagtataatacagttttcataaataatgtttacttgctttctttatattttcaaataaaattaaaatgctcgagcacttcctttcagaaagttatatgcccctttttctataattccaaactgagactgatttttcagagatttttaactttaataattttaaatctagaatcaagtgaaacagatatgttaaatactgagtctagttttcttccatcttatggagcttcatggaataagaaactaatctagtgcaaatgaagattaaatatttctgggtgatggagagatagtcaacaaatttatttatccatcctctgcacatcagtccactggagcaggagttctacacattaaaaatgtaatgggatcagcctagcattgtttggtgttcttttgttgtattttttagaatgggggtgggggcctaagtgtccttatgaagctgtggtccacgacaggagcttgttgggggagtaccagggttctgctgctttcctgcatctgagcaacacaacagagatcatcagttttaaatagagtagccctcacaatcaaaatatcatagaatatattgtaaagttatgttgctaattttcctttgaaatataaaatattttaagctttttgtcaaaagtggtaacatcttaatacaaataaaaacctttttgtggttgtaagatttagcttataaatcattcaaattgaagtgaaagaattaccaggtcattgttaatgacttagtctattaagaatatatgtatttttgtaaaggaaaagcacttgtagatatttaatcagtacaagatatgtcttttgcagaaataaaatgctgcttagagattctccttaaatattttttatttttgtgctcaaatgtattttctgttgatctatggaatgttctgtacaaagctgtataattgtactgttgggctagatactttttttttttaatctggacttagccaagtatatttcaccatgttaaaatacagtatctttgttattaaaaattaaattgcataatt

SEQ ID NO: 439668 - DNA, 2394 bp, Homo sapiens
aaagttcagatttttaatttgagagggtttttatttcatggaggcagtgttaactaaaattaagcttagatttagctcctgtattattcataatatgagaaattttattaaaggcagactttggtaaaagtgccaacacacttacttgtatagaaaagacttcattctatgggatttatataagtaagtgctttctctatattcaaaatatttcataaggacctgtggtttttttccccttaaaaagcaactctaggccgggcacagtggctcatgcctgtaatcccagcactttgggaggccaaggcaggtggatcacttgaggtcaggagttcgagaccagctggttaacatggtgaaaccccatctctactaaaaatacaaaaattagccaggtgtggtggcacgcgcctgtaatcccagctacatgggaggttgaggcaggagaatctcttgaacccaggaggtggaggttgcagtgagccgcaattacaccactgcactccagcctgggtgacacagcgagtctccatctccaaaaaaaattcaactcttggtcttgtttctcagcacttagtttattgttattagaatttagccatacagccaactttgacaaaatgggtcacagaacaagcatgtacatcaagaggaagttccatatcccccttgtaccatttctccttgggaactcatgctatgggctaccttaaaggtaaaactcatcttatggagtctttctgataggtcactaggtaaaactccttggatagggtgaaaatggatgcacactctattacatactctggtttatcataaggaattttccagaaagctaagctttatactaataagatattggttggtagtaggaacttcaaaaatgaatgagtttgccataactttaattttctggattagaaacacaaaacttgaaatgcaattatcaatattttgtaatatatattcctacagtttgggtagaaataaggaacatgtctgctagatctggtttatgaaaaagtgaaaaatattaaatacaccagagactcaaaccctttcaaggcacacaataactgttctggatttacctgacaaacctagttgagtagcattttgacagaaaatatcagactgaaagttcattcaaatgtacttaaatgtacaatacagtgttcaatagtttttattgcagtgatgtttttccaataatttaagtaattctcttcctagtataatacagttttcataaataatgtttacttgctttctttatattttcaaataaaattaaaatgctcgagcacttcctttcagaaagttataaaattaaaaataattattttaaatgctcattcaaatgtgtctgtatacttgctatgcccctttttctataattccaaactgagactgatttttcagagatttttaactttaataattttaaatctagaatcaagtgaaacagatatgttaaatactgagtctagttttcttccatcttatggagcttcatggaataagaaactaatctagtgcaaatgaagattaaatatttctgggtgatggagagatagtcaacaaatttatttatccatcctctgcacatcagtccactggagcaggagttctacacattaaaaatgtaatgggatcagcctagcattgtttggtgttcttttgttgtattttttagaatgggggtgggggcctaagtgtccttatgaagctgtggtccacgacaggagcttgttgggggagtaccagggttctgctgctttcctgcatctgagcaacacaacagagatcatcagttttaaatagagtagccctcacaatcaaaatatcatagaatatattgtaaagttatgttgctaattttcctttgaaatataaaatattttaagctttttgtcaaaagtggtaacatcttaatacaaataaaaacctttttgtggttgtaagatttagcttataaatcattcaaattgaagtgaaagaattaccaggtcattgttaatgacttagtctattaagaatatatgtatttttgtaaaggaaaagcacttgtagatatttaatcagtacaagatatgtcttttgcagaaataaaatgctgcttagagattctccttaaatattttttatttttgtgctcaaatgtattttctgttgatctatggaatgttctgtacaaagctgtataattgtactgttgggctagatactttttttttttaatctggacttagccaagtatatttcaccatgttaaaatacagtatctttgttattaaaaattaaattgcataatttattattgtttgtcatctttaatattagtcactgtagattgcagccttcattaaaaatatctcctttaagtactagtcc

SEQ ID NO: 439669 - DNA, 1240 bp, Homo sapiens
agaaccctcccgacccccgcgggcccccattggccggcccgctacccagccctctccgccacttccctcgcttctgaccatagtttgcggggaagggagcgagcgcgtcgaaaaccaaggaacgtgcgcgctgacgtcacggttgaggctcggagctgaggggccgcggagggcgtggcctgcgggcggttataaagaggcagtggtgcgcgcgcggccggctcagtgctgccgggcaccggggcggcgggttggtctacgctgtgcgcggcggacgtcggaggcagcggggagcggagcggggccgccggggcctctccagggccgcagcggcagcagttgggccccccgccccggccggcggaccgaagaacgcaggaagggggccggggggacccgcccccggccggccgcagccatgaactccaacgtggagaacctacccccgcacatcatccgcctggtgtacaaggaggtgacgacactgaccgcagacccacccgatggcatcaaggtctttcccaacgaggaggacctcaccgacctccaggtcaccatcgagggccctgaggggaccccatatgctggaggtctgttccgcatgaaactcctgctggggaaggacttccctgcctccccacccaagggctacttcctgaccaagatcttccacccgaacgtgggcgccaatggcgagatctgcgtcaacgtgctcaagagggactggacggctgagctgggcatccgacacgtactgctgaccatcaagtgcctgctgatccaccctaaccccgagtctgcactcaacgaggaggcgggccgcctgctcttggagaactacgaggagtatgcagctcgggcccgtctgctcacagagatccacgggggcgccggcgggcccagcggcagggccgaagccggtcgggccctggccagtggcactgaagcttcctccaccgaccctggggccccagggggcccgggaggggctgagggtcccatggccaagaagcatgctggcgagcgcgataagaagctggcggccaagaaaaagacggacaagaagcgggcgctgcggcggctgtagtgggctctcttcctccttccaccgtgaccccaacctctcctgtcccctccctccaactctgtctctaagttatttaaattatggctggggtcggggagggtacagggggcactgggacctggatttgtttttctaaataaagttggaaaagca

SEQ ID NO: 439670 - DNA, 1027 bp, Homo sapiens
acagttgcaacagcaggtttataaagaggcagtactatacggttctaaggtagcgaggcggggcggcgggttggtctacgctgtgcgcggcggacgtcggaggcagcggggagcggagcggggccgccggggcctctccagggccgcagcggcagcagttgggccccccgccccggccggcggaccgaagaacgcaggaagggggccggggggacccgcccccggccggccgcagccatgaactccaacgtggagaacctacccccgcacatcatccgcctggtgtacaaggaggtgacgacactgaccgcagacccacccgatggcatcaaggtctttcccaacgaggaggacctcaccgacctccaggtcaccatcgagggccctgaggggaccccatatgctggaggtctgttccgcatgaaactcctgctggggaaggacttccctgcctccccacccaagggctacttcctgaccaagatcttccacccgaacgtgggcgccaatggcgagatctgcgtcaacgtgctcaagagggactggacggctgagctgggcatccgacacgtactgctgaccatcaagtgcctgctgatccaccctaaccccgagtctgcactcaacgaggaggcgggccgcctgctcttggagaactacgaggagtatgcagctcgggcccgtctgctcacagagatccacgggggcgccggcgggcccagcggcagggccgaagccggtcgggccctggccagtggcactgaagcttcctccaccgaccctggggccccagggggcccgggaggggctgagggtcccatggccaagaagcatgctggcgagcgcgatagagtggggcagaaaagagcagaggggctgtgcgtggatggttctctcttcacggaccacttcgtctctcattgttagttaattggggggaggagggggcgttgttattggaaaaaaaaaaaggtttggagagggttttttgtgtttttttttttaaatggtctttttttttttcggg

SEQ ID NO: 439671 - DNA, 1206 bp, Homo sapiens
agaaccctcccgacccccgcgggcccccattggccggcccgctacccagccctctccgccacttccctcgcttctgaccatagtttgcggggaagggagcgagcgcgtcgaaaaccaaggaacgtgcgcgctgacgtcacggttgaggctcggagctgaggggccgcggagggcgtggcctgcgggcggttataaagaggcagtggtgcgcgcgcggccggctcagtgctgccgggcaccggggcggcgggttggtctacgctgtgcgcggcggacgtcggaggcagcggggagcggagcggggccgccggggcctctccagggccgcagcggcagcagttgggccccccgccccggccggcggaccgaagaacgcaggaagggggccggggggacccgcccccggccggccgcagccatgaactccaacgtggagaacctacccccgcacatcatccgcctggtgtacaaggaggtgacgacactgaccgcagacccacccgatggcatcaaggtctttcccaacgaggaggacctcaccgacctccaggtcaccatcgagggccctgaggggaccccatatgctggaggtctgttccgcatgaaactcctgctggggaaggacttccctgcctccccacccaagggctacttcctgaccaagatcttccacccgaacgtgggcgccaatggcgagatctgcgtcaacgtgctcaagagggactggacggctgagctgggcatccgacacgtactgctgaccatcaagtgcctgctgatccaccctaaccccgacgggcccgtctgctcacagagatccacgggggcgccggcgggcccagcggcagggccgaagccggtcgggccctggccagtggcactgaagcttcctccaccgaccctggggccccagggggcccgggaggggctgagggtcccatggccaagaagcatgctggcgagcgcgataagaagctggcggccaagaaaaagacggacaagaagcgggcgctgcggcggctgtagtgggctctcttcctccttccaccgtgaccccaacctctcctgtcccctccctccaactctgtctctaagttatttaaattatggctggggtcggggagggtacagggggcactgggacctggatttgtttttctaaataaagttggaaaagcataaagttggaaaagcagcttctgtgtc

SEQ ID NO: 439672 - DNA, 1348 bp, Homo sapiens
  misc_feature (1194)..(1194): n is a, c, g, or t
  misc_feature (1196)..(1196): n is a, c, g, or t
agaaccctcccgacccccgcgggcccccattggccggcccgctacccagccctctccgccacttccctcgcttctgaccatagtttgcggggaagggagcgagcgcgtcgaaaaccaaggaacgtgcgcgctgacgtcacggttgaggctcggagctgaggggccgcggagggcgtggcctgcgggcggttataaagaggcagtggtgcgcgcgcggccggctcagtgctgccgggcaccggggcggcgggttggtctacgctgtgcgcggcggacgtcggaggcagcggggagcggagcggggccgccggggcctctccagggccgcagcggcagcagttgggccccccgccccggccggcggaccgaagaacgcaggaagggggccggggggacccgcccccggccggccgcagccatgaactccaacgtggagaacctacccccgcacatcatccgcctggtgtacaaggaggtgacgacactgaccgcagacccacccgatggcatcaaggtctttcccaacgaggaggacctcaccgacctccaggtcaccatcgagggccctgaggggaccccatatgctggaggtctgttccgcatgaaactcctgctggggaaggacttccctgcctccccacccaagggctacttcctgaccaagatcttccacccgaacgtgggcgccaatggcgagatctgcgtcaacgtgctcaagagggactggacggctgagctgggcatccgacacgtactgctgaccatcaagtgcctgctgatccaccctaaccccgagtctgcactcaacgaggaggcgggccgcctgctcttggagaactacgaggagtatgcagctcgggcccgtctgctcacagagatccacgggggcgccggcgggcccagcggcagggccgaagccggtcgggccctggccagtggcactgaagcttcctccaccgaccctggggccccagggggcccgggaggggctgagggtcccatggccaagaagcatgctggcgagcgcgataagaagctggcggccaagaaaaagacggacaagaagcgggcgctgcggcggctgtagtgggctctcttcctccttccaccgtgaccccaacctctcctgtcccctccctccaactctgtctctaagttatttaaattatggctgggccgggaggtacggggccngncctgatggtttagaaagagtgaaggataataataaacaagaaacaaaagaataaaagtatacaaagacgtaatgtgggagagatgagggtaataaacttaaaagcgcattatagacagatattagaaggtggaagatgagaatgtaatcgaa

SEQ ID NO: 439673 - DNA, 1263 bp, Homo sapiens
  misc_feature (1257)..(1257): n is a, c, g, or t
agaaccctcccgacccccgcgggcccccattggccggcccgctacccagccctctccgccacttccctcgcttctgaccatagtttgcggggaagggagcgagcgcgtcgaaaaccaaggaacgtgcgcgctgacgtcacggttgaggctcggagctgaggggccgcggagggcgtggcctgcgggcggttataaagaggcagtggtgcgcgcgcggccggctcagtgctgccgggcaccggggcggcgggttggtctacgctgtgcgcggcggacgtcggaggcagcggggagcggagcggggccgccggggcctctccagggccgcagcggcagcagttgggccccccgccccggccggcggaccgaagaacgcaggaagggggccggggggacccgcccccggccggccgcagccatgaactccaacgtggagaacctacccccgcacatcatccgcctggtgtacaaggaggtgacgacactgaccgcagacccacccgatggcatcaaggtctttcccaacgaggaggacctcaccgacctccaggtcaccatcgagggccctgaggggaccccatatgctggaggtctgttccgcatgaaactcctgctggggaaggacttccctgcctccccacccaagggctacttcctgaccaagatcttccacccgaacgtgggcgccaatggcgagatctgcgtcaacgtgctcaagagggactggacggctgagctgggcatccgacacgtactgctgaccatcaagtgcctgctgatccaccctaaccccgagtctgcactcaacgaggaggcgggccgcctgctcttggagaactacgaggagtatgcagctcgggcccgtctgctcacagagatccacgggggcgccggcgggcccagcggcagggccgaagccggtcgggccctggccagtggcactgaagcttcctccaccgaccctggggccccagggggcccgggaggggctgagggtcccatggccaagaagcatgctggcgagcgcgataagaagctggcggccaagaagctcctggctgaccaggctgaggcccgcaggtctaagaccaaggaagcacgcaagcgccgtgaagagcgcctccaggccaagaaggaggagatcatcaagactttatccaaggaggaagagaccaagaaataaaacctcccactttgtctgtacacactggcctctgtgattacatcgctcagccattaaaataaaacaagccattnaaaaaa

SEQ ID NO: 439674 - DNA, 1491 bp, Homo sapiens
acagttgcaacagcaggtttataaagaggcagtactatacggttctaaggtagcgaggcggggcggcgggttggtctacgctgtgcgcggcggacgtcggaggcagcggggagcggagcggggccgccggggcctctccagggccgcagcggcagcagttgggccccccgccccggccggcggaccgaagaacctacccccgcacatcatccgcctggtgtacaaggaggtgacgacactgaccgcagacccacccgatggcatcaaggtctttcccaacgaggaggacctcaccgacctccaggtcaccatcgagggccctgaggggaccccatatgctggaggtctgttccgcatgaaactcctgctggggaaggacttccctgcctccccacccaagggctacttcctgaccaagatcttccacccgaacgtgggcgccaatggcgagatctgcgtcaacgtgctcaagagggactggacggctgagctgggcatccgacacgtactgctgaccatcaagtgcctgctgatccaccctaaccccgagtctgcactcaacgaggaggcgggccgcctgctcttggagaactacgaggagtatgcagctcgggcccgtctgctcacagagatccacgggggcgccggcgggcccagcggcagggccgaagccggtcgggccctggccagtggcactgaagcttcctccaccgaccctggggccccagggggcccgggaggggctgagggtcccatggccaagaagcatgctggcgagcgcgataagaagctggcggccaagaaaaagacggacaagaagcgggcgctgcggcggctgtagtgggctctcttcctccttccaccgtgaccccaacctctcctgtcccctccctccaactctgtctctaagttatttaaattatggctggggtcggggagggtacagggggcactgggacctggatttgtttttctaaataaagttggaaaagcaaaaaaaaaaaaaaaaaaaaaaaaaaaaaaaaaaaaaaaaaaaaaaaaaaaaaaaaaaaataaaaaaaaaaaaaaaaaaaaaaaaagaaaaaaaagaagaacaaaaacaacaaaaagaaacgaaaagaagcaaagagggcgcgccggcagcagagatcagctacctgacccaaaaagagagaggcgcggagcccaccaaggaccgccacgaaccagcatgttaatattaacagagagaggaaagagccgcacaaaaaagaacgaaagcaaacgacaaatattattgaatcgacgtcgaggaaggtagagtgaggagggtagagacgttagaataaaataaaataagaggaagacggggtgtgaggaagagagagagagatgcaactccattatgaggtagcgagagagcggtggggacaataaagaatcaggagagaagaagaaaaaaggacgagaatcagatgatattagagagagtgaggcgaggaagagacgaaa

SEQ ID NO: 439675 - DNA, 994 bp, Homo sapiens
acagttgcaacagcaggtttataaagaggcagtactatacggttctaaggtagcgaggcggggcggcgggttggtctacgctgtgcgcggcggacgtcggaggcagcggggagcggagcggggccgccggggcctctccagggccgcagcggcagcagttgggccccccgccccggccggcggaccgaagaacctacccccgcacatcatccgcctggtgtacaaggaggtgacgacactgaccgcagacccacccgatggcatcaaggtctttcccaacgaggaggacctcaccgacctccaggtcaccatcgagggccctgaggggaccccatatgctggaggtctgttccgcatgaaactcctgctggggaaggacttccctgcctccccacccaagggctacttcctgaccaagatcttccacccgaacgtgggcgccaatggcgagatctgcgtcaacgtgctcaagagggactggacggctgagctgggcatccgacacgtactgctgaccatcaagtgcctgctgatccaccctaaccccgagtctgcactcaacgaggaggcgggccgcctgctcttggagaactacgaggagtatgcagctcgggcccgtctgctcacagagatccacgggggcgccggcgggcccagcggcagggccgaagccggtcgggccctggccagtggcactgaagcttcctccaccgaccctggggccccagggggcccgggaggggctgagggtcccatggccaagaagcatgctggcgagcgcgataagaagctggcggccaagaaaaagacggacaagaagcgggcgctgcggcggctgtagtgggctctcttcctccttccaccgtgaccccaacctctcctgtcccctccctccaactctgtctctaagttatttaaattatggctggggtcggggagggtacagggggcactgggacctggatttgtttttctaaataaagttggaaaagca

SEQ ID NO: 439676 - DNA, 1682 bp, Homo sapiens
agaaccctcccgacccccgcgggcccccattggccggcccgctacccagccctctccgccacttccctcgcttctgaccatagtttgcggggaagggagcgagcgcgtcgaaaaccaaggaacgtgcgcgctgacgtcacggttgaggctcggagctgaggggccgcggagggcgtggcctgcgggcggttataaagaggcagtggtgcgcgcgcggccggctcagtgctgccgggcaccggggcggcgggttggtctacgctgtgcgcggcggacgtcggaggcagcggggagcggagcggggccgccggggcctctccagggccgcagcggcagcagttgggccccccgccccggccggcggaccgaagaacgcaggaagggggccggggggacccgcccccggccggccgcagccatgaactccaacgtggagaacctacccccgcacatcatccgcctggtgtacaaggaggtgacgacactgaccgcagacccacccgatggcatcaagaggggaccccatatgctggaggtctgttccgcatgaaactcctgctggggaaggacttccctgcctccccacccaagggctacttcctgaccaagatcttccacccgaacgtgggcgccaatggcgagatctgcgtcaacgtgctcaagagggactggacggctgagctgggcatccgacacgtactgctgaccatcaagtgcctgctgatccaccctaaccccgagtctgcactcaacgaggaggcgggccgcctgctcttggagaactacgaggagtatgcagctcgggcccgtctgctcacagagatccacgggggcgccggcgggcccagcggcagggccgaagccggtcgggccctggccagtggcactgaagcttcctccaccgaccctggggccccagggggcccgggaggggctgagggtcccatggccaagaagcatgctggcgagcgcgataagaagctggcggccaagaaaaagacggacaagaagcgggcgctgcggcggctgtagtgggctctcttcctccttccaccgtgaccccaacctctcctgtcccctccctccaactctgtctctaagttatttaaattatggctggggtcggggagggtacagggggcactgggacctggatttgtttttctaaataaagttggaaaagcaaaaaaaaaaaaaaaaaaaaaaaaaaaaaaaaaaaaaaaaaaaaaaaaaaaaaaaaaaaataaaaaaaaaaaaaaaaaaaaaaaaagaaaaaaaagaagaacaaaaacaacaaaaagaaacgaaaagaagcaaagagggcgcgccggcagcagagatcagctacctgacccaaaaagagagaggcgcggagcccaccaaggaccgccacgaaccagcatgttaatattaacagagagaggaaagagccgcacaaaaaagaacgaaagcaaacgacaaatattattgaatcgacgtcgaggaaggtagagtgaggagggtagagacgttagaataaaataaaataagaggaagacggggtgtgaggaagagagagagagatgcaactccattatgaggtagcgagagagcggtggggacaataaagaatcaggagagaagaagaaaaaaggacgagaatcagatgatattagagagagtgaggcgaggaagagacgaaa

SEQ ID NO: 439677 - DNA, 1179 bp, Homo sapiens
agaaccctcccgacccccgcgggcccccattggccggcccgctacccagccctctccgccacttccctcgcttctgaccatagtttgcggggaagggagcgagcgcgtcgaaaaccaaggaacgtgcgcgctgacgtcacggttgaggctcggagctgaggggccgcggagggcgtggcctgcgggcggttataaagaggcagtggtgcgcgcgcggccggctcagtgctgccgggcaccggggcggcgggttggtctacgctgtgcgcggcggacgtcggaggcagcggggagcggagcggggccgccggggcctctccagggccgcagcggcagcagttgggccccccgccccggccggcggaccgaagaacgcaggaagggggccggggggacccgcccccggccggccgcagccatgaactccaacgtggagaacctacccccgcacatcatccgcctggtgtacaaggaggtgacgacactgaccgcagacccacccgatggcatcaaggtctttcccaacgaggaggacctcaccgacctccaggtcaccatcgagggccctgaggggaccccatatgctggaggtctgttccgcatgaaactcctgctggggaaggacttccctgcctccccacccaagggctacttcctgaccaagatcttccacccgaacgtgggcgccaatggcgagatctgcgtcaacgtgctcaagagggactggacggctgagctgggcatccgacacgtactgctgaccatcaagtgcctgctgatccaccctaaccccgacgggcccgtctgctcacagagatccacgggggcgccggcgggcccagcggcagggccgaagccggtcgggccctggccagtggcactgaagcttcctccaccgaccctggggccccagggggcccgggaggggctgagggtcccatggccaagaagcatgctggcgagcgcgataagaagctggcggccaagaaaaagacggacaagaagcgggcgctgcggcggctgtagtgggctctcttcctccttccaccgtgaccccaacctctcctgtcccctccctccaactctgtctctaagttatttaaattatggctggggtcggggagggtacagggggcactgggacctggatttgtttttctaaataaagttggaaaagca

SEQ ID NO: 439678 - DNA, 1118 bp, Homo sapiens
  misc_feature (18)..(18): n is a, c, g, or t
  misc_feature (64)..(64): n is a, c, g, or t
  misc_feature (76)..(76): n is a, c, g, or t
  misc_feature (85)..(85): n is a, c, g, or t
  misc_feature (98)..(98): n is a, c, g, or t
  misc_feature (102)..(103): n is a, c, g, or t
  misc_feature (107)..(107): n is a, c, g, or t
  misc_feature (114)..(114): n is a, c, g, or t
  misc_feature (132)..(132): n is a, c, g, or t
ccctccaccctaatgtcnacggtccgtgtaccaaggtcgtgtccacccgaacggtgggtcccantggcaaagtttncgttaacgngcgtcaatataancgtnnaccncgtgaancgtgatcattcaacacgnacgtgcgtgaccatcaagtgcctgctgatccaccctaaccccgagtctgcactcaacgaggaggcgggccgcctgctcttggagaactacgaggagtatgcagctcgggcccgtctgctcacagagatccacgggggcgccggcgggcccagcggcagggccgaagccggtcgggccctggccagtggcactgaagcttcctccaccgaccctggggccccagggggcccgggaggggctgagggtcccatggccaagaagcatgctggcgagcgcgataagaagctggcggccaagaaaaagacggacaagaagcgggcgctgcggcggctgtagtgggctctcttcctccttccaccgtgaccccaacctctcctgtcccctccctccaactctgtctctaagttatttaaattatggctggggtcggggagggtacagggggcactgggacctggatttgtttttctaaataaagttggaaaagcaaaaaaaaaaaaaaaaaaaaaaaaaaaaaaaaaaaaaaaaaaaaaaaaaaaaaaaaaaaataaaaaaaaaaaaaaaaaaaaaaaaagaaaaaaaagaagaacaaaaacaacaaaaagaaacgaaaagaagcaaagagggcgcgccggcagcagagatcagctacctgacccaaaaagagagaggcgcggagcccaccaaggaccgccacgaaccagcatgttaatattaacagagagaggaaagagccgcacaaaaaagaacgaaagcaaacgacaaatattattgaatcgacgtcgaggaaggtagagtgaggagggtagagacgttagaataaaataaaataagaggaagacggggtgtgaggaagagagagagagatgcaactccattatgaggtagcgagagagcggtggggacaataaagaatcaggagagaagaagaaaaaaggacgagaatcagatgatattagagagagtgaggcgaggaagagacgaaa

SEQ ID NO: 439679 - DNA, 314 bp, Homo sapiens
accgcagacccacccgatggcatcaaggtctttcccaacgaggaggacctcaccgacctccaggtcaccatcgagggccctggtgagtttggaaggaaaaagagaaggggctgctgcttagatcctccatcaccctgctctagatcaccctagcgggaagtacccattacaggctggcctcgtgtcaggtgttgggatgcattggtggacagggcaggacgccacaaatgacaattatgtactcttttcccacaagggttgagaaatatctggtcattgagttagtatatcatgggacggtactctagatttga

SEQ ID NO: 439680 - DNA, 675 bp, Homo sapiens
aattaggctagtagggccggtggtgaatcggccgaggtgacactcctgctggggaaggacttccctgcctccccacccaagggctacttcctgaccaagatcttccacccgaacgtgggcgccaatggcgagatctgcgtcaacgtgctcaagagggactggacggctgagctgggcatccgacacgtactgctgaccatcaagtgcctgctgatccaccctaaccccgagtctgcactcaacgaggaggcgggccgcctgctcttggagaactacgaggagtatgcagctcgggcccgtctgctcacagagatccacgggggcgccggcgggcccagcggcagggccgaagccggtcgggccctggccagtggcactgaagcttcctccaccgaccctggggccccagggggcccgggaggggctgagggtcccatggccaagaagcatgctggcgagcgcgataagaagctggcggccaagaaaaagacggacaagaagcgggcgctgcggcggctgtagtgggctctcttcctccttccaccgtgaccccaacctctcctgtcccctccctccaactctgtctctaagttatttaaattatggctggggtcggggagggtacagggggcactgggacctggatttgtttttctaaataaagttggaaaagca

SEQ ID NO: 439681 - DNA, 1737 bp, Homo sapiens
agaaccctcccgacccccgcgggcccccattggccggcccgctacccagccctctccgccacttccctcgcttctgaccatagtttgcggggaagggagcgagcgcgtcgaaaaccaaggaacgtgcgcgctgacgtcacggttgaggctcggagctgaggggccgcggagggcgtggcctgcgggcggttataaagaggcagtggtgcgcgcgcggccggctcagtgctgccgggcaccggggcggcgggttggtctacgctgtgcgcggcggacgtcggaggcagcggggagcggagcggggccgccggggcctctccagggccgcagcggcagcagttgggccccccgccccggccggcggaccgaagaacgcaggaagggggccggggggacccgcccccggccggccgcagccatgaactccaacgtggagaacctacccccgcacatcatccgcctggtgtacaaggaggtgacgacactgaccgcagacccacccgatggcatcaaggtctttcccaacgaggaggacctcaccgacctccaggtcaccatcgagggccctgaggggaccccatatgctggaggtctgttccgcatgaaactcctgctggggaaggacttccctgcctccccacccaagggctacttcctgaccaagatcttccacccgaacgtgggcgccaatggcgagatctgcgtcaacgtgctcaagagggactggacggctgagctgggcatccgacacgtactgctgaccatcaagtgcctgctgatccaccctaaccccgagtctgcactcaacgaggaggcgggccgcctgctcttggagaactacgaggagtatgcagctcgggcccgtctgctcacagagatccacgggggcgccggcgggcccagcggcagggccgaagccggtcgggccctggccagtggcactgaagcttcctccaccgaccctggggccccagggggcccgggaggggctgagggtcccatggccaagaagcatgctggcgagcgcgataagaagctggcggccaagaaaaagacggacaagaagcgggcgctgcggcggctgtagtgggctctcttcctccttccaccgtgaccccaacctctcctgtcccctccctccaactctgtctctaagttatttaaattatggctggggtcggggagggtacagggggcactgggacctggatttgtttttctaaataaagttggaaaagcaaaaaaaaaaaaaaaaaaaaaaaaaaaaaaaaaaaaaaaaaaaaaaaaaaaaaaaaaaaataaaaaaaaaaaaaaaaaaaaaaaaagaaaaaaaagaagaacaaaaacaacaaaaagaaacgaaaagaagcaaagagggcgcgccggcagcagagatcagctacctgacccaaaaagagagaggcgcggagcccaccaaggaccgccacgaaccagcatgttaatattaacagagagaggaaagagccgcacaaaaaagaacgaaagcaaacgacaaatattattgaatcgacgtcgaggaaggtagagtgaggagggtagagacgttagaataaaataaaataagaggaagacggggtgtgaggaagagagagagagatgcaactccattatgaggtagcgagagagcggtggggacaataaagaatcaggagagaagaagaaaaaaggacgagaatcagatgatattagagagagtgaggcgaggaagagacgaaa

SEQ ID NO: 439682 - DNA, 1282 bp, Homo sapiens
agaaccctcccgacccccgcgggcccccattggccggcccgctacccagccctctccgccacttccctcgcttctgaccatagtttgcggggaagggagcgagcgcgtcgaaaaccaaggaacgtgcgcgctgacgtcacggttgaggctcggagctgaggggccgcggagggcgtggcctgcgggcggttataaagaggcagtggtgcgcgcgcggccggctcagtgctgccgggcaccggggcggcgggttggtctacgctgtgcgcggcggacgtcggaggcagcggggagcggagcggggccgccggggcctctccagggccgcagcggcagcagttgggccccccgccccggccggcggaccgaagaacgcaggaagggggccggggggacccgcccccggccggccgcagccatgaactccaacgtggagaacctacccccgcacatcatccgcctggtgtacaaggaggtgacgacactgaccgcagacccacccgatggcatcaaggtctttcccaacgaggaggacctcaccgacctccaggtcaccatcgagggccctgaggggaccccatatgctggaggtctgttccgcatgaaactcctgctggggaaggacttccctgcctccccacccaagggctacttcctgaccaagatcttccacccgaacgtgggcgccaatggcgagatctgcgtcaacgtgctcaagagggactggacggctgagctgggcatccgacacgtactgctgaccatcaagtgcctgctgatccaccctaaccccgagtctgcactcaacgaggaggcgggccgcctgctcttggagaactacgaggagtatgcagctcgggcccgtctgctcacagagatccacgggggcgccggcgggcccagcggcagggccgaagccggtcgggccctggccagtggcactgaagcttcctccaccgaccctggggccccagggggcccgggaggggctgagggtcccatggccaagaagcatgctggcgagcgcgataagaagctggcggccaagaaaaagacggacaagaagcgggcgctgcggggtgaagggtctcttctcttcacgtgaccaacttctgtccctcatcaatcgctcaaaattaaatatggctgggcgggaggaacgggccgggaccgcatggtacagaatagtgacggaaaaaataaacgaagaagggcatatccgggaagagaacgacgtatgatccccctctacggaaacccatggtaacggcagattatcaca

SEQ ID NO: 439683 - DNA, 1327 bp, Homo sapiens
cggacgcgtgggtcgacccacgcgtccgcctacccccgcacatcatccgcctggtgtacaaggaggtgacgacactgaccgcagacccacccgatggcatcaaggtctttcccaacgaggaggacctcaccgacctccaggtcaccatcgagggccctgaggggaccccatatgctggaggtctgttccgcatgaaactcctgctggggaaggacttccctgcctccccacccaagggctacttcctgaccaagatcttccacccgaacgtgggcgccaatggcgagatctgcgtcaacgtgctcaagagggactggacggctgagctgggcatccgacacgtactgctgaccatcaagtgcctgctgatccaccctaaccccgagtctgcactcaacgaggaggcgggccgcctgctcttggagaactacgaggagtatgcagctcgggcccgtctgctcacagagatccacgggggcgccggcgggcccagcggcagggccgaagccggtcgggccctggccagtggcactgaagcttcctccaccgaccctggggccccagggggcccgggaggggctgagggtcccatggccaagaagcatgctggcgagcgcgataagaagctggcggccaagaaaaagacggacaagaagcgggcgctgcggcggctgtagtgggctctcttcctccttccaccgtgaccccaacctctcctgtcccctccctccaactctgtctctaagttatttaaattatggctggggtcggggagggtacagggggcactgggacctggatttgtttttctaaataaagttggaaaagcaaaaaaaaaaaaaaaaaaaaaaaaaaaaaaaaaaaaaaaaaaaaaaaaaaaaaaaaaaaataaaaaaaaaaaaaaaaaaaaaaaaagaaaaaaaagaagaacaaaaacaacaaaaagaaacgaaaagaagcaaagagggcgcgccggcagcagagatcagctacctgacccaaaaagagagaggcgcggagcccaccaaggaccgccacgaaccagcatgttaatattaacagagagaggaaagagccgcacaaaaaagaacgaaagcaaacgacaaatattattgaatcgacgtcgaggaaggtagagtgaggagggtagagacgttagaataaaataaaataagaggaagacggggtgtgaggaagagagagagagatgcaactccattatgaggtagcgagagagcggtggggacaataaagaatcaggagagaagaagaaaaaaggacgagaatcagatgatattagagagagtgaggcgaggaagagacgaaa

SEQ ID NO: 439684 - DNA, 1491 bp, Homo sapiens
tgtgcctgcgaggtcgctgtggggcgagagctgggcctggagagctcccctgggagtgctacaggggcgtctgcagacgcccttctccaccgccggcagctggcgactgttcagtcactggcgagaagggagtgtgggtctgaacagcttggttgcggaaaacttcggggtctacaaacgcaggcggcgagctgacgccaaatgatgcttgctttgctggcgaggtgggtagatgacactgaccgcagacccacccgatggcatcaaggtctttcccaacgaggaggacctcaccgacctccaggtcaccatcgagggccctgaggggaccccatatgctggaggtctgttccgcatgaaactcctgctggggaaggacttccctgcctccccacccaagggctacttcctgaccaagatcttccacccgaacgtgggcgccaatggcgagatctgcgtcaacgtgctcaagagggactggacggctgagctgggcatccgacacgtactgctgaccatcaagtgcctgctgatccaccctaaccccgagtctgcactcaacgaggaggcgggccgcctgctcttggagaactacgaggagtatgcagctcgggcccgtctgctcacagagatccacgggggcgccggcgggcccagcggcagggccgaagccggtcgggccctggccagtggcactgaagcttcctccaccgaccctggggccccagggggcccgggaggggctgagggtcccatggccaagaagcatgctggcgagcgcgataagaagctggcggccaagaaaaagacggacaagaagcgggcgctgcggcggctgtagtgggctctcttcctccttccaccgtgaccccaacctctcctgtcccctccctccaactctgtctctaagttatttaaattatggctggggtcggggagggtacagggggcactgggacctggatttgtttttctaaataaagttggaaaagcaaaaaaaaaaaaaaaaaaaaaaaaaaaaaaaaaaaaaaaaaaaaaaaaaaaaaaaaaaaataaaaaaaaaaaaaaaaaaaaaaaaagaaaaaaaagaagaacaaaaacaacaaaaagaaacgaaaagaagcaaagagggcgcgccggcagcagagatcagctacctgacccaaaaagagagaggcgcggagcccaccaaggaccgccacgaaccagcatgttaatattaacagagagaggaaagagccgcacaaaaaagaacgaaagcaaacgacaaatattattgaatcgacgtcgaggaaggtagagtgaggagggtagagacgttagaataaaataaaataagaggaagacggggtgtgaggaagagagagagagatgcaactccattatgaggtagcgagagagcggtggggacaataaagaatcaggagagaagaagaaaaaaggacgagaatcagatgatattagagagagtgaggcgaggaagagacgaaa

SEQ ID NO: 439685 - DNA, 1824 bp, Homo sapiens
agaaccctcccgacccccgcgggcccccattggccggcccgctacccagccctctccgccacttccctcgcttctgaccatagtttgcggggaagggagcgagcgcgtcgaaaaccaaggaacgtgcgcgctgacgtcacggttgaggctcggagctgaggggccgcggagggcgtggcctgcgggcggttataaagaggcagtggtgcgcgcgcggccggctcagtgctgccgggcaccggggcggcgggttggtctacgctgtgcgcggcggacgtcggaggcagcggggagcggagcggggccgccggggcctctccagggccgcagcggcagcagttgggccccccgccccggccggcggaccgaagaacgcaggaagggggccggggggacccgcccccggccggccgcagccatgaactccaacgtggagaacctacccccgcacatcatccgcctggtgtacaaggaggtgacgacactgaccgcagacccacccgatggcatcaaggtctttcccaacgaggaggacctcaccgacctccaggtcaccatcgagggccctgaggggaccccatatgctggaggtctgttccgcatgaaactcctgctggggaaggacttccctgcctccccacccaagggctacttcctgaccaagatcttccacccgaacgtgggcgccaatggcgagatctgcgtcaacgtgctcaagagggactggacggctgagctgggcatccgacacgtactgctgctttcctggaaagacaaacagtgccagacccaggacacccaagtactgttgagaagtgcccaggagcaccttactatgcaacgagtgaccatcaagtgcctgctgatccaccctaaccccgagtctgcactcaacgaggaggcgggccgcctgctcttggagaactacgaggagtatgcagctcgggcccgtctgctcacagagatccacgggggcgccggcgggcccagcggcagggccgaagccggtcgggccctggccagtggcactgaagcttcctccaccgaccctggggccccagggggcccgggaggggctgagggtcccatggccaagaagcatgctggcgagcgcgataagaagctggcggccaagaaaaagacggacaagaagcgggcgctgcggcggctgtagtgggctctcttcctccttccaccgtgaccccaacctctcctgtcccctccctccaactctgtctctaagttatttaaattatggctggggtcggggagggtacagggggcactgggacctggatttgtttttctaaataaagttggaaaagcaaaaaaaaaaaaaaaaaaaaaaaaaaaaaaaaaaaaaaaaaaaaaaaaaaaaaaaaaaaataaaaaaaaaaaaaaaaaaaaaaaaagaaaaaaaagaagaacaaaaacaacaaaaagaaacgaaaagaagcaaagagggcgcgccggcagcagagatcagctacctgacccaaaaagagagaggcgcggagcccaccaaggaccgccacgaaccagcatgttaatattaacagagagaggaaagagccgcacaaaaaagaacgaaagcaaacgacaaatattattgaatcgacgtcgaggaaggtagagtgaggagggtagagacgttagaataaaataaaataagaggaagacggggtgtgaggaagagagagagagatgcaactccattatgaggtagcgagagagcggtggggacaataaagaatcaggagagaagaagaaaaaaggacgagaatcagatgatattagagagagtgaggcgaggaagagacgaaa

SEQ ID NO: 439686 - DNA, 3638 bp, Homo sapiens
cggggaggggaccggggaagagagggccgagaggcgtgcggcaggggggagggtaggagaaagaagggcccgactgtaggagggcagcggagcattacctcatcccgtgagcctccgcgggcccagagaagaatcttctagggtggagtctccatggtgacgggcgggcccgcccccctgagagcgacgcgagccaatgggaaggccttggggtgacatcatgggctatttttaggggttgactggtagcagataagtgttgagctcgggctggataagggctcagagttgcactgagtgtggctgaagcagcgaggcgggagtggaggtgcgcggagtcaggcagacagacagacacagccagccagccaggtcggcagtatagtccgaactgcaaatcttattttcttttcaccttctctctaactgcccagagctagcgcctgtggctcccgggctggtgtttcgggagtgtccagagagcctggtctccagccgcccccgggaggagagccctgctgcccaggcgctgttgacagcggcggaaagcagcggtacccacgcgcccgccgggggaagtcggcgagcggctgcagcagcaaagaactttcccggctgggaggaccggagacaagtggcagagtcccggagcgaacttttgcaagcctttcctgcgtcttaggcttctccacggcggtaaagaccagaaggcggcggagagccacgcaagagaagaaggacgtgcgctcagcttcgctcgcaccggttgttgaacttgggcgagcgcgagccgcggctgccgggcgccccctccccctagcagcggaggaggggacaagtcgtcggagtccgggcggccaagacccgccgccggccggccactgcagggtccgcactgatccgctccgcggggagagccgctgctctgggaagtgagttcgcctgcggactccgaggaaccgctgcgcccgaagagcgctcagtgagtgaccgcgacttttcaaagccgggtagcgcgcgcgagtcgacaagtaagagtgcgggaggcatcttaattaaccctgcgctccctggagcgagctggtgaggagggcgcagcggggacgacagccagcgggtgcgtgcgctcttagagaaactttccctgtcaaaggctccggggggcgcgggtgtcccccgcttgccagagccctgttgcggccccgaaacttgtgcgcgcagcccaaactaacctcacgtgaagtgacggactgttctatgactgcaaagatggaaacgaccttctatgacgatgccctcaacgcctcgttcctcccgtccgagagcggaccttatggctacagtaaccccaagatcctgaaacagagcatgaccctgaacctggccgacccagtggggagcctgaagccgcacctccgcgccaagaactcggacctcctcacctcgcccgacgtggggctgctcaagctggcgtcgcccgagctggagcgcctgataatccagtccagcaacgggcacatcaccaccacgccgacccccacccagttcctgtgccccaagaacgtgacagatgagcaggagggcttcgccgagggcttcgtgcgcgccctggccgaactgcacagccagaacacgctgcccagcgtcacgtcggcggcgcagccggtcaacggggcaggcatggtggctcccgcggtagcctcggtggcagggggcagcggcagcggcggcttcagcgccagcctgcacagcgagccgccggtctacgcaaacctcagcaacttcaacccaggcgcgctgagcagcggcggcggggcgccctcctacggcgcggccggcctggcctttcccgcgcaaccccagcagcagcagcagccgccgcaccacctgccccagcagatgcccgtgcagcacccgcggctgcaggccctgaaggaggagcctcagacagtgcccgagatgcccggcgagacaccgcccctgtcccccatcgacatggagtcccaggagcggatcaaggcggagaggaagcgcatgaggaaccgcatcgctgcctccaagtgccgaaaaaggaagctggagagaatcgcccggctggaggaaaaagtgaaaaccttgaaagctcagaactcggagctggcgtccacggccaacatgctcagggaacaggtggcacagcttaaacagaaagtcatgaaccacgttaacagtgggtgccaactcatgctaacgcagcagttgcaaacattttgaagagagaccgtcgggggctgaggggcaacgaagaaaaaaaataacacagagagacagacttgagaacttgacaagttgcgacggagagaaaaaagaagtgtccgagaactaaagccaagggtatccaagttggactgggttgcgtcctgacggcgcccccagtgtgcacgagtgggaaggacttggcgcgccctcccttggcgtggagccagggagcggccgcctgcgggctgccccgctttgcggacgggctgtccccgcgcgaacggaacgttggacttttcgttaacattgaccaagaactgcatggacctaacattcgatctcattcagtattaaaggggggagggggagggggttacaaactgcaatagagactgtagattgcttctgtagtactccttaagaacacaaagcggggggagggttggggaggggcggcaggagggaggtttgtgagagcgaggctgagcctacagatgaactctttctggcctgccttcgttaactgtgtatgtacatatatatattttttaatttgatgaaagctgattactgtcaataaacagcttcatgcctttgtaagttatttcttgtttgtttgtttgggtatcctgcccagtgttgtttgtaaataagagatttggagcactctgagtttaccatttgtaataaagtatataatttttttatgttttgtttctgaaaattccagaaaggatatttaagaaaatacaataaactattggaaagtactcccctaacctcttttctgcatcatctgtagatactagctatctaggtggagttgaaagagttaagaatgtcgattaaaatcactctcagtgcttcttactattaagcagtaaaaactgttctctattagactttagaaataaatgtacctgatgtacctgatgctatggtcaggttatactcctcctcccccagctatctatatggaattgcttaccaaaggatagtgcgatgtttcaggaggctggaggaaggggggttgcagtggagagggacagcccactgagaagtcaaacatttcaaagtttggattgtatcaagtggcatgtgctgtgaccatttataatgttagtagaaattttacaataggtgcttattctcaaagcaggaattggtggcagattttacaaaagatgtatccttccaatttggaatcttctctttgacaattcctagataaaaagatggcctttgcttatgaatatttataacagcattcttgtcacaataaatgtattcaaataccaataacagatcttgaattgcttccctttactacttttttcttcccaagttatatactgaagtttttatttttagttgctgaggttaacattgctgcaatctga

SEQ ID NO: 439687 - DNA, 2836 bp, Homo sapiens
cggggaggggaccggggaagagagggccgagaggcgtgcggcaggggggagggtaggagaaagaagggcccgactgtaggagggcagcggagcattacctcatcccgtgagcctccgcgggcccagagaagaatcttctagggtggagtctccatggtgacgggcgggcccgcccccctgagagcgacgcgagccaatgggaaggccttggggtgacatcatgggctatttttaggggttgactggtagcagataagtgttgagctcgggctggataagggctcagagttgcactgagtgtggctgaagcagcgaggcgggagtggaggtgcgcggagtcaggcagacagacagacacagccagccagccaggtcggcagtatagtccgaactgcaaatcttattttcttttcaccttctctctaactgcccagagctagcgcctgtggctcccgggctggtgtttcgggagtgtccagagagcctggtctccagccgcccccgggaggagagccctgctgcccaggcgctgttgacagcggcggaaagcagcggtacccacgcgcccgccgggggaagtcggcgagcggctgcagcagcaaagaactttcccggctgggaggaccggagacaagtggcagagtcccggagcgaacttttgcaagcctttcctgcgtcttaggcttctccacggcggtaaagaccagaaggcggcggagagccacgcaagagaagaaggacgtgcgctcagcttcgctcgcaccggttgttgaacttgggcgagcgcgagccgcggctgccgggcgccccctccccctagcagcggaggaggggacaagtcgtcggagtccgggcggccaagacccgccgccggccggccactgcagggtccgcactgatccgctccgcggggagagccgctgctctgggaagtgagttcgcctgcggactccgaggaaccgctgcgcccgaagagcgctcagtgagtgaccgcgacttttcaaagccgggtagcgcgcgcgagtcgacaagtaagagtgcgggaggcatcttaattaaccctgcgctccctggagcgagctggtgaggagggcgcagcggggacgacagccagcgggtgcgtgcgctcttagagaaactttccctgtcaaaggctccggggggcgcgggtgtcccccgcttgccagagccctgttgcggccccgaaacttgtgcgcgcagcccaaactaacctcacgtgaagtgacggactgttctatgactgcaaagatggaaacgaccttctatgacgatgccctcaacgcctcgttcctcccgtccgagagcggaccttatggctacagtaaccccaagatcctgaaacagagcatgaccctgaacctggccgacccagtggggagcctgaagccgcacctccgcgccaagaactcggacctcctcacctcgcccgacgtggggctgctcaagctggcgtcgcccgagctggagcgcctgataatccagtccagcaacgggcacatcaccaccacgccgacccccacccagttcctgtgccccaagaacgtgacagatgagcaggagggcttcgccgagggcttcgtgcgcgccctggccgaactgcacagccagaacacgctgcccagcgtcacgtcggcggcgcagccggtcaacggggcaggcatggtggctcccgcggtagcctcggtggcagggggcagcggcagcggcggcttcagcgccagcctgcacagcgagccgccggtctacgcaaacctcagcaacttcaacccaggcgcgctgagcagcggcggcggggcgccctcctacggcgcggccggcctggcctttcccgcgcaaccccagcagcagcagcagccgccgcaccacctgccccagcagatgcccgtgcagcacccgcggctgcaggccctgaaggaggagcctcagacagtgcccgagatgcccggcgagacaccgcccctgtcccccatcgacatggagtcccaggagcggatcaaggcggagaggaagcgcatgaggaaccgcatcgctgcctccaagtgccgaaaaaggaagctggagagaatcgcccggctggaggaaaaagtgaaaaccttgaaagctcagaactcggagctggcgtccacggccaacatgctcagggaacaggtggcacagcttaaacagaaagtcatgaaccacgttaacagtgggtgccaactcatgctaacgcagcagttgcaaacattttgaagagagaccgtcgggggctgaggggcaacgaagaaaaaaaataacacagagagacagacttgagaacttgacaagttgcgacggagagaaaaaagaagtgtccgagaactaaagccaagggtatccaagttggactgggttgcgtcctgacggcgcccccagtgtgcacgagtgggaaggacttggcgcgccctcccttggcgtggagccagggagcggccgcctgcgggctgccccgctttgcggacgggctgtccccgcgcgaacggaacgttggacttttcgttaacattgaccaagaactgcatggacctaacattcgatctcattcagtattaaaggggggagggggagggggttacaaactgcaatagagactgtagattgcttctgtagtactccttaagaacacaaagcggggggagggttggggaggggcggcaggagggaggtttgtgagagcgaggctgagcctacagatgaactctttctggcctgccttcgttaactgtgtatgtacatatatatattttttaatttgatgaaagctgattactgtcaataaacagcttcatgcctttgt

SEQ ID NO: 439688 - DNA, 2685 bp, Homo sapiens
cggggaggggaccggggaagagagggccgagaggcgtgcggcaggggggagggtaggagaaagaagggcccgactgtaggagggcagcggagcattacctcatcccgtgagcctccgcgggcccagagaagaatcttctagggtggagtctccatggtgacgggcgggcccgcccccctgagagcgacgcgagccaatgggaaggccttggggtgacatcatgggctatttttaggggttgactggtagcagataagtgttgagctcgggctggataagggctcagagttgcactgagtgtggctgaagcagcgaggcgggagtggaggtgcgcggagtcaggcagacagacagacacagccagccagccaggtcggcagtatagtccgaactgcaaatcttattttcttttcaccttctctctaactgcccagagctagcgcctgtggctcccgggctggtgtttcgggagtgtccagagagcctggtctccagccgcccccgggaggagagccctgctgcccaggcgctgttgacagcggcggaaagcagcggtacccacgcgcccgccgggggaagtcggcgagcggctgcagcagcaaagaactttcccggctgggaggaccggagacaagtggcagagtcccggagcgaacttttgcaagcctttcctgcgtcttaggcttctccacggcggtaaagaccagaaggcggcggagagccacgcaagagaagaaggacgtgcgctcagcttcgctcgcaccggttgttgaacttgggcgagcgcgagccgcggctgccgggcgccccctccccctagcagcggaggaggggacaagtcgtcggagtccgggcggccaagacccgccgccggccggccactgcagggtccgcactgatccgctccgcggggagagccgctgctctgggaagtgagttcgcctgcggactccgaggaaccgctgcgcccgaagagcgctcagtgagtgaccgcgacttttcaaagccgggtagcgcgcgcgagtcgacaagtaagagtgcgggaggcatcttaattaaccctgcgctccctggagcgagctggtgaggagggcgcagcggggacgacagccagcgggtgcgtgcgctcttagagaaactttccctgtcaaaggctccggggggcgcgggtgtcccccgcttgccagagccctgttgcggccccgaaacttgtgcgcgcagcccaaactaacctcacgtgaagtgacggactgttctatgactgcaaagatggaaacgaccttctatgacgatgccctcaacgcctcgttcctcccgtccgagagcggaccttatggctacagtaaccccaagatcctgaaacagagcatgaccctgaacctggccgacccagtggggagcctgaagccgcacctccgcgccaagaactcggacctcctcacctcgcccgacgtggggctgctcaagctggcgtcgcccgagctggagcgcctgataatccagtccagcaacgggcacatcaccaccacgccgacccccacccagttcctgtgccccaagaacgtgacagatgagcaggagggcttcgccgagggcttcgtgcgcgccctggccgaactgcacagccagaacacgctgcccagcgtcacgtcggcggcgcagccggtcaacggggcaggcatggtggctcccgcggtagcctcggtggcagggggcagcggcagcggcggcttcagcgccagcctgcacagcgagccgccggtctacgcaaacctcagcaacttcaacccaggcgcgctgagcagcggcggcggggcgccctcctacggcgcggccggcctggcctttcccgcgcaaccccagcagcagcagcagccgccgcaccacctgccccagcagatgcccgtgcagcacccgcggctgcaggccctgaaggaggagcctcagacagtgcccgagatgcccggcgagacaccgcccctgtcccccatcgacatggagtcccaggagcggatcaaggcggagaggaagcgcatgaggaaccgcatcgctgcctccaagtgccgaaaaaggaagctggagagaatcgcccggctggaggaaaaagtgaaaaccttgaaagctcagaactcggagctggcgtccacggccaacatgctcagggaacaggtggcacagcttaaacagaaagtcatgaaccacgttaacagtgggtgccaactcatgctaacgcagcagttgcaaacattttgaagagagaccgtcgggggctgaggggcaacgaagaaaaaaaataacacagagagacagacttgagaacttgacaagttgcgacggagagaaaaaagaagtgtccgagaactaaagccaagggtatccaagttggactgggttgcgtcctgacggcgcccccagtgtgcacgagtgggaaggacttggcgcgccctcccttggcgtggagccagggagcggccgcctgcgggctgccccgctttgcggacgggctgtccccgcgcgagccaaccgtggactagtagccaaccgtggactagtagccaaccgtggactagtagccaaccgtggactagtagccaaccgtggactagtagccaaccgtggactagtagccaaccgtggactagtagccaaccgtggactagtagccaaccgtggactagtagccaa

SEQ ID NO: 439689 - DNA, 2611 bp, Homo sapiens
cggggaggggaccggggaagagagggccgagaggcgtgcggcaggggggagggtaggagaaagaagggcccgactgtaggagggcagcggagcattacctcatcccgtgagcctccgcgggcccagagaagaatcttctagggtggagtctccatggtgacgggcgggcccgcccccctgagagcgacgcgagccaatgggaaggccttggggtgacatcatgggctatttttaggggttgactggtagcagataagtgttgagctcgggctggataagggctcagagttgcactgagtgtggctgaagcagcgaggcgggagtggaggtgcgcggagtcaggcagacagacagacacagccagccagccaggtcggcagtatagtccgaactgcaaatcttattttcttttcaccttctctctaactgcccagagctagcgcctgtggctcccgggctggtgtttcgggagtgtccagagagcctggtctccagccgcccccgggaggagagccctgctgcccaggcgctgttgacagcggcggaaagcagcggtacccacgcgcccgccgggggaagtcggcgagcggctgcagcagcaaagaactttcccggctgggaggaccggagacaagtggcagagtcccggagcgaacttttgcaagcctttcctgcgtcttaggcttctccacggcggtaaagaccagaaggcggcggagagccacgcaagagaagaaggacgtgcgctcagcttcgctcgcaccggttgttgaacttgggcgagcgcgagccgcggctgccgggcgccccctccccctagcagcggaggaggggacaagtcgtcggagtccgggcggccaagacccgccgccggccggccactgcagggtccgcactgatccgctccgcggggagagccgctgctctgggaagtgagttcgcctgcggactccgaggaaccgctgcgcccgaagagcgctcagtgagtgaccgcgacttttcaaagccgggtagcgcgcgcgagtcgacaagtaagagtgcgggaggcatcttaattaaccctgcgctccctggagcgagctggtgaggagggcgcagcggggacgacagccagcgggtgcgtgcgctcttagagaaactttccctgtcaaaggctccggggggcgcgggtgtcccccgcttgccagagccctgttgcggccccgaaacttgtgcgcgcagcccaaactaacctcacgtgaagtgacggactgttctatgactgcaaagatggaaacgaccttctatgacgatgccctcaacgcctcgttcctcccgtccgagagcggaccttatggctacagtaaccccaagatcctgaaacagagcatgaccctgaacctggccggtgtgcacgagtgggaaggacttggcgcgccctcccttggcgtggagccagggagcggccgcctgcgggctgccccgctttgcggacgggctgtccccgcgcgaacggaacgttggacttttcgttaacattgaccaagaactgcatggacctaacattcgatctcattcagtattaaaggggggagggggagggggttacaaactgcaatagagactgtagattgcttctgtagtactccttaagaacacaaagcggggggagggttggggaggggcggcaggagggaggtttgtgagagcgaggctgagcctacagatgaactctttctggcctgccttcgttaactgtgtatgtacatatatatattttttaatttgatgaaagctgattactgtcaataaacagcttcatgcctttgtaagttatttcttgtttgtttgtttgggtatcctgcccagtgttgtttgtaaataagagatttggagcactctgagtttaccatttgtaataaagtatataatttttttatgttttgtttctgaaaattccagaaaggatatttaagaaaatacaataaactattggaaagtactcccctaacctcttttctgcatcatctgtagatactagctatctaggtggagttgaaagagttaagaatgtcgattaaaatcactctcagtgcttcttactattaagcagtaaaaactgttctctattagactttagaaataaatgtacctgatgtacctgatgctatggtcaggttatactcctcctcccccagctatctatatggaattgcttaccaaaggatagtgcgatgtttcaggaggctggaggaaggggggttgcagtggagagggacagcccactgagaagtcaaacatttcaaagtttggattgtatcaagtggcatgtgctgtgaccatttataatgttagtagaaattttacaataggtgcttattctcaaagcaggaattggtggcagattttacaaaagatgtatccttccaatttggaatcttctctttgacaattcctagataaaaagatggcctttgcttatgaatatttataacagcattcttgtcacaataaatgtattcaaataccaataacagatcttgaattgcttccctttactacttttttcttcccaagttatatactgaagtttttatttttagttgctgaggttaacattgctgcaatctga

SEQ ID NO: 439690 - DNA, 2716 bp, Homo sapiens
cggggaggggaccggggaagagagggccgagaggcgtgcggcaggggggagggtaggagaaagaagggcccgactgtaggagggcagcggagcattacctcatcccgtgagcctccgcgggcccagagaagaatcttctagggtggagtctccatggtgacgggcgggcccgcccccctgagagcgacgcgagccaatgggaaggccttggggtgacatcatgggctatttttaggggttgactggtagcagataagtgttgagctcgggctggataagggctcagagttgcactgagtgtggctgaagcagcgaggcgggagtggaggtgcgcggagtcaggcagacagacagacacagccagccagccaggtcggcagtatagtccgaactgcaaatcttattttcttttcaccttctctctaactgcccagagctagcgcctgtggctcccgggctggtgtttcgggagtgtccagagagcctggtctccagccgcccccgggaggagagccctgctgcccaggcgctgttgacagcggcggaaagcagcggtacccacgcgcccgccgggggaagtcggcgagcggctgcagcagcaaagaactttcccggctgggaggaccggagacaagtggcagagtcccggagcgaacttttgcaagcctttcctgcgtcttaggcttctccacggcggtaaagaccagaaggcggcggagagccacgcaagagaagaaggacgtgcgctcagcttcgctcgcaccggttgttgaacttgggcgagcgcgagccgcggctgccgggcgccccctccccctagcagcggaggaggggacaagtcgtcggagtccgggcggccaagacccgccgccggccggccactgcagggtccgcactgatccgctccgcggggagagccgctgctctgggaagtgagttcgcctgcggactccgaggaaccgctgcgcccgaagagcgctcagtgagtgaccgcgacttttcaaagccgggtagcgcgcgcgagtcgacaagtaagagtgcgggaggcatcttaattaaccctgcgctccctggagcgagctggtgaggagggcgcagcggggacgacagccagcgggtgcgtgcgctcttagagaaactttccctgtcaaaggctccggggggcgcgggtgtcccccgcttgccagagccctgttgcggccccgaaacttgtgcgcgcagcccaaactaacctcacgtgaagtgacggactgttctatgactgcaaagtcatgaaccacgttaacagtgggtgccaactcatgctaacgcagcagttgcaaacattttgaagagagaccgtcgggggctgaggggcaacgaagaaaaaaaataacacagagagacagacttgagaacttgacaagttgcgacggagagaaaaaagaagtgtccgagaactaaagccaagggtatccaagttggactgggttgcgtcctgacggcgcccccagtgtgcacgagtgggaaggacttggcgcgccctcccttggcgtggagccagggagcggccgcctgcgggctgccccgctttgcggacgggctgtccccgcgcgaacggaacgttggacttttcgttaacattgaccaagaactgcatggacctaacattcgatctcattcagtattaaaggggggagggggagggggttacaaactgcaatagagactgtagattgcttctgtagtactccttaagaacacaaagcggggggagggttggggaggggcggcaggagggaggtttgtgagagcgaggctgagcctacagatgaactctttctggcctgccttcgttaactgtgtatgtacatatatatattttttaatttgatgaaagctgattactgtcaataaacagcttcatgcctttgtaagttatttcttgtttgtttgtttgggtatcctgcccagtgttgtttgtaaataagagatttggagcactctgagtttaccatttgtaataaagtatataatttttttatgttttgtttctgaaaattccagaaaggatatttaagaaaatacaataaactattggaaagtactcccctaacctcttttctgcatcatctgtagatactagctatctaggtggagttgaaagagttaagaatgtcgattaaaatcactctcagtgcttcttactattaagcagtaaaaactgttctctattagactttagaaataaatgtacctgatgtacctgatgctatggtcaggttatactcctcctcccccagctatctatatggaattgcttaccaaaggatagtgcgatgtttcaggaggctggaggaaggggggttgcagtggagagggacagcccactgagaagtcaaacatttcaaagtttggattgtatcaagtggcatgtgctgtgaccatttataatgttagtagaaattttacaataggtgcttattctcaaagcaggaattggtggcagattttacaaaagatgtatccttccaatttggaatcttctctttgacaattcctagataaaaagatggcctttgcttatgaatatttataacagcattcttgtcacaataaatgtattcaaataccaataacagatcttgaattgcttccctttactacttttttcttcccaagttatatactgaagtttttatttttagttgctgaggttaacattgctgcaatctga

SEQ ID NO: 439691 - DNA, 2505 bp, Homo sapiens
cggggaggggaccggggaagagagggccgagaggcgtgcggcaggggggagggtaggagaaagaagggcccgactgtaggagggcagcggagcattacctcatcccgtgagcctccgcgggcccagagaagaatcttctagggtggagtctccatggtgacgggcgggcccgcccccctgagagcgacgcgagccaatgggaaggccttggggtgacatcatgggctatttttaggggttgactggtagcagataagtgttgagctcgggctggataagggctcagagttgcactgagtgtggctgaagcagcgaggcgggagtggaggtgcgcggagtcaggcagacagacagacacagccagccagccaggtcggcagtatagtccgaactgcaaatcttattttcttttcaccttctctctaactgcccagagctagcgcctgtggctcccgggctggtgtttcgggagtgtccagagagcctggtctccagccgcccccgggaggagagccctgctgcccaggcgctgttgacagcggcggaaagcagcggtacccacgcgcccgccgggggaagtcggcgagcggctgcagcagcaaagaactttcccggctgggaggaccggagacaagtggcagagtcccggagcgaacttttgcaagcctttcctgcgtcttaggcttctccacggcggtaaagaccagaaggcggcggagagccacgcaagagaagaaggacgtgcgctcagcttcgctcgcaccggttgttgaacttgggcgagcgcgagccgcggctgccgggcgccccctccccctagcagcggaggaggggacaagtcgtcggagtccgggcggccaagacccgccgccggccggccactgcagggtccgcactgatccgctccgcggggagagccgctgctctgggaagtgagttcgcctgcggactccgaggaaccgctgcgcccgaagagcgctcagtgagtgaccgcgacttttcaaagccgggtagcgcgcgcgagtcgacaagtaagagtgcgggaggcatcttaattaaccctgcgctccctggagcgagctggtgaggagggcgcagcggggacgacagccagcgggtgcgtgcgctcttagagaaactttccctgtcaaaggctccggggggcgcgggtgtcccccgcttgccagagccctgttgcggccccgaaacttgtgcgcgcagcccaaactaacctcacgtgaagtgacggactgttctatgactgcaaagatggaaacgaccttctatgacgatgccctcaacgcctcgttccctcccttggcgtggagccagggagcggccgcctgcgggctgccccgctttgcggacgggctgtccccgcgcgaacggaacgttggacttttcgttaacattgaccaagaactgcatggacctaacattcgatctcattcagtattaaaggggggagggggagggggttacaaactgcaatagagactgtagattgcttctgtagtactccttaagaacacaaagcggggggagggttggggaggggcggcaggagggaggtttgtgagagcgaggctgagcctacagatgaactctttctggcctgccttcgttaactgtgtatgtacatatatatattttttaatttgatgaaagctgattactgtcaataaacagcttcatgcctttgtaagttatttcttgtttgtttgtttgggtatcctgcccagtgttgtttgtaaataagagatttggagcactctgagtttaccatttgtaataaagtatataatttttttatgttttgtttctgaaaattccagaaaggatatttaagaaaatacaataaactattggaaagtactcccctaacctcttttctgcatcatctgtagatactagctatctaggtggagttgaaagagttaagaatgtcgattaaaatcactctcagtgcttcttactattaagcagtaaaaactgttctctattagactttagaaataaatgtacctgatgtacctgatgctatggtcaggttatactcctcctcccccagctatctatatggaattgcttaccaaaggatagtgcgatgtttcaggaggctggaggaaggggggttgcagtggagagggacagcccactgagaagtcaaacatttcaaagtttggattgtatcaagtggcatgtgctgtgaccatttataatgttagtagaaattttacaataggtgcttattctcaaagcaggaattggtggcagattttacaaaagatgtatccttccaatttggaatcttctctttgacaattcctagataaaaagatggcctttgcttatgaatatttataacagcattcttgtcacaataaatgtattcaaataccaataacagatcttgaattgcttccctttactacttttttcttcccaagttatatactgaagtttttatttttagttgctgaggttaacattgctgcaatctga

SEQ ID NO: 439692 - DNA, 2035 bp, Homo sapiens
cggggaggggaccggggaagagagggccgagaggcgtgcggcaggggggagggtaggagaaagaagggcccgactgtaggagggcagcggagcattacctcatcccgtgagcctccgcgggcccagagaagaatcttctagggtggagtctccatggtgacgggcgggcccgcccccctgagagcgacgcgagccaatgggaaggccttggggtgacatcatgggctatttttaggggttgactggtagcagataagtgttgagctcgggctggataagggctcagagttgcactgagtgtggctgaagcagcgaggcgggagtggaggtgcgcggagtcaggcagacagacagacacagccagccagccaggtcggcagtatagtccgaactgcaaatcttattttcttttcaccttctctctaactgcccagagctagcgcctgtggctcccgggctggtgtttcgggagtgtccagagaatcgcccggctggaggaaaaagtgaaaaccttgaaagctcagaactcggagctggcgtccacggccaacatgctcagggaacaggtggcacagcttaaacagaaagtcatgaaccacgttaacagtgggtgccaactcatgctaacgcagcagttgcaaacattttgaagagagaccgtcgggggctgaggggcaacgaagaaaaaaaataacacagagagacagacttgagaacttgacaagttgcgacggagagaaaaaagaagtgtccgagaactaaagccaagggtatccaagttggactgggttgcgtcctgacggcgcccccagtgtgcacgagtgggaaggacttggcgcgccctcccttggcgtggagccagggagcggccgcctgcgggctgccccgctttgcggacgggctgtccccgcgcgaacggaacgttggacttttcgttaacattgaccaagaactgcatggacctaacattcgatctcattcagtattaaaggggggagggggagggggttacaaactgcaatagagactgtagattgcttctgtagtactccttaagaacacaaagcggggggagggttggggaggggcggcaggagggaggtttgtgagagcgaggctgagcctacagatgaactctttctggcctgccttcgttaactgtgtatgtacatatatatattttttaatttgatgaaagctgattactgtcaataaacagcttcatgcctttgtaagttatttcttgtttgtttgtttgggtatcctgcccagtgttgtttgtaaataagagatttggagcactctgagtttaccatttgtaataaagtatataatttttttatgttttgtttctgaaaattccagaaaggatatttaagaaaatacaataaactattggaaagtactcccctaacctcttttctgcatcatctgtagatactagctatctaggtggagttgaaagagttaagaatgtcgattaaaatcactctcagtgcttcttactattaagcagtaaaaactgttctctattagactttagaaataaatgtacctgatgtacctgatgctatggtcaggttatactcctcctcccccagctatctatatggaattgcttaccaaaggatagtgcgatgtttcaggaggctggaggaaggggggttgcagtggagagggacagcccactgagaagtcaaacatttcaaagtttggattgtatcaagtggcatgtgctgtgaccatttataatgttagtagaaattttacaataggtgcttattctcaaagcaggaattggtggcagattttacaaaagatgtatccttccaatttggaatcttctctttgacaattcctagataaaaagatggcctttgcttatgaatatttataacagcattcttgtcacaataaatgtattcaaataccaataacagatcttgaattgcttccctttactacttttttcttcccaagttatatactgaagtttttatttttagttgctgaggttaacattgctgcaatctga

SEQ ID NO: 439693 - DNA, 2313 bp, Homo sapiens
cggggaggggaccggggaagagagggccgagaggcgtgcggcaggggggagggtaggagaaagaagggcccgactgtaggagggcagcggagcattacctcatcccgtgagcctccgcgggcccagagaagaatcttctagggtggagtctccatggtgacgggcgggcccgcccccctgagagcgacgcgagccaatgggaaggccttggggtgacatcatgggctatttttaggggttgactggtagcagataagtgttgagctcgggctggataagggctcagagttgcactgagtgtggctgaagcagcgaggcgggagtggaggtgcgcggagtcaggcagacagacagacacagccagccagccaggtcggcagtatagtccgaactgcaaatcttattttcttttcaccttctctctaactgcccagagctagcgcctgtggctcccgggctggtgtttcgggagtgtccagagagcctggtctccagccgcccccgggaggagagccctgctgcccaggcgctgttgacagcggcggaaagcagcggtacccacgcgcccgccgggggaagtcggcgagcggctgcagcagcaaagaactttcccggctgggaggaccggagacaagtggcagagtcccggagcgaacttttgcaagcctttcctgcgtcttaggcttctccacggcggtaaagaccagaaggcggcggagagccacgcaagagaagaaggacgtgcgctcagcttcgctcgcaccggttgttgaacttgggcgagcgcgagccgcggctgccgggcgccccctccccctagcagcggaggaggggacaagtcgtcggagtccgggcggccaagacccgccgccggccggccactgcagggtccgcactgatccgctccgcggggagagccgctgctctgggaagtgagttcgcctgcggactccgaggaaccgctgcgcccgaagagcgctcagtgagtgaccgcgacttttcaaagccgggtagcgcgcgcgagtcgacaagtaagagtgcgggaggcatcttaattaaccctgcgctccctggagcgagctggtgaggagggcgcagcggggacgacagccagcgggtgcgtgcgctcttagagaaactttccctgtcaaaggctccggggggcgcgggtgtcccccgcttgccagagccctgttgcggccccgaaacttgtgcgcgcagcccaaactaacctcacgtgaagtgacggactgttctatgactgcaaagatggaaacgaccttctatgacgatgccctcaacgcctcgttcctcccgtccgagagcggaccttatggctacagtaaccccaagatcctgaaacagagcatgaccctgaacctggccgacccagtggggagcctgaagccgcacctccgcgccaagaactcggacctcctcacctcgcccgacgtggggctgctcaagctggcgtcgcccgagctggagcgcctgataatccagtccagcaacgggcacatcaccaccacgccgacccccacccagttcctgtgccccaagaacgtgacagatgagcaggagggcttcgccgagggcttcgtgcgcgccctggccgaactgcacagccagaacacgctgcccagcgtcacgtcggcggcgcagccggtcaacggggcaggcatggtggctcccgcggtagcctcggtggcagggggcagcggcagcggcggcttcagcgccagcctgcacagcgagccgccggtctacgcaaacctcagcaacttcaacccaggcgcgctgagcagcggcggcggggcgccctcctacggcgcggccggcctggcctttcccgcgcaaccccagcagcagcagcagccgccgcaccacctgccccagcagatgcccgtgcagcacccgcggctgcaggccctgaaggaggagcctcagacagtgcccgagatgcccggcgagacaccgcccctgtcccccatcgacatggagtcccaggagcggatcaaggcggagaggaagcgcatgaggaaccgcatcgctgcctccaagtgccgaaaaaggaagctggagagaatcgcccggctggaggaaaaagtgaaaaccttgaaagctcagaactcggagctggcgtccacggccaacatgctcagggaacaggtggcacagcttaaacagaaagtcatgaaccacgttaacagtgggtgccaactcatgctaacgcagcagttgcaaacattttgaagagagaccgtcgggggcagggactgcttcgtcgacgcggccgcgaatttagtagtagta

SEQ ID NO: 439694 - DNA, 2052 bp, Homo sapiens
cggggaggggaccggggaagagagggccgagaggcgtgcggcaggggggagggtaggagaaagaagggcccgactgtaggagggcagcggagcattacctcatcccgtgagcctccgcgggcccagagaagaatcttctagggtggagtctccatggtgacgggcgggcccgcccccctgagagcgacgcgagccaatgggaaggccttggggtgacatcatgggctatttttaggggttgactggtagcagataagtgttgagctcgggctggataagggctcagagttgcactgagtgtggctgaagcagcgaggcgggagtggaggtgcgcggagtcaggcagacagacagacacagccagccagccaggtcggcagtatagtccgaactgcaaatcttattttcttttcaccttctctctaactgcccagagctagcgcctgtggctcccgggctggtgtttcgggagtgtccagagagcctggtctccagccgcccccgggaggagagccctgctgcccaggcgctgttgacagcggcggaaagcagcggtacccacgcgcccgccgggggaagtcggcgagcggctgcagcagcaaagaactttcccggctgggaggaccggagacaagtggcagagtcccggagcgaacttttgcaagcctttcctgcgtcttaggcttctccacggcggtaaagaccagaaggcggcggagagccacgcaagagaagaaggacgtgcgctcagcttcgctcgcaccggttgttgaacttgggcgagcgcgagccgcggctgccgggcgccccctccccctagcagcggaggaggggacaagtcgtcggagtccgggcggccaagacccgccgccggccggccactgcagggtccgcactgatccgctccgcggggagagccgctgctctgggaagtgagttcgcctgcggactccgaggaaccgctgcgcccgaagagcgctcagtgagtgaccgcgacttttcaaagccgggtagcgcgcgcgagtcgacaagtaagagtgcgggaggcatcttaattaaccctgcgctccctggagcgagctggtgaggagggcgcagcggggacgacagccagcgggtgcgtgcgctcttagagaaactttccctgtcaaaggctccggggggcgcgggtgtcccccgcttgccagagccctgttgcggccccgaaacttgtgcgcgcagcccaaactaacctcacgtgaagtgacggactgttctatgactgcaaagatggaaacgaccttctatgacgatgccctcaacgcctcgttcctcccgtccgagagcggaccttatggctacagtaaccccaagatcctgaaacagagcatgaccctgaacctggccgacccagtggggagcctgaagccgcacctccgcgccaagaactcggacctcctcacctcgcccgacgtggggctgctcaagctggcgtcgcccgagctggagcgcctgataatccagtccagcaacgggcacatcaccaccacgccgacccccacccagttcctgtgccccaagaacgtgacagatgagcaggagggcttcgccgagggcttcgtgcgcgccctggccgaactgcacagccagaacacgctgcccagcgtcacgtcggcggcgcagccggtcaacggggcaggcatggtggctcccgcggtagcctcggtggcagggggcagcggcagcggcggcttcagcgccagcctgcacagcgagccgccggtctacgcaaacctcagcaacttcaacccaggcgcgctgagcagcggcggcggggcgccctcctacggcgcggccggcctggcctttcccgcgcaaccccagcaggagagagagcgcgacactgccagagatgccgtgagcaccggggtgaggcctgagaggagctagaaggccggatgcggagaacgcctggcccatgaatggtccagagggcaggggaagacggtgagacctgtggcaaggcaaaggtgggaacgggggaaggactgacaacggggccgcatctgaggg

SEQ ID NO: 439695 - DNA, 947 bp, Homo sapiens
agtaataaaaagagatggaataatttaaaaaaaaaaaaaaaaaaaaaaaaaaaaaccctgccttcgttaactgtgtatgtacatatatatattttttaatttgatgaaagctgattactgtcaataaacagcttcatgcctttgtaagttatttcttgtttgtttgtttgggtatcctgcccagtgttgtttgtaaataagagatttggagcactctgagtttaccatttgtaataaagtatataatttttttatgttttgtttctgaaaattccagaaaggatatttaagaaaatacaataaactattggaaagtactcccctaacctcttttctgcatcatctgtagatactagctatctaggtggagttgaaagagttaagaatgtcgattaaaatcactctcagtgcttcttactattaagcagtaaaaactgttctctattagactttagaaataaatgtacctgatgtacctgatgctatggtcaggttatactcctcctcccccagctatctatatggaattgcttaccaaaggatagtgcgatgtttcaggaggctggaggaaggggggttgcagtggagagggacagcccactgagaagtcaaacatttcaaagtttggattgtatcaagtggcatgtgctgtgaccatttataatgttagtagaaattttacaataggtgcttattctcaaagcaggaattggtggcagattttacaaaagatgtatccttccaatttggaatcttctctttgacaattcctagataaaaagatggcctttgcttatgaatatttataacagcattcttgtcacaataaatgtattcaaataccaataacagatcttgaattgcttccctttactacttttttcttcccaagttatatactgaagtttttatttttagttgctgaggttaacattgctgcaatctga

SEQ ID NO: 439696 - DNA, 3539 bp, Homo sapiens
  misc_feature (3394)..(3394): n is a, c, g, or t
  misc_feature (3397)..(3398): n is a, c, g, or t
  misc_feature (3422)..(3422): n is a, c, g, or t
  misc_feature (3431)..(3431): n is a, c, g, or t
  misc_feature (3499)..(3499): n is a, c, g, or t
  misc_feature (3521)..(3521): n is a, c, g, or t
cggggaggggaccggggaagagagggccgagaggcgtgcggcaggggggagggtaggagaaagaagggcccgactgtaggagggcagcggagcattacctcatcccgtgagcctccgcgggcccagagaagaatcttctagggtggagtctccatggtgacgggcgggcccgcccccctgagagcgacgcgagccaatgggaaggccttggggtgacatcatgggctatttttaggggttgactggtagcagataagtgttgagctcgggctggataagggctcagagttgcactgagtgtggctgaagcagcgaggcgggagtggaggtgcgcggagtcaggcagacagacagacacagccagccagccaggtcggcagtatagtccgaactgcaaatcttattttcttttcaccttctctctaactgcccagagctagcgcctgtggctcccgggctggtgtttcgggagtgtccagagagcctggtctccagccgcccccgggaggagagccctgctgcccaggcgctgttgacagcggcggaaagcagcggtacccacgcgcccgccgggggaagtcggcgagcggctgcagcagcaaagaactttcccggctgggaggaccggagacaagtggcagagtcccggagcgaacttttgcaagcctttcctgcgtcttaggcttctccacggcggtaaagaccagaaggcggcggagagccacgcaagagaagaaggacgtgcgctcagcttcgctcgcaccggttgttgaacttgggcgagcgcgagccgcggctgccgggcgccccctccccctagcagcggaggaggggacaagtcgtcggagtccgggcggccaagacccgccgccggccggccactgcagggtccgcactgatccgctccgcggggagagccgctgctctgggaagtgagttcgcctgcggactccgaggaaccgctgcgcccgaagagcgctcagtgagtgaccgcgacttttcaaagccgggtagcgcgcgcgagtcgacaagtaagagtgcgggaggcatcttaattaaccctgcgctccctggagcgagctggtgaggagggcgcagcggggacgacagccagcgggtgcgtgcgctcttagagaaactttccctgtcaaaggctccggggggcgcgggtgtcccccgcttgccagagccctgttgcggccccgaaacttgtgcgcgcagcccaaactaacctcacgtgaagtgacggactgttctatgactgcaaagatggaaacgaccttctatgacgatgccctcaacgcctcgttcctcccgtccgagagcggaccttatggctacagtaaccccaagatcctgaaacagagcatgaccctgaacctggccgacccagtggggagcctgaagccgcacctccgcgccaagaactcggacctcctcacctcgcccgacgtggggctgctcaagctggcgtcgcccgagctggagcgcctgataatccagtccagcaacgggcacatcaccaccacgccgacccccacccagttcctgtgccccaagaacgtgacagatgagcaggagggcttcgccgagggcttcgtgcgcgccctggccgaactgcacagccagaacacgctgcccagcgtcacgtcggcggcgcagccggtcaacggggcaggcatggtggctcccgcggtagcctcggtggcagggggcagcggcagcggcggcttcagcgccagcctgcacagcgagccgccggtctacgcaaacctcagcaacttcaacccaggcgcgctgagcagcggcggcggggcgccctcctacggcgcggccggcctggcctttcccgcgcaaccccagcagcagcagcagccgccgcaccacctgccccagcagatgcccgtgcagcacccgcggctgcaggccctgaaggaggagcctcagacagtgcccgagatgcccggcgagacaccgcccctgtcccccatcgacatggagtcccaggagcggatcaaggcggagaggaagcgcatgaggaaccgcatcgctgcctccaagtgccgaaaaaggaagctggagagaatcgcccggctggaggaaaaagtgaaaaccttgaaagctcagaactcggagctggcgtccacggccaacatgctcagggaacaggtggcacagcttaaacagaaagtcatgaaccacgttaacagtgggtgccaactcatgctaacgcagcagttgcaaacattttgaagagagaccgtcgggggctgaggggcaacgaagaaaaaaaataacacagagagacagacttgagaacttgacaagttgcgacggagagaaaaaagaagtgtccgagaactaaagccaagggtatccaagttggactgggttgcgtcctgacggcgcccccagtgtgcacgagtgggaaggacttggcgcgccctcccttggcgtggagccagggagcggccgcctgcgggctgccccgctttgcggacgggctgtccccgcgcgaacggaacgttggacttttcgttaacattgaccaagaactgcatggacctaacattcgatctcattcagtattaaaggggggagggggagggggttacaaactgcaatagagactgtagattgcttctgtagtactccttaagaacacaaagcggggggagggttggggaggggcggcaggagggaggtttgtgagagcgaggctgagcctacagatgaactctttctggcctgccttcgttaactgtgtatgtacatatatatattttttaatttgatgaaagctgattactgtcaataaacagcttcatgcctttgtaagttatttcttgtttgtttgtttgggtatcctgcccagtgttgtttgtaaataagagatttggagcactctgagtttaccatttgtaataaagtatataatttttttatgttttgtttctgaaaattccagaaaggatatttaagaaaatacaataaactattggaaagtactcccctaacctcttttctgcatcatctgtagatactagctatctaggtggagttgaaagagttaagaatgtcgattaaaatcactctcagtgcttcttactattaagcagtaaaaactgttctctattagactttagaaataaatgtacctgatgtacctgatgctatggtcaggttatactcctcctcccccagctatctatatggaattgcttaccaaaggatagtgcgatgtttcaggaggctggaggaaggggggttgcagtggagagggacagcccactgagaagtcaaacatttcaaagtttggattgtatcaagtggcatgtgctgtgaccatttataatgttagtagattcgagcggccgatttttttttttttttnttnnttttttttttgcgaatgagtaacnttatttcantgtggggagcgggccgatgtccagcctcagaacttctggaactgcttcttggtgccggcagccttggngaccttgagcacgttggcgcantgtcttgctcagggccgg

SEQ ID NO: 439697 - DNA, 1881 bp, Homo sapiens
ttgtgtgtttgcagctggtagaggttgcagtgagccgagattgcaccactgcactccagcctgggctcaagtgattttcctgcctcagcctcctgagtagctgggactacagcagcagccgccgcaccacctgccccagcagatgcccgtgcagcacccgcggctgcaggccctgaaggaggagcctcagacagtgcccgagatgcccggcgagacaccgcccctgtcccccatcgacatggagtcccaggagcggatcaaggcggagaggaagcgcatgaggaaccgcatcgctgcctccaagtgccgaaaaaggaagctggagagaatcgcccggctggaggaaaaagtgaaaaccttgaaagctcagaactcggagctggcgtccacggccaacatgctcagggaacaggtggcacagcttaaacagaaagtcatgaaccacgttaacagtgggtgccaactcatgctaacgcagcagttgcaaacattttgaagagagaccgtcgggggctgaggggcaacgaagaaaaaaaataacacagagagacagacttgagaacttgacaagttgcgacggagagaaaaaagaagtgtccgagaactaaagccaagggtatccaagttggactgggttgcgtcctgacggcgcccccagtgtgcacgagtgggaaggacttggcgcgccctcccttggcgtggagccagggagcggccgcctgcgggctgccccgctttgcggacgggctgtccccgcgcgaacggaacgttggacttttcgttaacattgaccaagaactgcatggacctaacattcgatctcattcagtattaaaggggggagggggagggggttacaaactgcaatagagactgtagattgcttctgtagtactccttaagaacacaaagcggggggagggttggggaggggcggcaggagggaggtttgtgagagcgaggctgagcctacagatgaactctttctggcctgccttcgttaactgtgtatgtacatatatatattttttaatttgatgaaagctgattactgtcaataaacagcttcatgcctttgtaagttatttcttgtttgtttgtttgggtatcctgcccagtgttgtttgtaaataagagatttggagcactctgagtttaccatttgtaataaagtatataatttttttatgttttgtttctgaaaattccagaaaggatatttaagaaaatacaataaactattggaaagtactcccctaacctcttttctgcatcatctgtagatactagctatctaggtggagttgaaagagttaagaatgtcgattaaaatcactctcagtgcttcttactattaagcagtaaaaactgttctctattagactttagaaataaatgtacctgatgtacctgatgctatggtcaggttatactcctcctcccccagctatctatatggaattgcttaccaaaggatagtgcgatgtttcaggaggctggaggaaggggggttgcagtggagagggacagcccactgagaagtcaaacatttcaaagtttggattgtatcaagtggcatgtgctgtgaccatttataatgttagtagaaattttacaataggtgcttattctcaaagcaggaattggtggcagattttacaaaagatgtatccttccaatttggaatcttctctttgacaattcctagataaaaagatggcctttgcttatgaatatttataacagcattcttgtcacaataaatgtattcaaataccaataacagatcttgaattgcttccctttactacttttttcttcccaagttatatactgaagtttttatttttagttgctgaggttaacattgctgcaatctga

SEQ ID NO: 439698 - DNA, 2216 bp, Homo sapiens
cggggaggggaccggggaagagagggccgagaggcgtgcggcaggggggagggtaggagaaagaagggcccgactgtaggagggcagcggagcattacctcatcccgtgagcctccgcgggcccagagaagaatcttctagggtggagtctccatggtgacgggcgggcccgcccccctgagagcgacgcgagccaatgggaaggccttggggtgacatcatgggctatttttaggggttgactggtagcagataagtgttgagctcgggctggataagggctcagagttgcactgagtgtggctgaagcagcgaggcgggagtggaggtgcgcggagtcaggcagacagacagacacagccagccagccaggtcggcagtatagtccgaactgcaaatcttattttcttttcaccttctctctaactgcccagagctagcgcctgtggctcccgggctggtgtttcgggagtgtccagagagcctggtctccagccgcccccgggaggagagccctgctgcccaggcgctgttgacagcggcggaaagcagcggtacccacgcgcccgccgggggaagtcggcgagcggctgcagcagcaaagaactttcccggctgggaggaccggagacaagtggcagagtcccggagcgaacttttgcaagcctttcctgcgtcttaggcttctccacggcggtaaagaccagaaggcggcggagagccacgcaagagaagaaggacgtgcgctcagcttcgctcgcaccggttgttgaacttgggcgagcgcgagccgcggctgccgggcgccccctccccctagcagcggaggaggggacaagtcgtcggagtccgggcggccaagacccgccgccggccggccactgcagggtccgcactgatccgctccgcggggagagccgctgctctgggaagtgagttcgcctgcggactccgaggaaccgctgcgcccgaagagcgctcagtgagtgaccgcgacttttcaaagccgggtagcgcgcgcgagtcgacaagtaagagtgcgggaggcatcttaattaaccctgcgctccctggagcgagctggtgaggagggcgcagcggggacgacagccagcgggtgcgtgcgctcttagagaaactttccctgtcaaaggctccggggggcgcgggtgtcccccgcttgccagagccctgttgcggccccgaaacttgtgcgcgcagcccaaactaacctcacgtgaagtgacggactgttctatgactgcaaagatggaaacgaccttctatgacgatgccctcaacgcctcgttcctcccgtccgagagcggaccttatggctacagtaaccccaagatcctgaaacagagcatgaccctgaacctggccgacccagtggggagcctgaagccgcacctccgcgccaagaactcggacctcctcacctcgcccgacgtggggctgctcaagctggcgtcgcccgagctggagcgcctgataatccagtccagcaacgggcacatcaccaccacgccgacccccacccagttcctgtgccccaagaacgtgacagatgagcaggagggcttcgccgagggcttcgtgcgcgccctggccgaactgcacagccagaacacgctgcccagcgtcacgtcggcggcgcagccggtcaacggggcaggcatggtggctcccgcggtagcctcggtggcagggggcagcggcagcggcggcttcagcgccagcctgcacagcgagccgccggtctacgcaaacctcagcaacttcaacccaggcgcgctgagcagcggcggcggggcgccctcctacggcgcggccggcctggcctttcccgcgcaaccccagcagcagcagcagccgccgcaccacctgccccagcagatgcccgtgcagcacccgcggctgcaggccctgaaggaggagcctcagacagtgcccgagatgcccggcgagacaccgcccctgtcccccatcgacatggagtcccaggagcggatcaaggcggagaggaagcgcatgaggaaccgcatcgctgcctccaagtgccgaaaaaggaagctggagagaatcgcccggctggagcagtgcctggcaaccatgcatgctccgcaatcggagctgatccccttgtctcaacaatgtcagggtaccaggagcactgagttctgcacaagtcatatccccatgacaatctctac

SEQ ID NO: 439699 - DNA, 836 bp, Homo sapiens
gcctgcgcggactcccgccttagtgggcggagttgtgccgcgtctgatgcgcagttccctttatagcgcggcaagccgaatcctagaggctaacccggcaggtgggagggagaaagttgctttctgcaccaatagctgaggcgttcagggttgtccagggacgctaccctcacgtgtctggttccgagtgctgcgttcggctgtgctgggaagttgcgtagacagtggcctcgagaccctgcctgcctgaggaggcctcggttggatgcgaaggagctgcagcatccagtgcctctccatgagaccataagctcctgtatgacagaagccatgttctttttagcggcctccgtagcatgatgggacaagatgccaactggcaagcagctagctgacattggctataagaccttctctacctccatgatgcttctcactgtgtatggggggtacctctgcagtgtccgagtctaccactatttccagtggcgcagggcccagcgccaggccgcagaagaacagaagacctcaggaatcatgtagaactggggggctttttctcctgagcagagaggcccaaggcatgctgtggagagacttcacctgccaccatttccaggtcaacaggactagagcgttgatggttttcaaaccctgttggaagaaagtgcccatggtttctctggttctgccagtttgacagtttatggaggcttttgaatcgtaatagcaatgtgagggtgaggtacacctacagacattaaataatttgctgtgaaaaaaaaaacaactaatatagcaaaaaaaaatgttttttggggcgaaaaatttcgccg

SEQ ID NO: 439700 - DNA, 366 bp, Homo sapiens
ctaaattcaatctgtctttgtaggggacaagatgccaactggcaagcagctagctgacattggctataagaccttctctacactgtgtatggggggtacctctgcagtgtccgagtctaccactatttccagtggcgcagggcccagcgccaggccgaatcatgtagaactggggggctttttctcctgagcagagaggcccaaggcatgctgtggagagacttcacctgccaccattagagcgttgatggttttcaaaccctgttggaagaaagtgcccatggtttctctggttctgccagtttgacagtttatggaggcttttgaaggtgaggtacacctacagacattaaataatttgctgtg

SEQ ID NO: 439701 - DNA, 765 bp, Homo sapiens
gcctgcgcggactcccgccttagtgggcggagttgtgccgcgtctgatgcgcagttccctttatagcgcggcaagccgaatcctagaggctaacccggcaggtgggagggagaaagttgctttctgcaccaatagctgaggcgttcagggttgtccagggacgctaccctcacgtgtctggttccgagtgctgcgttcggctgtgctgggaagttgcgtagacagtggcctcgagaccctgcctgcctgaggaggcctcggttggatgcgaaggagctgcagcatccaggcgcggtggctcacgccgtaatcccagcactttgggaggccaaggcgagtggatcacaaggggacaagatgccaactggcaagcagctagctgacattggctataagaccttctctacctccatgatgcttctcactgtgtatggggggtacctctgcagtgtccgagtctaccactatttccagtggcgcagggcccagcgccaggccgcagaagaacagaagacctcaggaatcatgtagaactggggggctttttctcctgagcagagaggcccaaggcatgctgtggagagacttcacctgccaccatttccaggtcaacaggactagagcgttgatggttttcaaaccctgttggaagaaagtgcccatggtttctctggttctgccagtttgacagtttatggaggcttttgaatcgtaatagcaatgtgagggtgaggtacacctacagacattaaataatttgctgtg

SEQ ID NO: 439702 - DNA, 777 bp, Homo sapiens
gcctgcgcggactcccgccttagtgggcggagttgtgccgcgtctgatgcgcagttccctttatagcgcggcaagccgaatcctagaggctaacccggcaggtgggagggagaaagttgctttctgcaccaatagctgaggcgttcagggttgtccagggacgctaccctcacgtgtctggttccgagtgctgcgttcggctgtgctgggaagttgcgtagacagtggcctcgagaccctgcctgcctgaggaggcctcggttggatgcgaaggagctgcagcatccagtgcctctccatgagaccataagctcctgtatgacagaagccatgttctttttagcggcctccgtagcatgatgggacaagatgccaactggcaagcagctagctgacattggctataagaccttctctacctccatgatgcttctcactgtgtatggggggtacctctgcagtgtccgagtctaccactatttccagtggcgcagggcccagcgccaggccgcagaagaacagaagacctcaggaatcatgtagaactggggggctttttctcctgagcagagaggcccaaggcatgctgtggagagacttcacctgccaccatttccaggtcaacaggactagagcgttgatggttttcaaaccctgttggaagaaagtgcccatggtttctctggttctgccagtttgacagtttatggaggcttttgaatcgtaatagcaatgtgagggtgaggtacacctacagacattaaataatttgctgtg

SEQ ID NO: 439703 - DNA, 1243 bp, Homo sapiens
gcctgcgcggactcccgccttagtgggcggagttgtgccgcgtctgatgcgcagttccctttatagcgcggcaagccgaatcctagaggctaacccggcaggtgggagggagaaagttgctttctgcaccaatagctgaggcgttcagggttgtccagggacgctaccctcacgtgtctggttccgagtgctgcgttcggctgtgctgggaagttgcgtagacagtggcctcgagaccctgcctgcctgaggaggcctcggttggatgcgaaggagctgcagcatccaggggacaagatgccaactggcaagcagctagctgacattggctataagaccttctctacctccatgatgcttctcactgtgtatggggggtacctctgcagtgtccgagtctaccactatttccagtggcgcagggcccagcgccaggccgcagaagaacagaagacctcaggaatcatgtagaactggggggctttttctcctgagcagagaggcccaaggcatgctgtggagagacttcacctgccaccatttccaggtcaacaggactagagcgttgatggttttcaaaccctgttggaagaaagtgcccatggtttctctggttctgccagtttgacagtttatggaggcttttgaatcgtaatagcaatgtgagggtgaggtacacctacagacattaaataatttgctgtgaaaaaaaaaaaaaaaaaaaaaaaaaaaaaaaaaaaaaaaaaaaaaaaaaaaaaaaaaaaaaaaaaaaaaaaaaaaaaaaaaaaaacaaaaaaaaacaaaaaaaaagaagtgcggcgagggccgccagaccaccgggcaccaacaaaacacactctaaccacaacaccaagagtgggggcgggccggcccaccacccgatacgaaagaatgccgacaacgggggacgacgtgagtcctgcagcaagagaaccaccccgcgtcgatcacaacaaagtgcggggcggtggtatctacccccaacactaaataaaaacaacggccggcggagcatcgcacacacagggctggttgctgaaaacagcaccaaccacacacgtagggtatgacgtcgaggcgcaacaatcagagggaggctaacaaaacaagaggagtggaccgacaaaggaggccgacaaataaaaaaataacccccgccgcggggggtggataacaaatcagaaatgaagataaaagcacacggacacctgaacggcgaaga

SEQ ID NO: 439704 - DNA, 791 bp, Homo sapiens
gcctgcgcggactcccgccttagtgggcggagttgtgccgcgtctgatgcgcagttccctttatagcgcggcaagccgaatcctagaggctaacccggcaggtgggagggagaaagttgctttctgcaccaatagctgaggcgttcagggttgtccagggacgctaccctcacgtgtctggttccgagtgctgcgttcggctgtgctgggaagttgcgtagacagtggcctcgagaccctgcctgcctgaggaggcctcggttggatgcgaaggagctgcagcatccaggggacaagatgccaactggcaagcagctagctgacattggctataagaccttctctacctccatgatgcttctcactgtgtatggggggtacctctgcagtgtccgagtctaccactatttccagtggcgcagggcccagcgccaggccgcagaagaacagaagacctcaggaatcatgtagaactggggggctttttctcctgagcagagaggcccaaggcatgctgtggagagacttcacctgccaccatttccaggtcaacaggactagagcgttgatggttttcaaaccctgttggaagaaagtgcccatggtttctctggttctgccagtttgacagtttatggaggcttttgaatcgtaatagcaatgtgagggtgaggtacacctacagacattaaataatttgctgtgaaacaaaagggttaccacctcaaatgctggccgaatttcgagctcacttggcccaattgggccctatagggaggccgttttccaat

SEQ ID NO: 439705 - DNA, 735 bp, Homo sapiens
gcctgcgcggactcccgccttagtgggcggagttgtgccgcgtctgatgcgcagttccctttatagcgcggcaagccgaatcctagaggctaacccggcaggtgggagggagaaagttgctttctgcaccaatagctgaggcgttcagggttgtccagggacgctaccctcacgtgtctggttccgagtgctgcgttcggctgtgctgggaagttgcgtagacagtggcctcgagaccctgcctgcctgaggaggcctcggttggatgcgaaggagctgcagcatccaggggacaagatgccaactggcaagcagctagctgacattggctataagaccttctctacctccatgatgcttctcactgtgtatggggggtacctctgcagtgtccgagtctaccactatttccagtggcgcagggcccagcgccaggccgcagaagaacagaagacctcaggaatcatgtagaactggggggctttttctcctgagcagagaggcccaaggcatgctgtggagagacttcacctgccaccatttccaggtcaacaggactagagcgttgatggttttcaaaccctgttggaagaaagtgcccatggtttctctggttctgccagtttgacagtttatggaggcttttgaatcgtaatagcaatgtgagggtgaggtacacctacagacattaaataatttgctgtgaaaaaaaaaagtcgacgcggccgcaattta

SEQ ID NO: 439706 - DNA, 657 bp, Homo sapiens
gcctgcgcggactcccgccttagtgggcggagttgtgccgcgtctgatgcgcagttccctttatagcgcggcaagccgaatcctagaggctaacccggcaggtgggagggagaaagttgctttctgcaccaatagctgaggcgttcagggttgtccagggacgctaccctcacgtgtctggttccgagtgctgcgttcggctgtgctgggaagttgcgtagacagtggcctcgagaccctgcctgcctgaggaggcctcggttggatgcgaaggagctgcagcatccaggggacaagatgccaactggcaagcagctagctgacattggctataagaccttctctacctccatgatgcttctcactgtgtatggggggtacctctgcagtgtccgagtctaccactatttccagtggcgcagggcccagcgccaggcctctcctgagcagagaggcccaaggcatgctgtggagagacttcacctgccaccatttccaggtcaacaggactagagcgttgatggttttcaaaccctgttggaagaaagtgcccatggtttctctggttctgccagtttgacagtttatggaggcttttgaatcgtaatagcaatgtgagggtgaggtacacctacagacattaaataatttgctgtg

SEQ ID NO: 439707 - DNA, 681 bp, Homo sapiens
gcctgcgcggactcccgccttagtgggcggagttgtgccgcgtctgatgcgcagttccctttatagcgcggcaagccgaatcctagaggctaacccggcaggtgggagggagaaagttgctttctgcaccaatagctgaggcgttcagggttgtccagggacgctaccctcacgtgtctggttccgagtgctgcgttcggctgtgctgggaagttgcgtagacagtggcctcgagaccctgcctgcctgaggaggcctcggttggatgcgaaggagctgcagcatccagagactatggaagagagtacctggatctagtttattccaaagacagacaagcagtttgtgcctccactccaggatgactaactacaacgattacacgtaaaaagacaaaacaaggccgggcgcggtggctcacgccgtaatcccagcactttgggaggccaaggcgagtggatcacaaggtgaggagatcaaaaccatcctggctaacacggtgaaaccccatctctactaaaaatacaaaaaattagctgggtgtggtggcgggcgcctgtagtcccagctactcgggaggctgaggcaggagaatggcatgaacctgggaggtggaggttgcagtgagccgagatcgtgccactgcactccagcctgggggacagagtgagactccgtctc

SEQ ID NO: 439708 - DNA, 901 bp, Homo sapiens
gcctgcgcggactcccgccttagtgggcggagttgtgccgcgtctgatgcgcagttccctttatagcgcggcaagccgaatcctagaggctaacccggcaggtgggagggagaaagttgctttctgcaccaatagctgaggcgttcagggttgtccagggacgctaccctcacgtgtctggttccgagtgctgcgttcggctgtgctgggaagttgcgtagacagtggcctcgagaccctgcctgcctgaggaggcctcggttggatgcgaaggagctgcagcatccaggtacgctgccggctagggccgagcaggggctgccagtcccactgcctgcgcgcccacctgggccagtctccgcttgccgcgtcctcccatcccctagtctgcaggcctggtgcccttgaattcacccgcttctgttgcgttgcggaccgcgagctgcactgcttcctgcccaagcccaagctcctcgcagcagtaggggacaagatgccaactggcaagcagctagctgacattggctataagaccttctctacctccatgatgcttctcactgtgtatggggggtacctctgcagtgtccgagtctaccactatttccagtggcgcagggcccagcgccaggccgcagaagaacagaagacctcaggaatcatgtagaactggggggctttttctcctgagcagagaggcccaaggcatgctgtggagagacttcacctgccaccatttccaggtcaacaggactagagcgttgatggttttcaaaccctgttggaagaaagtgcccatggtttctctggttctgccagtttgacagtttatggaggcttttgaatcgtaatagcaatgtgagggtgaggtacacctacagacattaaataatttgctgtg

SEQ ID NO: 439709 - DNA, 737 bp, Homo sapiens
gcctgcgcggactcccgccttagtgggcggagttgtgccgcgtctgatgcgcagttccctttatagcgcggcaagccgaatcctagaggctaacccggcaggtgggagggagaaagttgctttctgcaccaatagctgaggcgttcagggttgtccagggacgctaccctcacgtgtctggttccgagtgctgcgttcggctgtgctgggaagttgcgtagacagtggcctcgagaccctgcctgcctgaggaggcctcggttggatgcgaaggagctgcagcatccaggggacaagatgccaactggcaagcagctagctgacattggctataagaccttctctacctccatgatgcttctcactgtgtatggggggtacctctgcagtgtccgagtctaccactatttccagtggcgcagggcccagcgccaggccgcagaagaacagaagacctcaggaatcatgtagaactggggggctttttctcctgagcagagaggcccaaggcatgctgtggagagacttcacctgccaccatttccaggtcaacaggactagagcgttgatggttttcaaaccctgttggaagaaagtgcccatggtttctctggttctgccagtttgacagtttatggaggcttttgaatcgtaatagcaatgtgagggtgaggtacacctacagacattaaataatttgctgtggctattacgattcaaaagcctccacaaacccg

SEQ ID NO: 439710 - DNA, 953 bp, Homo sapiens
  misc_feature (953)..(953): n is a, c, g, or t
gcctgcgcggactcccgccttagtgggcggagttgtgccgcgtctgatgcgcagttccctttatagcgcggcaagccgaatcctagaggctaacccggcaggtgggagggagaaagttgctttctgcaccaatagctgaggcgttcagggttgtccagggacgctaccctcacgtgtctggttccgagtgctgcgttcggctgtgctgggaagttgcgtagacagtggcctcgagaccctgcctgcctgaggaggcctcggttggatgcgaaggagctgcagcatccaggggacaagatgccaactggcaagcagctagctgacattggctataagaccttctctacctccatgatgcttctcactgtgtatggggggtacctctgcagtgtccgagtctaccactatttccagtggcgcagggcccagcgccaggccgcagaagaacagaagacctcaggaatcatgtagaactggggggctttttctcctgagcagagaggcccaaggcatgctgtggagagacttcacctgccaccatttccaggtcaacaggactagagcgttgatggttttcaaaccctgttggaagaaagtgcccatggtttctctggttctgccagtttgacagtttatggaggcttttgaatcgtaatagcaatgtgagggtgaggtacacctacagacattaaataatttgctgtgaaaaaaaaaaaaaaaaaaaaaaaaaaaaaaaaaaaaaaaaaataatctgcgggcgtttttttttcgcggggggggaaaaaaggggttattggagaaggggcatttgggcttatagtgtggtttcctcgggcccaattttttttggcaaaaggggggaaatattgggcggggtccccctatataagggggggcggttttaaatttgagaaaaacgccggggtaaccctggttttataggttcgggaatn

SEQ ID NO: 439711 - DNA, 705 bp, Homo sapiens
gcctgcgcggactcccgccttagtgggcggagttgtgccgcgtctgatgcgcagttccctttatagcgcggcaagccgaatcctagaggctaacccggcaggtgggagggagaaagttgctttctgcaccaatagctgaggcgttcagggttgtccagggacgctaccctcacgtgtctggttccgagtgctgcgttcggctgtgctgggaagttgcgtagacagtggcctcgagaccctgcctgcctgaggaggcctcggttggatgcgaaggagctgcagcatccaggggacaagatgccaactggcaagcagctagctgacattggctataagaccttctctacctccatgatgcttctcactgtgtatggggggtacctctgcagtgtccgagtctaccactatttccagtggcgcagggcccagcgccaggccgcagaagaacagaagacctcaggaatcatgtagaactggggggctttttctcctgagcagagaggcccaaggcatgctgtggagagacttcacctgccaccatttccaggtcaacaggactagagcgttgatggttttcaaaccctgttggaagaaagtgcccatggtttctctggttctgccagtttgacagtttatggaggcttttgaatcgtaatagcaatgtgagggtgaggtacacctacagacattaaataatttgctgtg

SEQ ID NO: 439712 - DNA, 588 bp, Homo sapiens
tggccgggtgtggtggctcacatctgtaatcccagcactttgggaggccagggcgggcggatcatgaggtcaggagttcaagatcagcctggccaatatggtgaaaccctgtctctgctaaaaatacagaaattagctgggcgtggtggtgcgcacctgtagtcccagctattcaggaggctgaggcaggagaatcacttgagccctggaggcagaggttgcagtgagccgagatcgtacgactgcaccccagcctggatgacagagcgagactccatctcaaaaaaggaaaaaagtgccggtctttggttttaggatggtcttggccggtttaccttccactgagatcataatccctctgcatagtttttttagtttactggaaaactactattaattgaagcttctgatagttttcaggtggctcaaagtgaaataagaacttttggaatttcactatgtctttggttgattttacattgcgttttcattattccgatacgtcatctccctgacaagtaaggaagttgcagattaattgtggacgtaagatttttgagttgaggaaaggtgttttttctcagagcc

SEQ ID NO: 439713 - DNA, 3130 bp, Homo sapiens
  misc_feature (1)..(1): n is a, c, g, or t
  misc_feature (21)..(21): n is a, c, g, or t
  misc_feature (24)..(24): n is a, c, g, or t
  misc_feature (29)..(29): n is a, c, g, or t
nggccgcacgccgccacccancanccagngccgcctcttaaagggaggtggccggccttaaaggacccccgcgcgcccagccggcgggagcgcggcggcccggctcccgcagccgcgccgaggcaggcgagcccccgcggcgcccaggcgcgggcccgggcccccgccgccgccggcgccgccgggcgcggcatttttattcaggcgacgcttaagggagcccggccgcgcccggtgcattgtgggagcggcccgcggcccgttttcgggaggaggcggagggcgcaaagcgagccggtggatccataaagaacccagccaacccgcagagggaggggaggggctgagctgtgaggagagcggggcccaagaaccatgtctacgcgggagtcctttaacccggaaagttacgaattggacaaaagcttccggctaaccagattcactgaactgaagggcacaggctgcaaagtgccccaagatgtcctgcaaaaattgctggaatctttacaggagaaccacttccaagaagatgagcagtttctgggagccgttatgccaaggcttggcattggaatggatacttgtgtcattcctttgaggcacggtgggctttccttggttcaaaccacagattacatttacccgatcgtagacgacccttacatgatgggcaggatagcgtgtgccaatgtcctcagtgacctctatgcaatgggggtcacggaatgtgacaatatgctgatgctccttggagtcagtaataaaatgaccgacagggaaagggataaagtgatgcctctgattatccaaggttttaaagacgcagctgaggaagcaggaacgtctgtaacaggcggccaaacagtactaaacccctggattgtcctgggaggagtggctaccactgtctgccaacccaatgaatttatcatgccagacaatgcagtgccaggggacgtgctggtgctgacaaaacccctggggacacaggtggcagtggctgtgcaccagtggctggatatccctgagaaatggaataagattaaactagtggtcacccaagaagatgtagagctggcctaccaggaggcgatgatgaacatggcgaggctcaacaggacagctgcaggactcatgcacacgttcaatgcccacgccgccactgacatcacgggcttcgggattttgggccatgcgcagaacctggccaagcagcagaggaacgaggtgtcgtttgtaattcacaacctcccggtgctggccaagatggctgcggtgagcaaggcctgcggaaacatgttcggcctcatgcacgggacctgcccggagacttcaggcggccttctgatctgtttaccacgtgagcaagcagctcggttctgtgcagagataaagtcccccaaatatggtgaaggccaccaagcatggattattgggattgtagagaagggcaaccgcacagccagaatcatagacaaaccccggatcatcgaggtcgcaccacaagtggccactcaaaatgtgaatcccacacccggggccacctcttaatctagacagaaatagctgtttggttttgtttttaaatagatctatttcccttatcacttcaattaaagactataaacaacaaaaatctcattgtgtctacacatcggggtgaccttaggtcggtttgtaagtggatacaattaataaaataaaatccattgcctttttttcctgttacattaactgaagatgcacctaatcttgaggcagcttctgagttgagaattatattgttatccaatactgttgattcattttgaatctttagacacttatctcttgccgcataggctttttaaaggtgctttcacatagcacaggcattacccgtagtcgtgtcaaatagcagttggtgtcttcattttatgtatatttatcatataagtctgatttttttttttaagcgtcttgaatggttttctggagagacagcattggtaagtggcacatgacggtatcccagtcataagagggttgcatgattcctttgagtgtttgatttgaaaagcctagtcttgtctctcaagagcatctcggacccagaacattctccagtagtgcattcagttcaacacagcaagtgcttcattgccttccgaatggaggttcatgtataatactcatttacaattcaatatataattacacaaataatttttaaatataatcaatagtaaagactgttctgtggatggtagtgtttaatacattttctattttgtacagtgatttcaggccttttgttttcttaaaatcagcagctgtttggcctaattcttagcattattttgtcctttgcgccagtacttttttgtgcacgctttttgtgatctgtgttaaaaacctgcattgccaacattgcagctcgaacttaaacttgttattcaaataaatatttaattttttaaattgctcttgtataatcagatgccccttttagtattattttagaagcgttgggagggttttgcctaaagtacaatttatcgggaaaaactagattttagttttataaaacttttaagtctttcatgggacctatattttcttgaattaaattttgtagttctagaataaataggcaatctaaaaaggtgttctctgtgttatgtaaagtggaggcttccttatattttaacctactaagcaatgaggagggattcctgtcattaagcacaagggcgctggatcctcaagtgcccatcttcgtgagagaaaaagcagcacatcctgcccatttctggtgctttctgctcacaggcaccaaagctgcacatgtaaactgacttcttgccaaaggaaatgacccctgggaagttcaagctcctggaagaggctttaactcggacgcgccctcctccaggaaccagtgggcagggcagccttcatgcatgtgtaactggacctccagccataagcatggtgtgcagtatggaagagcctgctacggaactgaaagtgattggacattttataggaattgatagagatgttggtcctcaaaagctacaaaccagtggtctgcaaaataaagtgtgttggaaacctctagtgagataaacctactgttgagctt

SEQ ID NO: 439714 - DNA, 3069 bp, Homo sapiens
gcgggttccttgctcccctccccggccgcctccgacgcgggcgtcctggagagcgcgccccattgtgcagggccggcggggaggtggatccataaagaacccagccaacccgcagagggaggggaggggctgagctgtgaggagagcggggcccaagaaccatgtctacgcgggagtcctttaacccggaaagttacgaattggacaaaagcttccggctaaccagattcactgaactgaagggcacaggctgcaaagtgccccaagatgtcctgcaaaaattgctggaatctttacaggagaaccacttccaagaagatgagcagtttctgggagccgttatgccaaggcttggcattggaatggatacttgtgtcattcctttgaggcacggtgggctttccttggttcaaaccacagattacatttacccgatcgtagacgacccttacatgatgggcaggatagcgtgtgccaatgtcctcagtgacctctatgcaatgggggtcacggaatgtgacaatatgctgatgctccttggagtcagtaataaaatgaccgacagggaaagggataaagtgatgcctctgattatccaaggttttaaagacgcagctgaggaagcaggaacgtctgtaacaggcggccaaacagtactaaacccctggattgtcctgggaggagtggctaccactgtctgccaacccaatgaatttatcatgccagacaatgcagtgccaggggacgtgctggtgctgacaaaacccctggggacacaggtggcagtggctgtgcaccagtggctggatatccctgagaaatggaataagattaaactagtggtcacccaagaagatgtagagctggcctaccaggaggcgatgatgaacatggcgaggctcaacaggacagctgcaggactcatgcacacgttcaatgcccacgccgccactgacatcacgggcttcgggattttgggccatgcgcagaacctggccaagcagcagaggaacgaggtgtcgtttgtaattcacaacctcccggtgctggccaagatggctgcggtgagcaaggcctgcggaaacatgttcggcctcatgcacgggacctgcccggagacttcaggcggccttctgatctgtttaccacgtgagcaagcagctcggttctgtgcagagataaagtcccccaaatatggtgaaggccaccaagcatggattattgggattgtagagaagggcaaccgcacagccagaatcatagacaaaccccggatcatcgaggtcgcaccacaagtggccactcaaaatgtgaatcccacacccggggccacctcttaatctagacagaaatagctgtttggttttgtttttaaatagatctatttcccttatcacttcaattaaagactataaacaacaaaaatctcattgtgtctacacatcggggtgaccttaggtcggtttgtaagtggatacaattaataaaataaaatccattgcctttttttcctgttacattaactgaagatgcacctaatcttgaggcagcttctgagttgagaattatattgttatccaatactgttgattcattttgaatctttagacacttatctcttgccgcataggctttttaaaggtgctttcacatagcacaggcattacccgtagtcgtgtcaaatagcagttggtgtcttcattttatgtatatttatcatataagtctgatttttttttttaagcgtcttgaatggttttctggagagacagcattggtaagtggcacatgacggtatcccagtcataagagggttgcatgattcctttgagtgtttgatttgaaaagcctagtcttgtctctcaagagcatctcggacccagaacattctccagtagtgcattcagttcaacacagcaagtgcttcattgcatggaaaacactttgaagacaaaaaagaaatcttatttctttttttgtagccttcctgatatttacagtaataccattaactgttttatcgatagcaaaaaaggatactttttgcaatgttattagatgttctatagtgctacaaggaattgccttccgaatggaggttcatgtataatactcatttacaattcaatatataattacacaaataatttttaaatataatcaatagtaaagactgttctgtggatggtagtgtttaatacattttctattttgtacagtgatttcaggccttttgttttcttaaaatcagcagctgtttggcctaattcttagcattattttgtcctttgcgccagtacttttttgtgcacgctttttgtgatctgtgttaaaaacctgcattgccaacattgcagctcgaacttaaacttgttattcaaataaatatttaattttttaaattgctcttgtataatcagatgccccttttagtattattttagaagcgttgggagggttttgcctaaagtacaatttatcgggaaaaactagattttagttttataaaacttttaagtctttcatgggacctatattttcttgaattaaattttgtagttctagaataaataggcaatctaaaaaggtgttctctgtgttatgtaaagtggaggcttccttatattttaacctactaagcaatgaggagggattcctgtcattaagcacaagggcgctggatcctcaagtgcccatcttcgtgagagaaaaagcagcacatcctgcccatttctggtgctttctgctcacaggcaccaaagctgcacatgtaaactgacttcttgccaaaggaaatgacccctgggaagttcaagctcctggaagaggctttaactcggacgcgccctcctccaggaaccagtgggcagggcagccttcatgcatgtgtaactggacctccagccataagcatggtgtgcagtatggaagagcctgctacggaactgaaagtgattggacattttataggaattgatagagatgttggtcctcaaaagctacaaaccagtggtctgcaaaataaagtgtgttggaaacctctagtgagataaacctactgttgagctt

SEQ ID NO: 439715 - DNA, 2614 bp, Homo sapiens
  misc_feature (1)..(1): n is a, c, g, or t
  misc_feature (21)..(21): n is a, c, g, or t
  misc_feature (24)..(24): n is a, c, g, or t
  misc_feature (29)..(29): n is a, c, g, or t
nggccgcacgccgccacccancanccagngccgcctcttaaagggaggtggccggccttaaaggacccccgcgcgcccagccggcgggagcgcggcggcccggctcccgcagccgcgccgaggcaggcgagcccccgcggcgcccaggcgcgggcccgggcccccgccgccgccggcgccgccgggcgcggcatttttattcaggcgacgcttaagggagcccggccgcgcccggtgcattgtgggagcggcccgcggcccgttttcgggaggaggcggagggcgcaaagcgagccggtggatccataaagaacccagccaacccgcagagggaggggaggggctgagctgtgaggagagcggggcccaagaaccatgtctacgcgggagtcctttaacccggaaagttacgaattggacaaaagcttccggctaaccagattcactgaactgaagggcacaggctgcaaagtgccccaagatgtcctgcaaaaattgctggaatctttacaggagaaccacttccaagaagatgagcagtttctgggagccgttatgccaaggcttggcattggaatggatacttgtgtcattcctttgaggcacggtgggctttccttggttcaaaccacagattacatttacccgatcgtagacgacccttacatgatgggcaggatagcgtgtgccaatgtcctcagtgacctctatgcaatgggggtcacggaatgtgacaatatgctgatgctccttggagtcagtaataaaatgaccgacagggaaagggataaagtgatgcctctgattatccaaggttttaaagacgcagctgaggaagcaggaacgtctgtaacaggcggccaaacagtactaaacccctggattgtcctgggaggagtggctaccactgtctgccaacccaatgaatttatcatgccagacaatgcagtgccaggggacgtgctggtgctgacaaaacccctggggacacaggtggcagtggctgtgcaccagtggctggatatccctgagaaatggaataagattaaactagtggtcacccaagaagatgtagagctggcctaccaggaggcgatgatgaacatggcgaggctcaacaggacagctgcaggactcatgcacacgttcaatgcccacgccgccactgacatcacgggcttcgggattttgggccatgcgcagaacctggccaagcagcagaggaacgaggtgtcgtttgtaattcacaacctcccggtgctggccaagatggctgcggtgagcaaggcctgcggaaacatgttcggcctcatgcacgggacctgcccggagacttcaggcggccttctgatctgtttaccacgtgagcaagcagctcggttctgtgcagagataaagtcccccaaatatggtgaaggccaccaagcatggattattgggattgtagagaagggcaaccgcacagccagaatcatagacaaaccccggatcatcgaggtcgcaccacaagtggccactcaaaatgtgaatcccacacccggggccacctcttaatctagacagaaatagctgtttggttttgtttttaaatagatctatttcccttatcacttcaattaaagactataaacaacaaaaatctcattgtgtctacacatcggggtgaccttaggtcggtttgtaagtggatacaattaataaaataaaatccattgcctttttttcctgttacattaactgaagatgcacctaatcttgaggcagcttctgagttgagaattatattgttatccaatactgttgattcattttgaatctttagacacttatctcttgccgcataggctttttaaaggtgctttcacatagcacaggcattacccgtagtcgtgtcaaatagcagttggtgtcttcattttatgtatatttatcatataagtctgatttttttttttaagcgtcttgaatggttttctggagagacagcattggtaagtggcacatgacggtatcccagtcataagagggttgcatgattcctttgagtgtttgatttgaaaagcctagtcttgtctctcaagagcatctcggacccagaacattctccagtagtgcattcagttcaacacagcaagtgcttcattgcatggaaaacactttgaagacaaaaaagaaatcttatttctttttttgtagccttcctgatatttacagtaataccattaactgttttatcgatagcaaaaaaggatactttttgcaatgttattagatgttctatagtgctacaaggaattgccttccgaatggaggttcatgtataatactcatttacaattcaatatataattacacaaataatttttaaatataatcaatagtaaagactgttctgtggatggtagtgtttaatacattttctattttgtacagtgatttcaggccttttgttttcttaaaatcagcagctgtttggcctaattcttagcattattttgtcctttgcgccagtacttttttgtgcacgctttttgtgatctgtgttaaaaacctgcattgccaacattgcagctcgaacttaaacttgttattcaaataaatatttaatttttta

SEQ ID NO: 439716 - DNA, 3070 bp, Homo sapiens
  misc_feature (1)..(1): n is a, c, g, or t
  misc_feature (21)..(21): n is a, c, g, or t
  misc_feature (24)..(24): n is a, c, g, or t
  misc_feature (29)..(29): n is a, c, g, or t
nggccgcacgccgccacccancanccagngccgcctcttaaagggaggtggccggccttaaaggacccccgcgcgcccagccggcgggagcgcggcggcccggctcccgcagccgcgccgaggcaggcgagcccccgcggcgcccaggcgcgggcccgggcccccgccgccgccggcgccgccgggcgcggcatttttattcaggcgacgcttaagggagcccggccgcgcccggtgcattgtgggagcggcccgcggcccgttttcgggaggaggcggagggcgcaaagcgagccggtggatccataaagaacccagccaacccgcagagggaggggaggggctgagctgtgaggagagcggggcccaagaaccatgtctacgcgggagtcctttaacccggaaagttacgaattggacaaaagcttccggctaaccagattcactgaactgaagggcacaggctgcaaagtgccccaagatgtcctgcaaaaattgctggaatctttacaggagaaccacttccaagaagatgagcagtttctgggagccgttatgccaaggcttggcattggaatggatacttgtgtcattcctttgaggcacggtgggctttccttggttcaaaccacagattacatttacccgatcgtagacgacccttacatgatgggcaggatagcgtgtgccaatgtcctcagtgacctctatgcaatgggggtcacggaatgtgacaatatgctgatgctccttggagtcagtaataaaatgaccgacagggaaagggataaagtgatgcctctgattatccaaggttttaaagacgcagctgaggaagcaggaacgtctgtaacaggcggccaaacagtactaaacccctggattgtcctgggaggagtggctaccactgtctgccaacccaatgaatttatcatgccagacaatgcagtgccaggggacgtgctggtgctgacaaaacccctggggacacaggtggcagtggctgtgcaccagtggctggatatccctgagaaatggaataagattaaactagtggtcacccaagaagatgtagagctggcctaccaggaggcgatgatgaacatggcgaggctcaacaggacaggcggccttctgatctgtttaccacgtgagcaagcagctcggttctgtgcagagataaagtcccccaaatatggtgaaggccaccaagcatggattattgggattgtagagaagggcaaccgcacagccagaatcatagacaaaccccggatcatcgaggtcgcaccacaagtggccactcaaaatgtgaatcccacacccggggccacctcttaatctagacagaaatagctgtttggttttgtttttaaatagatctatttcccttatcacttcaattaaagactataaacaacaaaaatctcattgtgtctacacatcggggtgaccttaggtcggtttgtaagtggatacaattaataaaataaaatccattgcctttttttcctgttacattaactgaagatgcacctaatcttgaggcagcttctgagttgagaattatattgttatccaatactgttgattcattttgaatctttagacacttatctcttgccgcataggctttttaaaggtgctttcacatagcacaggcattacccgtagtcgtgtcaaatagcagttggtgtcttcattttatgtatatttatcatataagtctgatttttttttttaagcgtcttgaatggttttctggagagacagcattggtaagtggcacatgacggtatcccagtcataagagggttgcatgattcctttgagtgtttgatttgaaaagcctagtcttgtctctcaagagcatctcggacccagaacattctccagtagtgcattcagttcaacacagcaagtgcttcattgcatggaaaacactttgaagacaaaaaagaaatcttatttctttttttgtagccttcctgatatttacagtaataccattaactgttttatcgatagcaaaaaaggatactttttgcaatgttattagatgttctatagtgctacaaggaattgccttccgaatggaggttcatgtataatactcatttacaattcaatatataattacacaaataatttttaaatataatcaatagtaaagactgttctgtggatggtagtgtttaatacattttctattttgtacagtgatttcaggccttttgttttcttaaaatcagcagctgtttggcctaattcttagcattattttgtcctttgcgccagtacttttttgtgcacgctttttgtgatctgtgttaaaaacctgcattgccaacattgcagctcgaacttaaacttgttattcaaataaatatttaattttttaaattgctcttgtataatcagatgccccttttagtattattttagaagcgttgggagggttttgcctaaagtacaatttatcgggaaaaactagattttagttttataaaacttttaagtctttcatgggacctatattttcttgaattaaattttgtagttctagaataaataggcaatctaaaaaggtgttctctgtgttatgtaaagtggaggcttccttatattttaacctactaagcaatgaggagggattcctgtcattaagcacaagggcgctggatcctcaagtgcccatcttcgtgagagaaaaagcagcacatcctgcccatttctggtgctttctgctcacaggcaccaaagctgcacatgtaaactgacttcttgccaaaggaaatgacccctgggaagttcaagctcctggaagaggctttaactcggacgcgccctcctccaggaaccagtgggcagggcagccttcatgcatgtgtaactggacctccagccataagcatggtgtgcagtatggaagagcctgctacggaactgaaagtgattggacattttataggaattgatagagatgttggtcctcaaaagctacaaaccagtggtctgcaaaataaagtgtgttggaaacctctagtgagataaacctactgttgagctt

SEQ ID NO: 439717 - DNA, 3230 bp, Homo sapiens
  misc_feature (1)..(1): n is a, c, g, or t
  misc_feature (21)..(21): n is a, c, g, or t
  misc_feature (24)..(24): n is a, c, g, or t
  misc_feature (29)..(29): n is a, c, g, or t
nggccgcacgccgccacccancanccagngccgcctcttaaagggaggtggccggccttaaaggacccccgcgcgcccagccggcgggagcgcggcggcccggctcccgcagccgcgccgaggcaggcgagcccccgcggcgcccaggcgcgggcccgggcccccgccgccgccggcgccgccgggcgcggcatttttattcaggcgacgcttaagggagcccggccgcgcccggtgcattgtgggagcggcccgcggcccgttttcgggaggaggcggagggcgcaaagcgagccggtggatccataaagaacccagccaacccgcagagggaggggaggggctgagctgtgaggagagcggggcccaagaaccatgtctacgcgggagtcctttaacccggaaagttacgaattggacaaaagcttccggctaaccagattcactgaactgaagggcacaggctgcaaagtgccccaagatgtcctgcaaaaattgctggaatctttacaggagaaccacttccaagaagatgagcagtttctgggagccgttatgccaaggcttggcattggaatggatacttgtgtcattcctttgaggcacggtgggctttccttggttcaaaccacagattacatttacccgatcgtagacgacccttacatgatgggcaggatagcgtgtgccaatgtcctcagtgacctctatgcaatgggggtcacggaatgtgacaatatgctgatgctccttggagtcagtaataaaatgaccgacagggaaagggataaagtgatgcctctgattatccaaggttttaaagacgcagctgaggaagcaggaacgtctgtaacaggcggccaaacagtactaaacccctggattgtcctgggaggagtggctaccactgtctgccaacccaatgaatttatcatgccagacaatgcagtgccaggggacgtgctggtgctgacctgagaaatggaataagattaaactagtggtcacccaagaagatgtagagctggcctaccaggaggcgatgatgaacatggcgaggctcaacaggacagctgcaggactcatgcacacgttcaatgcccacgccgccactgacatcacgggcttcgggattttgggccatgcgcagaacctggccaagcagcagaggaacgaggtgtcgtttgtaattcacaacctcccggtgctggccaagatggctgcggtgagcaaggcctgcggaaacatgttcggcctcatgcacgggacctgcccggagacttcaggcggccttctgatctgtttaccacgtgagcaagcagctcggttctgtgcagagataaagtcccccaaatatggtgaaggccaccaagcatggattattgggattgtagagaagggcaaccgcacagccagaatcatagacaaaccccggatcatcgaggtcgcaccacaagtggccactcaaaatgtgaatcccacacccggggccacctcttaatctagacagaaatagctgtttggttttgtttttaaatagatctatttcccttatcacttcaattaaagactataaacaacaaaaatctcattgtgtctacacatcggggtgaccttaggtcggtttgtaagtggatacaattaataaaataaaatccattgcctttttttcctgttacattaactgaagatgcacctaatcttgaggcagcttctgagttgagaattatattgttatccaatactgttgattcattttgaatctttagacacttatctcttgccgcataggctttttaaaggtgctttcacatagcacaggcattacccgtagtcgtgtcaaatagcagttggtgtcttcattttatgtatatttatcatataagtctgatttttttttttaagcgtcttgaatggttttctggagagacagcattggtaagtggcacatgacggtatcccagtcataagagggttgcatgattcctttgagtgtttgatttgaaaagcctagtcttgtctctcaagagcatctcggacccagaacattctccagtagtgcattcagttcaacacagcaagtgcttcattgcatggaaaacactttgaagacaaaaaagaaatcttatttctttttttgtagccttcctgatatttacagtaataccattaactgttttatcgatagcaaaaaaggatactttttgcaatgttattagatgttctatagtgctacaaggaattgccttccgaatggaggttcatgtataatactcatttacaattcaatatataattacacaaataatttttaaatataatcaatagtaaagactgttctgtggatggtagtgtttaatacattttctattttgtacagtgatttcaggccttttgttttcttaaaatcagcagctgtttggcctaattcttagcattattttgtcctttgcgccagtacttttttgtgcacgctttttgtgatctgtgttaaaaacctgcattgccaacattgcagctcgaacttaaacttgttattcaaataaatatttaattttttaaattgctcttgtataatcagatgccccttttagtattattttagaagcgttgggagggttttgcctaaagtacaatttatcgggaaaaactagattttagttttataaaacttttaagtctttcatgggacctatattttcttgaattaaattttgtagttctagaataaataggcaatctaaaaaggtgttctctgtgttatgtaaagtggaggcttccttatattttaacctactaagcaatgaggagggattcctgtcattaagcacaagggcgctggatcctcaagtgcccatcttcgtgagagaaaaagcagcacatcctgcccatttctggtgctttctgctcacaggcaccaaagctgcacatgtaaactgacttcttgccaaaggaaatgacccctgggaagttcaagctcctggaagaggctttaactcggacgcgccctcctccaggaaccagtgggcagggcagccttcatgcatgtgtaactggacctccagccataagcatggtgtgcagtatggaagagcctgctacggaactgaaagtgattggacattttataggaattgatagagatgttggtcctcaaaagctacaaaccagtggtctgcaaaataaagtgtgttggaaacctctagtgagataaacctactgttgagctt

SEQ ID NO: 439718 - DNA, 3192 bp, Homo sapiens
  misc_feature (1)..(1): n is a, c, g, or t
  misc_feature (21)..(21): n is a, c, g, or t
  misc_feature (24)..(24): n is a, c, g, or t
  misc_feature (29)..(29): n is a, c, g, or t
nggccgcacgccgccacccancanccagngccgcctcttaaagggaggtggccggccttaaaggacccccgcgcgcccagccggcgggagcgcggcggcccggctcccgcagccgcgccgaggcaggcgagcccccgcggcgcccaggcgcgggcccgggcccccgccgccgccggcgccgccgggcgcggcatttttattcaggcgacgcttaagggagcccggccgcgcccggtgcattgtgggagcggcccgcggcccgttttcgggaggaggcggagggcgcaaagcgagccggtggatccataaagaacccagccaacccgcagagggaggggaggggctgagctgtgaggagagcggggcccaagaaccatgtctacgcgggagtcctttaacccggaaagttacgaattggacaaaagcttccggctaaccagattcactgaactgaagggcacaggctgcaaagtgccccaagatgtcctgcaaaaattgctggaatctttacaggagaaccacttccaagaagatgagcagtttctgggagccgttatgccaaggcttggcattggaatggatacttgtgtcattcctttgaggcacggtgggctttccttggttcaaaccacagattacatttacccgatcgtagacgacccttacatgatgggcaggatagcgtgtgccaatgtcctcagtgacctctatgcaatgggggtcacggaatgtgacaatatgctgatgctccttggagtcagtaataaaatgaccgacagggaaagggataaagtgatgcctctgattatccaaggttttaaagacgcagctgaggaagcaggaacgtctgtaacaggcggccaaacagtactaaacccctggattgtcctgggaggagtggctaccactgtctgccaacccaatgaatttatcatcctgagaaatggaataagattaaactagtggtcacccaagaagatgtagagctggcctaccaggaggcgatgatgaacatggcgaggctcaacaggacagctgcaggactcatgcacacgttcaatgcccacgccgccactgacatcacgggcttcgggattttgggccatgcgcagaacctggccaagcagcagaggaacgaggtgtcgtttgtaattcacaacctcccggtgctggccaagatggctgcggtgagcaaggcctgcggaaacatgttcggcctcatgcacgggacctgcccggagacttcaggcggccttctgatctgtttaccacgtgagcaagcagctcggttctgtgcagagataaagtcccccaaatatggtgaaggccaccaagcatggattattgggattgtagagaagggcaaccgcacagccagaatcatagacaaaccccggatcatcgaggtcgcaccacaagtggccactcaaaatgtgaatcccacacccggggccacctcttaatctagacagaaatagctgtttggttttgtttttaaatagatctatttcccttatcacttcaattaaagactataaacaacaaaaatctcattgtgtctacacatcggggtgaccttaggtcggtttgtaagtggatacaattaataaaataaaatccattgcctttttttcctgttacattaactgaagatgcacctaatcttgaggcagcttctgagttgagaattatattgttatccaatactgttgattcattttgaatctttagacacttatctcttgccgcataggctttttaaaggtgctttcacatagcacaggcattacccgtagtcgtgtcaaatagcagttggtgtcttcattttatgtatatttatcatataagtctgatttttttttttaagcgtcttgaatggttttctggagagacagcattggtaagtggcacatgacggtatcccagtcataagagggttgcatgattcctttgagtgtttgatttgaaaagcctagtcttgtctctcaagagcatctcggacccagaacattctccagtagtgcattcagttcaacacagcaagtgcttcattgcatggaaaacactttgaagacaaaaaagaaatcttatttctttttttgtagccttcctgatatttacagtaataccattaactgttttatcgatagcaaaaaaggatactttttgcaatgttattagatgttctatagtgctacaaggaattgccttccgaatggaggttcatgtataatactcatttacaattcaatatataattacacaaataatttttaaatataatcaatagtaaagactgttctgtggatggtagtgtttaatacattttctattttgtacagtgatttcaggccttttgttttcttaaaatcagcagctgtttggcctaattcttagcattattttgtcctttgcgccagtacttttttgtgcacgctttttgtgatctgtgttaaaaacctgcattgccaacattgcagctcgaacttaaacttgttattcaaataaatatttaattttttaaattgctcttgtataatcagatgccccttttagtattattttagaagcgttgggagggttttgcctaaagtacaatttatcgggaaaaactagattttagttttataaaacttttaagtctttcatgggacctatattttcttgaattaaattttgtagttctagaataaataggcaatctaaaaaggtgttctctgtgttatgtaaagtggaggcttccttatattttaacctactaagcaatgaggagggattcctgtcattaagcacaagggcgctggatcctcaagtgcccatcttcgtgagagaaaaagcagcacatcctgcccatttctggtgctttctgctcacaggcaccaaagctgcacatgtaaactgacttcttgccaaaggaaatgacccctgggaagttcaagctcctggaagaggctttaactcggacgcgccctcctccaggaaccagtgggcagggcagccttcatgcatgtgtaactggacctccagccataagcatggtgtgcagtatggaagagcctgctacggaactgaaagtgattggacattttataggaattgatagagatgttggtcctcaaaagctacaaaccagtggtctgcaaaataaagtgtgttggaaacctctagtgagataaacctactgttgagctt

SEQ ID NO: 439719 - DNA, 3108 bp, Homo sapiens
  misc_feature (1)..(1): n is a, c, g, or t
  misc_feature (21)..(21): n is a, c, g, or t
  misc_feature (24)..(24): n is a, c, g, or t
  misc_feature (29)..(29): n is a, c, g, or t
nggccgcacgccgccacccancanccagngccgcctcttaaagggaggtggccggccttaaaggacccccgcgcgcccagccggcgggagcgcggcggcccggctcccgcagccgcgccgaggcaggcgagcccccgcggcgcccaggcgcgggcccgggcccccgccgccgccggcgccgccgggcgcggcatttttattcaggcgacgcttaagggagcccggccgcgcccggtgcattgtgggagcggcccgcggcccgttttcgggaggaggcggagggcgcaaagcgagccggtggatccataaagaacccagccaacccgcagagggaggggaggggctgagctgtgaggagagcggggcccaagaaccatgtctacgcgggagtcctttaacccggaaagttacgaattggacaaaagcttccggctaaccagattcactgaactgaagggcacaggctgcaaagtgccccaagatgtcctgcaaaaattgctggaatctttacaggagaaccacttccaagaagatgagcagtttctgggagccgttatgccaaggcttggcattggaatggatacttgtgtcattcctttgaggcacggtgggctttccttggttcaaaccacagattacatttacccgatcgtagacgacccttacatgatgggcaggatagcgtgtgccaatgtcctcagtgacctctatgcaatgggggtcacggaatgtgacaatatgctgatgctccttggagtcagccagacaatgcagtgccaggggacgtgctggtgctgacaaaacccctggggacacaggtggcagtggctgtgcaccagtggctggatatccctgagaaatggaataagattaaactagtggtcacccaagaagatgtagagctggcctaccaggaggcgatgatgaacatggcgaggctcaacaggacagctgcaggactcatgcacacgttcaatgcccacgccgccactgacatcacgggcttcgggattttgggccatgcgcagaacctggccaagcagcagaggaacgaggtgtcgtttgtaattcacaacctcccggtgctggccaagatggctgcggtgagcaaggcctgcggaaacatgttcggcctcatgcacgggacctgcccggagacttcaggcggccttctgatctgtttaccacgtgagcaagcagctcggttctgtgcagagataaagtcccccaaatatggtgaaggccaccaagcatggattattgggattgtagagaagggcaaccgcacagccagaatcatagacaaaccccggatcatcgaggtcgcaccacaagtggccactcaaaatgtgaatcccacacccggggccacctcttaatctagacagaaatagctgtttggttttgtttttaaatagatctatttcccttatcacttcaattaaagactataaacaacaaaaatctcattgtgtctacacatcggggtgaccttaggtcggtttgtaagtggatacaattaataaaataaaatccattgcctttttttcctgttacattaactgaagatgcacctaatcttgaggcagcttctgagttgagaattatattgttatccaatactgttgattcattttgaatctttagacacttatctcttgccgcataggctttttaaaggtgctttcacatagcacaggcattacccgtagtcgtgtcaaatagcagttggtgtcttcattttatgtatatttatcatataagtctgatttttttttttaagcgtcttgaatggttttctggagagacagcattggtaagtggcacatgacggtatcccagtcataagagggttgcatgattcctttgagtgtttgatttgaaaagcctagtcttgtctctcaagagcatctcggacccagaacattctccagtagtgcattcagttcaacacagcaagtgcttcattgcatggaaaacactttgaagacaaaaaagaaatcttatttctttttttgtagccttcctgatatttacagtaataccattaactgttttatcgatagcaaaaaaggatactttttgcaatgttattagatgttctatagtgctacaaggaattgccttccgaatggaggttcatgtataatactcatttacaattcaatatataattacacaaataatttttaaatataatcaatagtaaagactgttctgtggatggtagtgtttaatacattttctattttgtacagtgatttcaggccttttgttttcttaaaatcagcagctgtttggcctaattcttagcattattttgtcctttgcgccagtacttttttgtgcacgctttttgtgatctgtgttaaaaacctgcattgccaacattgcagctcgaacttaaacttgttattcaaataaatatttaattttttaaattgctcttgtataatcagatgccccttttagtattattttagaagcgttgggagggttttgcctaaagtacaatttatcgggaaaaactagattttagttttataaaacttttaagtctttcatgggacctatattttcttgaattaaattttgtagttctagaataaataggcaatctaaaaaggtgttctctgtgttatgtaaagtggaggcttccttatattttaacctactaagcaatgaggagggattcctgtcattaagcacaagggcgctggatcctcaagtgcccatcttcgtgagagaaaaagcagcacatcctgcccatttctggtgctttctgctcacaggcaccaaagctgcacatgtaaactgacttcttgccaaaggaaatgacccctgggaagttcaagctcctggaagaggctttaactcggacgcgccctcctccaggaaccagtgggcagggcagccttcatgcatgtgtaactggacctccagccataagcatggtgtgcagtatggaagagcctgctacggaactgaaagtgattggacattttataggaattgatagagatgttggtcctcaaaagctacaaaccagtggtctgcaaaataaagtgtgttggaaacctctagtgagataaacctactgttgagctt

SEQ ID NO: 439720 - DNA, 1509 bp, Homo sapiens
  misc_feature (1)..(1): n is a, c, g, or t
  misc_feature (21)..(21): n is a, c, g, or t
  misc_feature (24)..(24): n is a, c, g, or t
  misc_feature (29)..(29): n is a, c, g, or t
nggccgcacgccgccacccancanccagngccgcctcttaaagggaggtggccggccttaaaggacccccgcgcgcccagccggcgggagcgcggcggcccggctcccgcagccgcgccgaggcaggcgagcccccgcggcgcccaggcgcgggcccgggcccccgccgccgccggcgccgccgggcgcggcatttttattcaggcgacgcttaagggagcccggccgcgcccggtgcattgtgggagcggcccgcggcccgttttcgggaggaggcggagggcgcaaagcgagccggtggatccataaagaacccagccaacccgcagagggaggggaggggctgagctgtgaggagagcggggcccaagaaccatgtctacgcgggagtcctttaacccggaaagttacgaattggacaaaagcttccggctaaccagattcactgaactgaagggcacaggctgcaaagtgccccaagatgtcctgcaaaaattgctggaatctttacaggagaaccacttccaagaagatgagcagtttctgggagccgttatgccaaggcttggcattggaatggatacttgtgtcattcctttgaggcacggtgggctttccttggttcaaaccacagattacatttacccgatcgtagacgacccttacatgatgggcaggatagcgtgtgccaatgtcctcagtgacctctatgcaatgggggtcacggaatgtgacaatatgctgatgctccttggagtcagtaataaaatgaccgacagggaaagggataaagtgatgcctctgattatccaaggttttaaagacgcagctgaggaagcaggaacgtctgtaacaggcggccaaacagtactaaacccctggattgtcctgggaggagtggctaccactgtctgccaacccaatgaatttatcatgccagacaatgcagtgccaggggacgtgctggtgctgacaaaacccctggggacacaggtggcagtggctgtgcaccagtggctggatatccctgagaaatggaataagattaaactagtggtcacccaagaagatgtagagctggcctaccaggaggcgatgatgaacatggcgaggctcaacaggacaggcggccttctgatctgtttaccacgtgagcaagcagctcggttctgtgcagagataaagtcccccaaatatggtgaaggccaccaagcatggattattgggattgtagagaagggcaaccgcacagccagaatcatagacaaaccccggatcatcgaggtcgcaccacaagtggccactcaaaatgtgaatcccacacccggggccacctcttaatctagacagaaatagctgtttggttttgtttttaaatagatctatttcccttatcacttcaattaaagactataaacaacaaaaatctcattgtgtctacacatcggggtgaccttaggtcggtttgtaagtggatacaattaataaaataaaatccattgccttttt

SEQ ID NO: 439721 - DNA, 541 bp, Homo sapiens
tattggagttgagtcttgatgagtaacattttcattggtattttccatcctaagctggatatgtttcacgtttatttcagttacgcttcttgataggaaacacatggcttcattggcagcctgcagtttccataagtatcttatgagctcttcctgttcagagcactggtgatataaaatgaaatggctttcccgttttatttttggatgctaatgacttccatctccacaggcattggaatggatacttgtgtcattcctttgaggcacggtgggctttccttggttcaaaccacagattacatttacccgatcgtagacgacccttacatgatggtaagcgtgagccgatgtgtttttgtgactggaagggcttatttgtttggtttgggttgtggctggggttttgtatgtatctgtggggttttggttttatttctgttatatcccgactatactgccccaccctgcccagactcctgcagttgctgaagtcaggcctgtcccctgcccacacttggcactgggcataaagcaatta

SEQ ID NO: 439722 - DNA, 280 bp, Homo sapiens
ttattccgatacgtcatctccctgacaagtaaggaagttgcagattaattgtggacgtaagatttttgagttgaggaaaggtgttttttctcagagccgccccctctctctcccagctgcaggactcatgcacacgttcaatgcccacgccgccactgacatcacgggcttcgggattttgggccatgcgcagaacctggccaagcagcagaggaacgaggtgtcgtttgtaattcacaacctcccggtgctggccaagatggctgcggtgagcaaggcc

SEQ ID NO: 439723 - DNA, 3283 bp, Homo sapiens
  misc_feature (1)..(1): n is a, c, g, or t
  misc_feature (21)..(21): n is a, c, g, or t
  misc_feature (24)..(24): n is a, c, g, or t
  misc_feature (29)..(29): n is a, c, g, or t
nggccgcacgccgccacccancanccagngccgcctcttaaagggaggtggccggccttaaaggacccccgcgcgcccagccggcgggagcgcggcggcccggctcccgcagccgcgccgaggcaggcgagcccccgcggcgcccaggcgcgggcccgggcccccgccgccgccggcgccgccgggcgcggcatttttattcaggcgacgcttaagggagcccggccgcgcccggtgcattgtgggagcggcccgcggcccgttttcgggaggaggcggagggcgcaaagcgagccggtggatccataaagaacccagccaacccgcagagggaggggaggggctgagctgtgaggagagcggggcccaagaaccatgtctacgcgggagtcctttaacccggaaagttacgaattggacaaaagcttccggctaaccagattcactgaactgaagggcacaggctgcaaagtgccccaagatgtcctgcaaaaattgctggaatctttacaggagaaccacttccaagaagatgagcagtttctgggagccgttatgccaaggcttggcattggaatggatacttgtgtcattcctttgaggcacggtgggctttccttggttcaaaccacagattacatttacccgatcgtagacgacccttacatgatgggcaggatagcgtgtgccaatgtcctcagtgacctctatgcaatgggggtcacggaatgtgacaatatgctgatgctccttggagtcagtaataaaatgaccgacagggaaagggataaagtgatgcctctgattatccaaggttttaaagacgcagctgaggaagcaggaacgtctgtaacaggcggccaaacagtactaaacccctggattgtcctgggaggagtggctaccactgtctgccaacccaatgaatttatcatgccagacaatgcagtgccaggggacgtgctggtgctgacaaaacccctggggacacaggtggcagtggctgtgcaccagtggctggatatccctgagaaatggaataagattaaactagtggtcacccaagaagatgtagagctggcctaccaggaggcgatgatgaacatggcgaggctcaacaggacagctgcaggactcatgcacacgttcaatgcccacgccgccactgacatcacgggcttcgggattttgggccatgcgcagaacctggccaagcagcagaggaacgaggtgtcgtttgtaattcacaacctcccggtgctggccaagatggctgcggtgagcaaggcctgcggaaacatgttcggcctcatgcacgggacctgcccggagacttcaggcggccttctgatctgtttaccacgtgagcaagcagctcggttctgtgcagagataaagtcccccaaatatggtgaaggccaccaagcatggattattgggattgtagagaagggcaaccgcacagccagaatcatagacaaaccccggatcatcgaggtcgcaccacaagtggccactcaaaatgtgaatcccacacccggggccacctcttaatctagacagaaatagctgtttggttttgtttttaaatagatctatttcccttatcacttcaattaaagactataaacaacaaaaatctcattgtgtctacacatcggggtgaccttaggtcggtttgtaagtggatacaattaataaaataaaatccattgcctttttttcctgttacattaactgaagatgcacctaatcttgaggcagcttctgagttgagaattatattgttatccaatactgttgattcattttgaatctttagacacttatctcttgccgcataggctttttaaaggtgctttcacatagcacaggcattacccgtagtcgtgtcaaatagcagttggtgtcttcattttatgtatatttatcatataagtctgatttttttttttaagcgtcttgaatggttttctggagagacagcattggtaagtggcacatgacggtatcccagtcataagagggttgcatgattcctttgagtgtttgatttgaaaagcctagtcttgtctctcaagagcatctcggacccagaacattctccagtagtgcattcagttcaacacagcaagtgcttcattgcatggaaaacactttgaagacaaaaaagaaatcttatttctttttttgtagccttcctgatatttacagtaataccattaactgttttatcgatagcaaaaaaggatactttttgcaatgttattagatgttctatagtgctacaaggaattgccttccgaatggaggttcatgtataatactcatttacaattcaatatataattacacaaataatttttaaatataatcaatagtaaagactgttctgtggatggtagtgtttaatacattttctattttgtacagtgatttcaggccttttgttttcttaaaatcagcagctgtttggcctaattcttagcattattttgtcctttgcgccagtacttttttgtgcacgctttttgtgatctgtgttaaaaacctgcattgccaacattgcagctcgaacttaaacttgttattcaaataaatatttaattttttaaattgctcttgtataatcagatgccccttttagtattattttagaagcgttgggagggttttgcctaaagtacaatttatcgggaaaaactagattttagttttataaaacttttaagtctttcatgggacctatattttcttgaattaaattttgtagttctagaataaataggcaatctaaaaaggtgttctctgtgttatgtaaagtggaggcttccttatattttaacctactaagcaatgaggagggattcctgtcattaagcacaagggcgctggatcctcaagtgcccatcttcgtgagagaaaaagcagcacatcctgcccatttctggtgctttctgctcacaggcaccaaagctgcacatgtaaactgacttcttgccaaaggaaatgacccctgggaagttcaagctcctggaagaggctttaactcggacgcgccctcctccaggaaccagtgggcagggcagccttcatgcatgtgtaactggacctccagccataagcatggtgtgcagtatggaagagcctgctacggaactgaaagtgattggacattttataggaattgatagagatgttggtcctcaaaagctacaaaccagtggtctgcaaaataaagtgtgttggaaacctctagtgagataaacctactgttgagctt

SEQ ID NO: 439724 - DNA, 3421 bp, Homo sapiens
tgtgtgataaagcaaaagatatcaaaagattttgcggaaaagtcaccttagcgaggaccgccgctttctgaaccacagtgcttccaggttgacacatgaagtgcccagaggtgctgttctaatgctgagtcctagaagaacctttgggatttgctgttcaaggtggcacggtgtcatgtgaacctgcaggctggccctcttgccacagttaaaaccacagtccagatgtcagattttacatagatgtctgtgctgacgcagtcccgttatgaaaagatctattttgtcatatgcactgctgtggtgaatataagtggtcttgatgatttcagcccttgtcacattgacttttcgctgtcatgtattcacttgattcgctggcaggtcccagtgggaattcttttcatggcatctttgtgttttggtgacacccaggtggatccataaagaacccagccaacccgcagagggaggggaggggctgagctgtgaggagagcggggcccaagaaccatgtctacgcgggagtcctttaacccggaaagttacgaattggacaaaagcttccggctaaccagattcactgaactgaagggcacaggctgcaaagtgccccaagatgtcctgcaaaaattgctggaatctttacaggagaaccacttccaagaagatgagcagtttctgggagccgttatgccaaggcttggcattggaatggatacttgtgtcattcctttgaggcacggtgggctttccttggttcaaaccacagattacatttacccgatcgtagacgacccttacatgatgggcaggatagcgtgtgccaatgtcctcagtgacctctatgcaatgggggtcacggaatgtgacaatatgctgatgctccttggagtcagtaataaaatgaccgacagggaaagggataaagtgatgcctctgattatccaaggttttaaagacgcagctgaggaagcaggaacgtctgtaacaggcggccaaacagtactaaacccctggattgtcctgggaggagtggctaccactgtctgccaacccaatgaatttatcatgccagacaatgcagtgccaggggacgtgctggtgctgacaaaacccctggggacacaggtggcagtggctgtgcaccagtggctggatatccctgagaaatggaataagattaaactagtggtcacccaagaagatgtagagctggcctaccaggaggcgatgatgaacatggcgaggctcaacaggacagctgcaggactcatgcacacgttcaatgcccacgccgccactgacatcacgggcttcgggattttgggccatgcgcagaacctggccaagcagcagaggaacgaggtgtcgtttgtaattcacaacctcccggtgctggccaagatggctgcggtgagcaaggcctgcggaaacatgttcggcctcatgcacgggacctgcccggagacttcaggcggccttctgatctgtttaccacgtgagcaagcagctcggttctgtgcagagataaagtcccccaaatatggtgaaggccaccaagcatggattattgggattgtagagaagggcaaccgcacagccagaatcatagacaaaccccggatcatcgaggtcgcaccacaagtggccactcaaaatgtgaatcccacacccggggccacctcttaatctagacagaaatagctgtttggttttgtttttaaatagatctatttcccttatcacttcaattaaagactataaacaacaaaaatctcattgtgtctacacatcggggtgaccttaggtcggtttgtaagtggatacaattaataaaataaaatccattgcctttttttcctgttacattaactgaagatgcacctaatcttgaggcagcttctgagttgagaattatattgttatccaatactgttgattcattttgaatctttagacacttatctcttgccgcataggctttttaaaggtgctttcacatagcacaggcattacccgtagtcgtgtcaaatagcagttggtgtcttcattttatgtatatttatcatataagtctgatttttttttttaagcgtcttgaatggttttctggagagacagcattggtaagtggcacatgacggtatcccagtcataagagggttgcatgattcctttgagtgtttgatttgaaaagcctagtcttgtctctcaagagcatctcggacccagaacattctccagtagtgcattcagttcaacacagcaagtgcttcattgcatggaaaacactttgaagacaaaaaagaaatcttatttctttttttgtagccttcctgatatttacagtaataccattaactgttttatcgatagcaaaaaaggatactttttgcaatgttattagatgttctatagtgctacaaggaattgccttccgaatggaggttcatgtataatactcatttacaattcaatatataattacacaaataatttttaaatataatcaatagtaaagactgttctgtggatggtagtgtttaatacattttctattttgtacagtgatttcaggccttttgttttcttaaaatcagcagctgtttggcctaattcttagcattattttgtcctttgcgccagtacttttttgtgcacgctttttgtgatctgtgttaaaaacctgcattgccaacattgcagctcgaacttaaacttgttattcaaataaatatttaattttttaaattgctcttgtataatcagatgccccttttagtattattttagaagcgttgggagggttttgcctaaagtacaatttatcgggaaaaactagattttagttttataaaacttttaagtctttcatgggacctatattttcttgaattaaattttgtagttctagaataaataggcaatctaaaaaggtgttctctgtgttatgtaaagtggaggcttccttatattttaacctactaagcaatgaggagggattcctgtcattaagcacaagggcgctggatcctcaagtgcccatcttcgtgagagaaaaagcagcacatcctgcccatttctggtgctttctgctcacaggcaccaaagctgcacatgtaaactgacttcttgccaaaggaaatgacccctgggaagttcaagctcctggaagaggctttaactcggacgcgccctcctccaggaaccagtgggcagggcagccttcatgcatgtgtaactggacctccagccataagcatggtgtgcagtatggaagagcctgctacggaactgaaagtgattggacattttataggaattgatagagatgttggtcctcaaaagctacaaaccagtggtctgcaaaataaagtgtgttggaaacctctagtgagataaacctactgttgagctt

SEQ ID NO: 439725 - DNA, 2815 bp, Homo sapiens
cggagctgcttttcagccctaggggcgtgctcaagaatcccccgttactctgatcaaaggacttgctaagtttagaaataaagcgctttacaaatcaaatgcattggaatggatacttgtgtcattcctttgaggcacggtgggctttccttggttcaaaccacagattacatttacccgatcgtagacgacccttacatgatgggcaggatagcgtgtgccaatgtcctcagtgacctctatgcaatgggggtcacggaatgtgacaatatgctgatgctccttggagtcagtaataaaatgaccgacagggaaagggataaagtgatgcctctgattatccaaggttttaaagacgcagctgaggaagcaggaacgtctgtaacaggcggccaaacagtactaaacccctggattgtcctgggaggagtggctaccactgtctgccaacccaatgaatttatcatgccagacaatgcagtgccaggggacgtgctggtgctgacaaaacccctggggacacaggtggcagtggctgtgcaccagtggctggatatccctgagaaatggaataagattaaactagtggtcacccaagaagatgtagagctggcctaccaggaggcgatgatgaacatggcgaggctcaacaggacagctgcaggactcatgcacacgttcaatgcccacgccgccactgacatcacgggcttcgggattttgggccatgcgcagaacctggccaagcagcagaggaacgaggtgtcgtttgtaattcacaacctcccggtgctggccaagatggctgcggtgagcaaggcctgcggaaacatgttcggcctcatgcacgggacctgcccggagacttcaggcggccttctgatctgtttaccacgtgagcaagcagctcggttctgtgcagagataaagtcccccaaatatggtgaaggccaccaagcatggattattgggattgtagagaagggcaaccgcacagccagaatcatagacaaaccccggatcatcgaggtcgcaccacaagtggccactcaaaatgtgaatcccacacccggggccacctcttaatctagacagaaatagctgtttggttttgtttttaaatagatctatttcccttatcacttcaattaaagactataaacaacaaaaatctcattgtgtctacacatcggggtgaccttaggtcggtttgtaagtggatacaattaataaaataaaatccattgcctttttttcctgttacattaactgaagatgcacctaatcttgaggcagcttctgagttgagaattatattgttatccaatactgttgattcattttgaatctttagacacttatctcttgccgcataggctttttaaaggtgctttcacatagcacaggcattacccgtagtcgtgtcaaatagcagttggtgtcttcattttatgtatatttatcatataagtctgatttttttttttaagcgtcttgaatggttttctggagagacagcattggtaagtggcacatgacggtatcccagtcataagagggttgcatgattcctttgagtgtttgatttgaaaagcctagtcttgtctctcaagagcatctcggacccagaacattctccagtagtgcattcagttcaacacagcaagtgcttcattgcatggaaaacactttgaagacaaaaaagaaatcttatttctttttttgtagccttcctgatatttacagtaataccattaactgttttatcgatagcaaaaaaggatactttttgcaatgttattagatgttctatagtgctacaaggaattgccttccgaatggaggttcatgtataatactcatttacaattcaatatataattacacaaataatttttaaatataatcaatagtaaagactgttctgtggatggtagtgtttaatacattttctattttgtacagtgatttcaggccttttgttttcttaaaatcagcagctgtttggcctaattcttagcattattttgtcctttgcgccagtacttttttgtgcacgctttttgtgatctgtgttaaaaacctgcattgccaacattgcagctcgaacttaaacttgttattcaaataaatatttaattttttaaattgctcttgtataatcagatgccccttttagtattattttagaagcgttgggagggttttgcctaaagtacaatttatcgggaaaaactagattttagttttataaaacttttaagtctttcatgggacctatattttcttgaattaaattttgtagttctagaataaataggcaatctaaaaaggtgttctctgtgttatgtaaagtggaggcttccttatattttaacctactaagcaatgaggagggattcctgtcattaagcacaagggcgctggatcctcaagtgcccatcttcgtgagagaaaaagcagcacatcctgcccatttctggtgctttctgctcacaggcaccaaagctgcacatgtaaactgacttcttgccaaaggaaatgacccctgggaagttcaagctcctggaagaggctttaactcggacgcgccctcctccaggaaccagtgggcagggcagccttcatgcatgtgtaactggacctccagccataagcatggtgtgcagtatggaagagcctgctacggaactgaaagtgattggacattttataggaattgatagagatgttggtcctcaaaagctacaaaccagtggtctgcaaaataaagtgtgttggaaacctctagtgagataaacctactgttgagctt

SEQ ID NO: 439726 - DNA, 1722 bp, Homo sapiens
  misc_feature (1)..(1): n is a, c, g, or t
  misc_feature (21)..(21): n is a, c, g, or t
  misc_feature (24)..(24): n is a, c, g, or t
  misc_feature (29)..(29): n is a, c, g, or t
nggccgcacgccgccacccancanccagngccgcctcttaaagggaggtggccggccttaaaggacccccgcgcgcccagccggcgggagcgcggcggcccggctcccgcagccgcgccgaggcaggcgagcccccgcggcgcccaggcgcgggcccgggcccccgccgccgccggcgccgccgggcgcggcatttttattcaggcgacgcttaagggagcccggccgcgcccggtgcattgtgggagcggcccgcggcccgttttcgggaggaggcggagggcgcaaagcgagccggtggatccataaagaacccagccaacccgcagagggaggggaggggctgagctgtgaggagagcggggcccaagaaccatgtctacgcgggagtcctttaacccggaaagttacgaattggacaaaagcttccggctaaccagattcactgaactgaagggcacaggctgcaaagtgccccaagatgtcctgcaaaaattgctggaatctttacaggagaaccacttccaagaagatgagcagtttctgggagccgttatgccaaggcttggcattggaatggatacttgtgtcattcctttgaggcacggtgggctttccttggttcaaaccacagattacatttacccgatcgtagacgacccttacatgatgggcaggatagcgtgtgccaatgtcctcagtgacctctatgcaatgggggtcacggaatgtgacaatatgctgatgctccttggagtcagtaataaaatgaccgacagggaaagggataaagtgatgcctctgattatccaaggttttaaagacgcagctgaggaagcaggaacgtctgtaacaggcggccaaacagtactaaacccctggattgtcctgggaggagtggctaccactgtctgccaacccaatgaatttatcatgccagacaatgcagtgccaggggacgtgctggtgctgacaaaacccctggggacacaggtggcagtggctgtgcaccagtggctggatatccctgagaaatggaataagattaaactagtggtcacccaagaagatgtagagctggcctaccaggaggcgatgatgaacatggcgaggctcaacaggacagctgcaggactcatgcacacgttcaatgcccacgccgccactgacatcacgggcttcgggattttgggccatgcgcagaacctggccaagcagcagaggaacgaggtgtcgtttgtaattcacaacctcccggtgctggccaagatggctgcggtgagcaaggcctgcggaaacatgttcggcctcatgcacgggacctgcccggagacttcaggcggccttctgatctgtttaccacgtgagcaagcagctcggttctgtgcagagataaagtcccccaaatatggtgaaggccaccaagcatggattattgggattgtagagaagggcaaccgcacagccagaatcatagacaaaccccggatcatcgaggtcgcaccacaagtggccactcaaaatgtgaatcccacacccggggccacctcttaatctagacagaaatagctgtttggttttgtttttaaatagatctatttcccttatcacttcaattaaagactataaacaacaaaaatctcattgtgtctacacatcggggtgaccttaggtcggtttgtaagtggatacaattaataaaataaaatccattgccttttt

SEQ ID NO: 439727 - DNA, 1635 bp, Homo sapiens
  misc_feature (1)..(1): n is a, c, g, or t
  misc_feature (21)..(21): n is a, c, g, or t
  misc_feature (24)..(24): n is a, c, g, or t
  misc_feature (29)..(29): n is a, c, g, or t
nggccgcacgccgccacccancanccagngccgcctcttaaagggaggtggccggccttaaaggacccccgcgcgcccagccggcgggagcgcggcggcccggctcccgcagccgcgccgaggcaggcgagcccccgcggcgcccaggcgcgggcccgggcccccgccgccgccggcgccgccgggcgcggcatttttattcaggcgacgcttaagggagcccggccgcgcccggtgcattgtgggagcggcccgcggcccgttttcgggaggaggcggagggcgcaaagcgagccggtggatccataaagaacccagccaacccgcagagggaggggaggggctgagctgtgaggagagcggggcccaagaaccatgtctacgcgggagtcctttaacccggaaagttacgaattggacaaaagcttccggctaaccagattcactgaactgaagggcacaggctgcaaagtgccccaagatgtcctgcaaaaattgctggaatctttacaggagaaccacttccaagaagatgagcagtttctgggagccgttatgccaaggcttggcattggaatggatacttgtgtcattcctttgaggcacggtgggctttccttggttcaaaccacagattacatttacccgatcgtagacgacccttacatgatgggcaggatagcgtgtgccaatgtcctcagtgacctctatgcaatgggggtcacggaatgtgacaatatgctgatgctccttggagtcagtaataaaatgaccgacagggaaagggataaagtgatgcctctgattatccaaggttttaaagacgcagctgaggaagcaggaacgtctgtaacaggcggccaaacagtactaaacccctggattgtcctgggaggagtggctaccactgtctgccaacccaatgaatttatcatgccagacaatgcagtgccaggggacgtgctggtgctgacaaaacccctggggacacaggtggcagtggctgtgcaccagtggctggatatccctgagaaatggaataagattaaactagtggtcacccaagaagatgtagagctggcctaccaggaggcgatgatgaacatggcgaggctcaacaggacagctgcaggactcatgcacacgttcaatgcccacgccgccactgacatcacgggcttcgggattttgggccatgcgcagaacctggccaagcagcagaggaacgaggtgtcgtttgtaattcacaacctcccggtgctggccaagatggctgcggtgagcaaggcctgcggaaacatgttcggcctcatgcacgggacctgcccggagacttcaggcggccttctgatctgtttaccacgtgagcaagcagctcggttctgtgcagagataaagtcccccaaatatggtgaaggccaccaagcatggattattgggattgtagagaagggcaaccgcacagccagaatcatagacaaaccccggatcatcgaggtcgcaccacaagtggccactcaaaatgtgaatcccacacccggggccacctcttaatctagacagaaatagctgtttggttttgtttttaaatagatctatttcccttatcacttcaattaaagactataaacaaca

SEQ ID NO: 439728 - DNA, 2998 bp, Homo sapiens
tccgggcgggggggcaaacttaggctaatacgaggccgggtgtgtaatcggccgagggcgagccggtggatccataaagaacccagccaacccgcagagggaggggaggggctgagctgtgaggagagcggggcccaagaaccatgtctacgcgggagtcctttaacccggaaagttacgaattggacaaaagcttccggctaaccagattcactgaactgaagggcacaggctgcaaagtgccccaagatgtcctgcaaaaattgctggaatctttacaggagaaccacttccaagaagatgagcagtttctgggagccgttatgccaaggcttggcattggaatggatacttgtgtcattcctttgaggcacggtgggctttccttggttcaaaccacagattacatttacccgatcgtagacgacccttacatgatgggcaggatagcgtgtgccaatgtcctcagtgacctctatgcaatgggggtcacggaatgtgacaatatgctgatgctccttggagtcagtaataaaatgaccgacagggaaagggataaagtgatgcctctgattatccaaggttttaaagacgcagctgaggaagcaggaacgtctgtaacaggcggccaaacagtactaaacccctggattgtcctgggaggagtggctaccactgtctgccaacccaatgaatttatcatgccagacaatgcagtgccaggggacgtgctggtgctgacctgagaaatggaataagattaaactagtggtcacccaagaagatgtagagctggcctaccaggaggcgatgatgaacatggcgaggctcaacaggacagctgcaggactcatgcacacgttcaatgcccacgccgccactgacatcacgggcttcgggattttgggccatgcgcagaacctggccaagcagcagaggaacgaggtgtcgtttgtaattcacaacctcccggtgctggccaagatggctgcggtgagcaaggcctgcggaaacatgttcggcctcatgcacgggacctgcccggagacttcaggcggccttctgatctgtttaccacgtgagcaagcagctcggttctgtgcagagataaagtcccccaaatatggtgaaggccaccaagcatggattattgggattgtagagaagggcaaccgcacagccagaatcatagacaaaccccggatcatcgaggtcgcaccacaagtggccactcaaaatgtgaatcccacacccggggccacctcttaatctagacagaaatagctgtttggttttgtttttaaatagatctatttcccttatcacttcaattaaagactataaacaacaaaaatctcattgtgtctacacatcggggtgaccttaggtcggtttgtaagtggatacaattaataaaataaaatccattgcctttttttcctgttacattaactgaagatgcacctaatcttgaggcagcttctgagttgagaattatattgttatccaatactgttgattcattttgaatctttagacacttatctcttgccgcataggctttttaaaggtgctttcacatagcacaggcattacccgtagtcgtgtcaaatagcagttggtgtcttcattttatgtatatttatcatataagtctgatttttttttttaagcgtcttgaatggttttctggagagacagcattggtaagtggcacatgacggtatcccagtcataagagggttgcatgattcctttgagtgtttgatttgaaaagcctagtcttgtctctcaagagcatctcggacccagaacattctccagtagtgcattcagttcaacacagcaagtgcttcattgcatggaaaacactttgaagacaaaaaagaaatcttatttctttttttgtagccttcctgatatttacagtaataccattaactgttttatcgatagcaaaaaaggatactttttgcaatgttattagatgttctatagtgctacaaggaattgccttccgaatggaggttcatgtataatactcatttacaattcaatatataattacacaaataatttttaaatataatcaatagtaaagactgttctgtggatggtagtgtttaatacattttctattttgtacagtgatttcaggccttttgttttcttaaaatcagcagctgtttggcctaattcttagcattattttgtcctttgcgccagtacttttttgtgcacgctttttgtgatctgtgttaaaaacctgcattgccaacattgcagctcgaacttaaacttgttattcaaataaatatttaattttttaaattgctcttgtataatcagatgccccttttagtattattttagaagcgttgggagggttttgcctaaagtacaatttatcgggaaaaactagattttagttttataaaacttttaagtctttcatgggacctatattttcttgaattaaattttgtagttctagaataaataggcaatctaaaaaggtgttctctgtgttatgtaaagtggaggcttccttatattttaacctactaagcaatgaggagggattcctgtcattaagcacaagggcgctggatcctcaagtgcccatcttcgtgagagaaaaagcagcacatcctgcccatttctggtgctttctgctcacaggcaccaaagctgcacatgtaaactgacttcttgccaaaggaaatgacccctgggaagttcaagctcctggaagaggctttaactcggacgcgccctcctccaggaaccagtgggcagggcagccttcatgcatgtgtaactggacctccagccataagcatggtgtgcagtatggaagagcctgctacggaactgaaagtgattggacattttataggaattgatagagatgttggtcctcaaaagctacaaaccagtggtctgcaaaataaagtgtgttggaaacctctagtgagataaacctactgttgagctt

SEQ ID NO: 439729 - DNA, 685 bp, Homo sapiens
  misc_feature (1)..(1): n is a, c, g, or t
  misc_feature (21)..(21): n is a, c, g, or t
  misc_feature (24)..(24): n is a, c, g, or t
  misc_feature (29)..(29): n is a, c, g, or t
nggccgcacgccgccacccancanccagngccgcctcttaaagggaggtggccggccttaaaggacccccgcgcgcccagccggcgggagcgcggcggcccggctcccgcagccgcgccgaggcaggcgagcccccgcggcgcccaggcgcgggcccgggcccccgccgccgccggcgccgccgggcgcggcatttttattcaggcgacgcttaagggagcccggccgcgcccggtgcattgtgggagcggcccgcggcccgttttcgggaggaggcggagggcgcaaagcgagccggtggatccataaagaacccagccaacccgcagagggaggggaggggctgagctgtgaggagagcggggcccaagaaccatgtctacgcgggagtcctttaacccggaaagttacgaattggacaaaagcttccggctaaccagattcactgaactgaagggcacaggctgcaaagtgccccaagatgtcctgcaaaaattgctggaatctttacaggagaaccacttccaagaagatgagcagtttctgggagccgttatgccaaggcttggtaggtaacccagtgtttctttgatggtctgcgatccaatcagtgagtcaaaaactggatttctcgcctcccatgttgcctatttattttttattattactttttttgcttttatag

SEQ ID NO: 439730 - DNA, 820 bp, Homo sapiens
actcaagatttacaaaagaacaatataaagtcttttcagatcacccttcaaaatttagtctattcttaactaatcacccttcaaaatttagtctattctagcctataaaactacaacctgtacagaacatcaacacaaacatgtctaaatattagtctagcaatcctttatcttagacttttatcacattattccaaagcaaatgactcagatctataacaaagtggggaaagagagagactactcttaacaaaacattttaaattactggctgacacctgacacaggaggatcacttgaggccttaagtttaagaccaggctgggcaatatcgtgagaccctgtctcttaccaaaaaaaaaattttttttaattatccaggcatggtggctcacccctgcagtcctacctctctggaggctgaggcaggaggatcgcttgagcccaggagttagaggatgcagtgagctatgatagcaccactgccctctagcctagacagggtgaaaccccatctctttaaaaaaaaaaaaaggggggggattttaaattatttatattgtgtaaaacatggaaagtgaaaacccttaggcaaatattcagtgaattgttcctagacctagattcaccctgctggaaaatgctaatggacactacctaggagagcctttgtctttggtttaacatcaatttaatgataatatgactgtgcattagatgcttgattgtattcttatttggaggaagaatttaaaataccctgggtagatacttccagcaacaaaacagaattaaattaattaagactattcacaacaga

SEQ ID NO: 439731 - DNA, 1978 bp, Homo sapiens
ggccgcctgcgaaagggccggctcggggagccgccaagaaacgccggctgccggcgccccctccgcgcaccgcgcagccccgccgccctgcaccgacgctccccaccacgagcaccttcagcctcctcaactgcttcccctgccccccggccctggtggtgggggaagacggagacctaaagccggcatcctcgcttcgcctccagggagactctaagcccccgcccgcccacccgctgtggaggtggcagatggggggtcccgctgtccctgagccccctggcctcaaattctgggggatcaacatggatgaaagctgaccgtgggacttctgccaaaggggaaaagttgggaccatggccaaaccgcgggcttgaggagggagccccgtttctcacatttgtccccttcctttacattttaggagctgtgggcagagggacctaaataacagtgatcttcattcaagcacctaagttttcggggtgacagtccctccccctcatcctttgcagaggaacccagggctggagtcgggagaaggctgatgacatagattccaatccctgcctccttccatctcggaccgttggaggcagggcctgcaccccagtgggagcaaaggaggccaccgctcaaagacacccccccacccaaaaaaaaggggagaagagagagacctcggtgatggacaaaccggttgttactgtgtctgtgggcgagcctggggtgcggggctgtggtgggggtggggagatgattggcagctccctgggggcatcccccacccccactgtccaggcctttaaccctttgctcccctcaggccttccctaacgctccaagcaccgctggagcctttaatgggtgagggaacttgggtaagaggaagatcacccccttcctgtcccctttctaggccccctcaagtgcaggtgacccttaattggtgagatcttcagcctcagccgccgacctttcccttttgtccagttttggagttcccgttttttccttgtttgctttccgagtgtaaggtctggccggtgagaaagatttcccccaaccttgattaatcagccccctcccccaacttacttcccttaggacgggtagggctgagggacctcctctcctggaaagtgcttactttgcctggggaaggggctagacactgtcccagggaaagtaatagaaggtggaagaaatcaataaaatcagaccaaacaagtcgcctttcgagggcctccaccgatttatggatgagagggggtggaggtggaaggcaggcccaagtccattctttggacacccaaactcagcccccttaaagagtggaaacaaaacaagctgcactttgcagaggtggtaaatgaaaggactcttggcctaacttcaagagtcccctggggtttgaaggggcaaagtttgagtctggatggaacctgggctgaggtaccttaagcttccccccgcaacaccccagcctcagggattgcgggagttgtcagagatctgatggatccgaaaggggcagggccaggggattaggtttggggtcagaggttctgttttccaggggaggggtgagataggcctggatcatgccctctgccatgccctccagctaggaggatcttgagtcagagaggattggaagtgctttctcctccacccaggtgaggtcaggggagcttaggtcttagggagatggcaagttgaggtatgaagggaagctggggcttttggagctgccgaacaactgagggacccagtgcgccttccatcccgcactagtgaatagcgccccctcttcccccgaaaacgaggtgcgagaggaacaattcccacgctggggaaggacttgtctccttttctgtgaaaatgctttgtaaaaagttgttattgtttgcatagagcagattcttgagaaaaactgttttggaccataaaagttttgtttgttttaaaaaaaatc

SEQ ID NO: 439732 - DNA, 656 bp, Homo sapiens
ggccgcctgcgaaagggccggctcggggagccgccaagaaacgccggctgccggcgccccctccgcgcaccgcgcagccccgccgccctgcaccgacgctccccaccacgagcaccttcagcctcctcaactgcttcccctgccccccggccctggtggtgggggaagacggagacctaaagccggcatcctcgcttcgcctccagggagactctaagcccccgcccgcccacccgctgtggaggtggcagatggggggtcccgctgtccctgagccccctggcctcaaattctgggggatcaacatggatgaaagctgaccgtgggacttctgccaaaggggaaaagttgggaccatggccaaaccgcgggcttgaggagggagccccgtttctcacatttgtccccttcctttacattttaggagctgtgggcagagggacctaaataacatgcgccttccatcccgcactagtgaatagcgccccctcttcccccgaaaacgaggtgcgagaggaacaattcccacgctggggaaggacttgtctccttttctgtgaaaatgctttgtaaaaagttgttattgtttgcatagagcagattcttgagaaaaactgttttggaccataaaagttttgtttgttttaaaaaaaatc

SEQ ID NO: 439733 - DNA, 1931 bp, Homo sapiens
ggccgcctgcgaaagggccggctcggggagccgccaagaaacgccggctgccggcgccccctccgcgcaccgcgcagccccgccgccctgcaccgacgctccccaccacgagcaccttcagcctcctcaactgcttcccctgccccccggccctggtggtgggggaagacggagacctaaagccggcatcctcgcttcgcctccagggagactctaagcccccgcccgcccacccgctgtggaggtggcagatggggggtcccgctgtccctgagccccctggcctcaaattctgggggatcaacatggatgaaagctgaccgtgggacttctgccaaaggggaaaagttgggaccatggccaaaccgcgggcttgaggagggagccccgtttctcacatttgtccccttcctttacattttaggagctgtgggcagagggacctaaataacagtgatcttcattcaagcacctaagttttcggggtgacagtccctccccctcatcctttgcagaggaacccagggctggagtcgggagaaggctgatgacatagattccaatccctgcctccttccatctcggaccgttggaggcagggcctgcaccccagtgggagcaaaggaggccaccgctcaaagacacccccccacccaaaaaaaaggggagaagagagagacctcggtgatggacaaaccggttgttactgtgtctgtgggcgagcctggggtgcggggctgtggtgggggtggggagatgattggcagctccctgggggcatcccccacccccactgtccaggcctttaaccctttgctcccctcaggccttccctaacgctccaagcaccgctggagcctttaatgggtgagggaacttgggtaagaggaagatcacccccttcctgtcccctttctaggccccctcaagtgcaggtgacccttaattggtgagatcttcagcctcagccgccgacctttcccttttgtccagttttggagttcccgttttttccttgtttgctttccgagtgtaaggtctggccggtgagaaagatttcccccaaccttgattaatcagccccctcccccaacttacttcccttaggacgggtagggctgagggacctcctctcctggaaataatagaaggtggaagaaatcaataaaatcagaccaaacaagtcgcctttcgagggcctccaccgatttatggatgagagggggtggaggtggaaggcaggcccaagtccattctttggacacccaaactcagcccccttaaagagtggaaacaaaacaagctgcactttgcagaggtggtaaatgaaaggactcttggcctaacttcaagagtcccctggggtttgaaggggcaaagtttgagtctggatggaacctgggctgaggtaccttaagcttccccccgcaacaccccagcctcagggattgcgggagttgtcagagatctgatggatccgaaaggggcagggccaggggattaggtttggggtcagaggttctgttttccaggggaggggtgagataggcctggatcatgccctctgccatgccctccagctaggaggatcttgagtcagagaggattggaagtgctttctcctccacccaggtgaggtcaggggagcttaggtcttagggagatggcaagttgaggtatgaagggaagctggggcttttggagctgccgaacaactgagggacccagtgcgccttccatcccgcactagtgaatagcgccccctcttcccccgaaaacgaggtgcgagaggaacaattcccacgctggggaaggacttgtctccttttctgtgaaaatgctttgtaaaaagttgttattgtttgcatagagcagattcttgagaaaaactgttttggaccataaaagttttgtttgttttaaaaaaaatc

SEQ ID NO: 439734 - DNA, 555 bp, Homo sapiens
ggagccatttgctttcgcgtctgcggtgctcggagtgtggtacttctcctagttgcagtcaggcttcatacgctattgtcctgcccgttagagcagccagcgggtacagaatggattttggaagagggagtcaccactggacctccaaggaagccacgtgcagacatctacaaccttcgatctcctgacgagtttattgttggccaaaaccaggctttgattgaaccaggatgaatgcgggtgttggaagtagaatatatatatacatataaaattggttgggagccacgtgtaccagtgtgtgttgatcttggcttgattcagtctgccttgtaacagaaactggcgatggaatatgagaggagccctctggaaagaaaaggacagaccctgtgctttcatgaaagtgaagatctggctgaaccagttccacaaggttactgtatacatagcctgagtttaaaaggctgtgcccacttcaagaatgtcattgttagactttgaaatttctaactgcctacctgcataaagaaaataaaatcttttaaatcaaaa

SEQ ID NO: 439735 - DNA, 493 bp, Homo sapiens
ggagccatttgctttcgcgtctgcggtgctcggagtgtggtacttctcctagttgcagtcaggcttcatacgctattgtcctgcccgttagagcagccagcgggtacagaatggattttggaagagggagtcaccactggacctccaaggaagccacgtgcagacatctacaaccttcgatctcctgacgagtttattgttggccaaaaccaggctttgattgaaccaggatgaatgcgggtgttggaagtagaatatatatatacatataaaattgaaactggcgatggaatatgagaggagccctctggaaagaaaaggacagaccctgtgctttcatgaaagtgaagatctggctgaaccagttccacaaggttactgtatacatagcctgagtttaaaaggctgtgcccacttcaagaatgtcattgttagactttgaaatttctaactgcctacctgcataaagaaaataaaatcttttaaatcaaaa

SEQ ID NO: 439736 - DNA, 577 bp, Homo sapiens
ggagccatttgctttcgcgtctgcggtgctcggagtgtggtacttctcctagttgcagtcaggcttcatacgctattgtcctgcccgtaagttcccgttttgtgtgtggttagagcagccagcgggtacagaatggattttggaagagggagtcaccactggacctccaaggaagccacgtgcagacatctacaaccttcgatctcctgacgagtttattgttggccaaaaccaggctttgattgaaccaggatgaatgcgggtgttggaagtagaatatatatatacatataaaattggttgggagccacgtgtaccagtgtgtgttgatcttggcttgattcagtctgccttgtaacagaaactggcgatggaatatgagaggagccctctggaaagaaaaggacagaccctgtgctttcatgaaagtgaagatctggctgaaccagttccacaaggttactgtatacatagcctgagtttaaaaggctgtgcccacttcaagaatgtcattgttagactttgaaatttctaactgcctacctgcataaagaaaataaaatcttttaaatcaaaa

SEQ ID NO: 439737 - DNA, 865 bp, Homo sapiens
ggagccatttgctttcgcgtctgcggtgctcggagtgtggtacttctcctagttgcagtcaggcttcatacgctattgtcctgcccgttagagcagccagcgggtacagaatggattttggaagagggagtcaccactggacctccaaggaagccacgtgcagacatctacaaccttcgatctcctgacgagtttattgttggccaaaaccaggctttgattgaaccaggatgaatgcgggtgttggaagtagaatatatatatacatataaaattggttgggagccacgtgtaccagtgtgtgttgatcttggcttgattcagtctgccttgtaacagaaactggcgatggaatatgagaggagccctctggaaagaaaaggacagaccctgtgctttcatgaaagtgaagatctggctgaaccagttccacaaggttactgtatacatagcctgagtttaaaaggctgtgcccacttcaagaatgtcattgttagactttgaaatttctaactgcctacctgcataaagaaaataaaatcttttaaatcaaaaaaaaattttgtttggccattggagataaccattgaacagggataacaagtagtagttaggtatttgcagtttcatttggttttagttttttgaggggagaatcaccctagtgggcagttggtttctgtgggcaaagcctgctttccacaggtattgtgcctcgtgattggcttctgcattggaaacctaagaataagcaagcacacttgggccagaattcaaagcagagggtcaatacagaggtatctcacttgtatgcttacacctgcacaagatcgtgtatgttaaatcgtgggtattaggccttaat

SEQ ID NO: 439738 - DNA, 2161 bp, Homo sapiens
  misc_feature (44)..(44): n is a, c, g, or t
gaaaatgatctccaaaagatttctcagcaaggcagatttacttntgcagaatggtgctgcttgcactcctggtcacagtgagagcaccccgaacaaaggaggtgaagtggtttttatccctaacacagctagttcctgcttctgtgtcctatccccattggctagagtccaatctaaactagtcctgattggctattttaaacaggaggggtgtgggttacagcagtgggaagagcagttgccacgagcgagggagacttttccagataaggaacaaatgcgggttacaggttgggattggtgggagaaatgtttacagaatgggtaattaggagtgggaaggtatgaggaagttgaccttaagaacaaagaacaaggaagttaaactttgaagagaaacccatcatacctaacagtcttgtaagaaaggatgacaaagtgattgaacattgggtggagctaattttccttggccaattcacttagtaagataaggagctccaaatcatatttaagttgggagtcaattgattttacttaattcttgtgaggttcagttataagattcatcatactactaccatgagccatcctcagctccttgttacatgggcctgttaacatggcagctttgtctataagcaaacccaggagagaaagacatagcagagatggatgtttgaagtctataccttccaccccctttaaagagaaagtaacaccactccttttctgtgtcccttggggacactacctccatgtctggtcacatggctggactttacagcagataagcatactgtggcctgagaccatgattgtatgctttccttctgctgacctttacaatccctcaataaattgagctaacacagggaagcttttttaccaaataactgtgttgcatcatcctccagtttgcctggtgtccttaatcaatggaaggggaataagcaaactgagttttcttacaccttttgagtatagtgtttttgccatcatagatgtggctcctcataattctccaacttttatattaaaaaaccaaaacctcaaaaattgtagttcatgtcagtcagtgatgactcatcttagaagtattttgtttttggatgtgtgaatgtgcatagttcttaaagtccaacattcatgtaataagacatcttgcatataacaatgacccttacgtctaagatgttaaatagatcctaagcctggtataactttattcaagtatccttatttgcccctaaaatgtctttaatacacattacttgggttatttcttgaatgaacatacaggtatcccaatttctgtttttaagagaatggggtcttgctctgtcacccaggctggagtgcagtggtgcagtcatggcttactgcatccatgatcctcctgcctcagcctcccaagtagatgggactgaaagcacacactgccatccctggctaatgttttcatattttgtagagttgcagccttgctacgtgacccaggctggagtgtagtagctattcacaggcatgattgcttgaaactcatggcttcaagggaaactcccaccctcaatatcctcagtagctgcaactacagccataccccccactgctcagcttctcatcctttaaaagatttttactggtagtgtcctcattctgggtttttgtcttctgtgtttactgtgacatgaagtcatttttagatgaaggttaaacattttgccaacgcaggtacaatatgggattcaataaaagtacagaattaaagttgtcttattagagattgggaagtttcccagctccgtttatcggtacttggccgtaccgataaaggggatggacttggagtgaccaggtcttagtcacatgtattttcataccctaaacaagaagcggtatagaccagaatggagcactgattgtaatccaccttctttcttagaaactggcgatggaatatgagaggagccctctggaaagaaaaggacagaccctgtgctttcatgaaagtgaagatctggctgaaccagttccacaaggttactgtatacatagcctgagtttaaaaggctgtgcccacttcaagaatgtcattgttagactttgaaatttctaactgcctacctgcataaagaaaataaaatcttttaaatcaaaa

SEQ ID NO: 439739 - DNA, 515 bp, Homo sapiens
ggagccatttgctttcgcgtctgcggtgctcggagtgtggtacttctcctagttgcagtcaggcttcatacgctattgtcctgcccgtaagttcccgttttgtgtgtggttagagcagccagcgggtacagaatggattttggaagagggagtcaccactggacctccaaggaagccacgtgcagacatctacaaccttcgatctcctgacgagtttattgttggccaaaaccaggctttgattgaaccaggatgaatgcgggtgttggaagtagaatatatatatacatataaaattgaaactggcgatggaatatgagaggagccctctggaaagaaaaggacagaccctgtgctttcatgaaagtgaagatctggctgaaccagttccacaaggttactgtatacatagcctgagtttaaaaggctgtgcccacttcaagaatgtcattgttagactttgaaatttctaactgcctacctgcataaagaaaataaaatcttttaaatcaaaa

SEQ ID NO: 439740 - DNA, 940 bp, Homo sapiens
  misc_feature (867)..(867): n is a, c, g, or t
ggagccatttgctttcgcgtctgcggtgctcggagtgtggtacttctcctagttgcagtcaggcttcatacgctattgtcctgcccgtaagttcccgttttgtgtgtggttagagcagccagcgggtacagaatggattttggaagagggagtcaccactggacctccaaggaagccacgtgcagacatctacaaccttcgatctcctgacgagtttattgttggccaaaaccaggctttgattgaaccaggatgaatgcgggtgttggaagtagaatatatatatacatataaaattggttgggagccacgtgtaccagtgtgtgttgatcttggcttgattcagtctgccttgtaacagaaactggcgatggaatatgagaggagccctctggaaagaaaaggacagaccctgtgctttcatgaaagtgaagatctggctgaaccagttccacaaggttactgtatacatagcctgagtttaaaaggctgtgcccacttcaagaatgtcattgttagactttgaaatttctaactgcctacctgcataaagaaaataaaatcttttaaatcaaaaaaaaaaaccaaaaaaaatatctataaacacaaagaaaaacaaattcaaacttacacattatccaatcattctattattataaatatatgaaaaaaaaaaaaacttgggggcccgcttggcccagggggttttaaatctggaccaatttattcttggggcccaatttggggctcattttggccaattgcccctttaggggaggcgtttacaattcatgggccggtttttcaaacggtggtatttggaaaacccctggggttacccaatttttaaacccttgggaaaaaatncccttttttcacagtggggggaaattccgaaggccccgccccgtgaggccttttccatttggcccctctttgg

SEQ ID NO: 439741 - DNA, 653 bp, Homo sapiens
  misc_feature (517)..(517): n is a, c, g, or t
  misc_feature (533)..(533): n is a, c, g, or t
  misc_feature (535)..(535): n is a, c, g, or t
  misc_feature (548)..(548): n is a, c, g, or t
  misc_feature (593)..(593): n is a, c, g, or t
  misc_feature (620)..(620): n is a, c, g, or t
  misc_feature (650)..(650): n is a, c, g, or t
ggagccatttgctttcgcgtctgcggtgctcggagtgtggtacttctcctagttgcagtcaggcttcatacgctattgtcctgcccgtaagttcccgttttgtgtgtggttagagcagccagcgggtacagaatggattttggaagagggagtcaccactggacctccaaggaagccacgtgcagacatctacaaccttcgatctcctgacgagtttattgttggccaaaaccaggctttgattgaaccaggatgaatgcgggtgttggaagtagaatatatatatacatataaaattgaaactggcgatggaatatgagaggagccctctggaaagaaaaggacagaccctgtgctttcatgaaagtgaagatctggctgaaccagttccacaaggttactgtatacatagcctgagtttaaaaggctgtgcccacttcaagaatgtcattgttagactttgaaatttctaactgcctacctgcataaagaaaataaaatcttttaaatcaaaaanttttttttttttctcngngggggggcccggnacccaatcgccctataggggggcggattacaattcactgggccgncggtttacaacggcggggctggggaanccctggggggtacccaacttattcgcttgnagg

SEQ ID NO: 439742 - DNA, 748 bp, Homo sapiens
  misc_feature (55)..(55): n is a, c, g, or t
gggctgactctagaggattttcaacttcgacgacattcaggcttcatacgctatngtcctgccgttagagcagccagcgggtacagaatggattttggaagagggagtcaccactggacctccaaggaagccacgtgcagacatctacaaccttcgatctcctgacgagtttattgttggccaaaaccaggctttgattgaaccaggatgaatgcgggtgttggaagtagaatatatatatacatataaaattggttgggagccacgtgtaccagtgtgtgttgatcttggcttgattcagtctgccttgtaacagaaactggcgatggaatatgagaggagccctctggaaagaaaaggacagaccctgtgctttcatgaaagtgaagatctggctgaaccagttccacaaggttactgtatacatagcctgagtttaaaaggctgtgcccacttcaagaatgtcattgttagactttgaaatttctaactgcctacctgcataaagaaaataaaatcttttaaatcaaaaaaaaaaaaaaaaaactcgagactagttctctcaggcctcagaagggcccagcgtgggacataccgccgtaggcttccctacaatacagcctctacaaaaactaggctgtccgaccctggtaatgatggttccctttatccccagaggtgggacgcccaatctgctgtgggtgtcccggcgactcaggtcgggcgagaccaagtctttggttgccac

SEQ ID NO: 439743 - DNA, 444 bp, Homo sapiens
ggagccatttgctttcgcgtctgcggtgctcggagtgtggtacttctcctagttgcagtcaggcttcatacgctattgtcctgcccgttagagcagccagcgggtacagaatggattttggaagagggagtcaccactggacctccaaggaagccacgtgcagacatctacaaccttcgatctcctgacgagtttattgttggccaaaaccaggctttgattgaaccaggatgaatgcgggtgttggaagtagaatatatatatacatataaaattgaaactggcgatggaatatgagaggagccctctggaaagaaaaggacagaccctgtgctttcatgatgaccatcacacacaggtacacgtggctcccaaccaatttatatgtatatatatattctacttccacaccgcattcatcctggttcaatcaaagcctaggtt

SEQ ID NO: 439744 - DNA, 269 bp, Homo sapiens
cctctctggcggcggctgctgctagggagtcgacttctcctgccttgtaacagaaactggcgatggaatatgagaggagccctctggaaagaaaaggacagaccctgtgctttcatgaaagtgaagatctggctgaaccagttccacaaggttactgtatacatagcctgagtttaaaaggctgtgcccacttcaagaatgtcattgttagactttgaaatttctaactgcctacctgcataaagaaaataaaatcttttaaatcaaaa

SEQ ID NO: 439745 - DNA, 500 bp, Homo sapiens
gttgatctcaaactcctggtctcaagtgatcctcctgcctcaccctccgaaagtgctttttaaaaatgttaaaaacaaacataggctctggagctagacttgggtttaaatcccggctctgttatgtattagccattggctcaatcttctttttcttttcctagattttgcctgcctgagctcctctagtagtggccacaattgccagagaagatagagcaggtctctcccaggacttgcagctccagcctgtgtctgcaaggggtgttgtagcgactgatttctccagcccatggcaagaggccttcatcttgtgcctggaaagagggaagtacaagtccgtctggcagagatggtgcagatgggcaagtttttcagacactgcagccagcacttctgggaccgcagcagtggagcctgcagagggccggttctccaggcatgggctactgacattgtcacttccagactccttatgcaataaacaacccctaaacaga

SEQ ID NO: 439746 - DNA, 452 bp, Homo sapiens
tcttgctctgtcacccaggctggagtgcaatggtgcgatcttagctcactgcagcctccaccttccgggttcaagcaatcctcccacctcagcctcctgagtagctgtgactacagattttgcctgcctgagctcctctagtagtggccacaattgccagagaagatagagcaggtctctcccaggacttgcagctccagcctgtgtctgcaaggggtgttgtagcgactgatttctccagcccatggcaagaggccttcatcttgtgcctggaaagagggaagtacaagtccgtctggcagagatggtgcagatgggcaagtttttcagacactgcagccagcacttctgggaccgcagcagtggagcctgcagagggccggttctccaggcatgggctactgacattgtcacttccagactccttatgcaataaacaacccctaaacaga

SEQ ID NO: 439747 - DNA, 393 bp, Homo sapiens
ggagccatttgctttcgcgtctgcggtgctcggagtgtggtacttctcctagttgcagtcaggcttcatacgctattgtcctgcccgtaagttcccgttttgtgtgtggtgagtggaaactccatgttcttcgttggagacctctggtcctcccttcccttctttgtgccgtcgtctctgcggccagccctaatctccttctcgtggcttctccgtctctgaccccaaataggccttaagggcgtgggagaaatgagtttctggagctggaaaagccactgccttctgcacgggcctgagaagcccttggctggtgtaaatgatgacttcacttttttccccatcagatcgacaatgctgacgtcttatattttgccagttagttctgataca

SEQ ID NO: 439748 - DNA, 560 bp, Homo sapiens
  misc_feature (81)..(82): n is a, c, g, or t
tctagaggaccccctcgctctgatagcctttcgtacggataacattcacacagtctttctaatgcggaggttcatacgctnngtcctgcccgttagagcagccagcgggtacagaatggattttggaagagggagtcaccactggacctccaaggaagccacgtgcagacatctacaaccttcgatctcctgacgagtttattgttggccaaaaccaggctttgattgaaccaggatgaatgcgggtgttggaagtagaatatatatatacatataaaattggttgggagccacgtgtaccagtgtgtgttgatcttggcttgattcagtctgccttgtaacagaaactggcgatggaatatgagaggagccctctggaaagaaaaggacagaccctgtgctttcatgaaagtgaagatctggctgaaccagttccacaaggttactgtatacatagcctgagtttaaaaggctgtgcccacttcaagaatgtcattgttagactttgaaatttctaactgcctacctgcataaagaaaataaaatcttttaaatcaaaa

SEQ ID NO: 439749 - DNA, 918 bp, Homo sapiens
  misc_feature (845)..(845): n is a, c, g, or t
ggagccatttgctttcgcgtctgcggtgctcggagtgtggtacttctcctagttgcagtcaggcttcatacgctattgtcctgcccgttagagcagccagcgggtacagaatggattttggaagagggagtcaccactggacctccaaggaagccacgtgcagacatctacaaccttcgatctcctgacgagtttattgttggccaaaaccaggctttgattgaaccaggatgaatgcgggtgttggaagtagaatatatatatacatataaaattggttgggagccacgtgtaccagtgtgtgttgatcttggcttgattcagtctgccttgtaacagaaactggcgatggaatatgagaggagccctctggaaagaaaaggacagaccctgtgctttcatgaaagtgaagatctggctgaaccagttccacaaggttactgtatacatagcctgagtttaaaaggctgtgcccacttcaagaatgtcattgttagactttgaaatttctaactgcctacctgcataaagaaaataaaatcttttaaatcaaaaaaaaaaaccaaaaaaaatatctataaacacaaagaaaaacaaattcaaacttacacattatccaatcattctattattataaatatatgaaaaaaaaaaaaacttgggggcccgcttggcccagggggttttaaatctggaccaatttattcttggggcccaatttggggctcattttggccaattgcccctttaggggaggcgtttacaattcatgggccggtttttcaaacggtggtatttggaaaacccctggggttacccaatttttaaacccttgggaaaaaatncccttttttcacagtggggggaaattccgaaggccccgccccgtgaggccttttccatttggcccctctttgg

SEQ ID NO: 439750 - DNA, 1656 bp, Homo sapiens
ccgtgggaagatggcggttaacgccctttatttgttggttcacaggttagagcagccagcgggtacagaatggattttggaagagggagtcaccactggacctccaaggaagccacgtgcagacatctacaaccttcgatctcctgacgagtaagtctttgtctcctatgggtctactgtagaaaacacgtgctttgagaagctttagttttctaggaaaacgtgggatttaacaaagcactttctatcgagcatttattaggtatttaaaaaagtgttctgacggccgggcgctgtggctgacgcctgtaaccccagcaaactcacaaggctgaggcaggagaattgcccgaacccgggcggcggaggttgtagtgagttgagattgcgccactgccctacagtcggggcaacagagccagactccgtctcaaaaaaaaaaaaaaaagaaaaacatgttctgaatgttttattctcacagttcaaatattggaactaggtttctggtgaagaaacaggtttaagagaaatgcctgaagtgaaagaaccttgttagtgaagaggcgtttaacattttaatgccacttaaacatatttttggattccattcttcctgtgtgttggggcgcttaaatttccaagtggagggatgatttattgacatattttggaaagccaaatgtgtttttctgttgaactagccactcaaaccagtgcccgactacataactaatatttttgctagagtccaggagtgaggcgtttacaaagtctgggcttcatgggaacacatgtgaagcttattgttccagattgttcttttgtcaggtaacttgtggtaacttgtgttaaaatgcaatctcttggtacttgttcacttcccaactcagtaaatgccaactacttcctcaactcttccagccacactggcttctatcatgggcctgtactcagagtgtaagcactgaagacaggggtgtttggtttggctaccaagttattgccagctacaggatacaacacagaagtgctcaaacaccgaatgcaaatttgcaaatatgaagcataccaaccaaatcttactcctcatggctttcaaatcttactcctcactcaagaacttcctgctggcatatatgatgacttagcttttttccccgacagatcgactatgttgatctaacttttctaagccagtttctgtctgatatgccagcttgagcagctcctttgtcccagctcccctgggcatctagctgatgggagctcatttttctgttttttcatttcaggtttattgttggccaaaaccaggctttgattgaaccaggatgaatgcgggtgttggaagtagaatatatatatacatataaaattggttgggagccacgtgtaccagtgtgtgttgatcttggcttgattcagtctgccttgtaacagaaactggcgatggaatatgagaggagccctctggaaagaaaaggacagaccctgtgctttcatgaaagtgaagatctggctgaaccagttccacaaggttactgtatacatagcctgagtttaaaaggctgtgcccacttcaagaatgtcattgttagactttgaaatttctaactgcctacctgcataaagaaaataaaatcttttaaatcaaaa

SEQ ID NO: 439751 - DNA, 1697 bp, Homo sapiens
ggagccatttgctttcgcgtctgcggtgctcggagtgtggtacttctcctagttgcagtcaggcttcatacgctattgtcctgcccgttagagcagccagcgggtacagaatggattttggaagagggagtcaccactggacctccaaggaagccacgtgcagacatctacaaccttcgatctcctgacgagtaagtctttgtctcctatgggtctactgtagaaaacacgtgctttgagaagctttagttttctaggaaaacgtgggatttaacaaagcactttctatcgagcatttattaggtatttaaaaaagtgttctgacggccgggcgctgtggctgacgcctgtaaccccagcaaactcacaaggctgaggcaggagaattgcccgaacccgggcggcggaggttgtagtgagttgagattgcgccactgccctacagtcggggcaacagagccagactccgtctcaaaaaaaaaaaaaaaagaaaaacatgttctgaatgttttattctcacagttcaaatattggaactaggtttctggtgaagaaacaggtttaagagaaatgcctgaagtgaaagaaccttgttagtgaagaggcgtttaacattttaatgccacttaaacatatttttggattccattcttcctgtgtgttggggcgcttaaatttccaagtggagggatgatttattgacatattttggaaagccaaatgtgtttttctgttgaactagccactcaaaccagtgcccgactacataactaatatttttgctagagtccaggagtgaggcgtttacaaagtctgggcttcatgggaacacatgtgaagcttattgttccagattgttcttttgtcaggtaacttgtggtaacttgtgttaaaatgcaatctcttggtacttgttcacttcccaactcagtaaatgccaactacttcctcaactcttccagccacactggcttctatcatgggcctgtactcagagtgtaagcactgaagacaggggtgtttggtttggctaccaagttattgccagctacaggatacaacacagaagtgctcaaacaccgaatgcaaatttgcaaatatgaagcataccaaccaaatcttactcctcatggctttcaaatcttactcctcactcaagaacttcctgctggcatatatgatgacttagcttttttccccgacagatcgactatgttgatctaacttttctaagccagtttctgtctgatatgccagcttgagcagctcctttgtcccagctcccctgggcatctagctgatgggagctcatttttctgttttttcatttcaggtttattgttggccaaaaccaggctttgattgaaccaggatgaatgcgggtgttggaagtagaatatatatatacatataaaattggttgggagccacgtgtaccagtgtgtgttgatcttggcttgattcagtctgccttgtaacagaaactggcgatggaatatgagaggagccctctggaaagaaaaggacagaccctgtgctttcatgaaagtgaagatctggctgaaccagttccacaaggttactgtatacatagcctgagtttaaaaggctgtgcccacttcaagaatgtcattgttagactttgaaatttctaactgcctacctgcataaagaaaataaaatcttttaaatcaaaa

SEQ ID NO: 439752 - DNA, 969 bp, Homo sapiens
gctggcactcctctaaacgatctgaccctgcatgcatgcctgctatgtatcggtacattgtatgagtaaggcgtgaatgagagatctgggcttcatgggaacacatgtgaagcttattgttccagattgttcttttgtcaggtaacttgtggtaacttgtgttaaaatgcaatctcttggtacttgttcacttcccaactcagtaaatgccaactacttcctcaactcttccagccacactggcttctatcatgggcctgtactcagagtgtaagcactgaagacaggggtgtttggtttggctaccaagttattgccagctacaggatacaacacagaagtgctcaaacaccgaatgcaaatttgcaaatatgaagcataccaaccaaatcttactcctcatggctttcaaatcttactcctcactcaagaacttcctgctggcatatatgatgacttagcttttttccccgacagatcgactatgttgatctaacttttctaagccagtttctgtctgatatgccagcttgagcagctcctttgtcccagctcccctgggcatctagctgatgggagctcatttttctgttttttcatttcaggtttattgttggccaaaaccaggctttgattgaaccaggatgaatgcgggtgttggaagtagaatatatatatacatataaaattggttgggagccacgtgtaccagtgtgtgttgatcttggcttgattcagtctgccttgtaacagaaactggcgatggaatatgagaggagccctctggaaagaaaaggacagaccctgtgctttcatgaaagtgaagatctggctgaaccagttccacaaggttactgtatacatagcctgagtttaaaaggctgtgcccacttcaagaatgtcattgttagactttgaaatttctaactgcctacctgcataaagaaaataaaatcttttaaatcaaaa

SEQ ID NO: 439753 - DNA, 2471 bp, Homo sapiens
  misc_feature (44)..(44): n is a, c, g, or t
gaaaatgatctccaaaagatttctcagcaaggcagatttacttntgcagaatggtgctgcttgcactcctggtcacagtgagagcaccccgaacaaaggaggtgaagtggtttttatccctaacacagctagttcctgcttctgtgtcctatccccattggctagagtccaatctaaactagtcctgattggctattttaaacaggaggggtgtgggttacagcagtgggaagagcagttgccacgagcgagggagacttttccagataaggaacaaatgcgggttacaggttgggattggtgggagaaatgtttacagaatgggtaattaggagtgggaaggtatgaggaagttgaccttaagaacaaagaacaaggaagttaaactttgaagagaaacccatcatacctaacagtcttgtaagaaaggatgacaaagtgattgaacattgggtggagctaattttccttggccaattcacttagtaagataaggagctccaaatcatatttaagttgggagtcaattgattttacttaattcttgtgaggttcagttataagattcatcatactactaccatgagccatcctcagctccttgttacatgggcctgttaacatggcagctttgtctataagcaaacccaggagagaaagacatagcagagatggatgtttgaagtctataccttccaccccctttaaagagaaagtaacaccactccttttctgtgtcccttggggacactacctccatgtctggtcacatggctggactttacagcagataagcatactgtggcctgagaccatgattgtatgctttccttctgctgacctttacaatccctcaataaattgagctaacacagggaagcttttttaccaaataactgtgttgcatcatcctccagtttgcctggtgtccttaatcaatggaaggggaataagcaaactgagttttcttacaccttttgagtatagtgtttttgccatcatagatgtggctcctcataattctccaacttttatattaaaaaaccaaaacctcaaaaattgtagttcatgtcagtcagtgatgactcatcttagaagtattttgtttttggatgtgtgaatgtgcatagttcttaaagtccaacattcatgtaataagacatcttgcatataacaatgacccttacgtctaagatgttaaatagatcctaagcctggtataactttattcaagtatccttatttgcccctaaaatgtctttaatacacattacttgggttatttcttgaatgaacatacaggtatcccaatttctgtttttaagagaatggggtcttgctctgtcacccaggctggagtgcagtggtgcagtcatggcttactgcatccatgatcctcctgcctcagcctcccaagtagatgggactgaaagcacacactgccatccctggctaatgttttcatattttgtagagttgcagccttgctacgtgacccaggctggagtgtagtagctattcacaggcatgattgcttgaaactcatggcttcaagggaaactcccaccctcaatatcctcagtagctgcaactacagccataccccccactgctcagcttctcatcctttaaaagatttttactggtagtgtcctcattctgggtttttgtcttctgtgtttactgtgacatgaagtcatttttagatgaaggttaaacattttgccaacgcaggtacaatatgggattcaataaaagtacagaattaaagttgtcttattagagattgggaagtttcccagctccgtttatcggtacttggccgtaccgataaaggggatggacttggagtgaccaggtcttagtcacatgtattttcataccctaaacaagaagcggtatagaccagaatggagcactgattgtaatccaccttctttcttagaaactggcgatggaatatgagaggagccctctggaaagaaaaggacagaccctgtgctttcatgaaagtgaagatctggctgaaccagttccacaaggttactgtatacatagcctgagtttaaaaggctgtgcccacttcaagaatgtcattgttagactttgaaatttctaactgcctacctgcataaagaaaataaaatcttttaaatcaaaaaaaaattttgtttggccattggagataaccattgaacagggataacaagtagtagttaggtatttgcagtttcatttggttttagttttttgaggggagaatcaccctagtgggcagttggtttctgtgggcaaagcctgctttccacaggtattgtgcctcgtgattggcttctgcattggaaacctaagaataagcaagcacacttgggccagaattcaaagcagagggtcaatacagaggtatctcacttgtatgcttacacctgcacaagatcgtgtatgttaaatcgtgggtattaggccttaat

SEQ ID NO: 439754 - DNA, 819 bp, Homo sapiens
ggagccatttgctttcgcgtctgcggtgctcggagtgtggtacttctcctagttgcagtcaggcttcatacgctattgtcctgcccgttagagcagccagcgggtacagaatggattttggaagagggagtcaccactggacctccaaggaagccacgtgcagacatctacaaccttcgatctcctgacgagtttattgttggccaaaaccaggctttgattgaaccaggatgaatgcgggtgttggaagtagaatatatatatacatataaaattggttgggagccacgtgtaccagtgtgtgttgatcttggcttgattcagtctgccttgtaacaggtctccaagcaaattcaagttctccccctgtgagagacacgaggtaaaattggcattgaaccggatagcttgatggccctcgggggctgacccgcagggtgtcggacttcaggggacttcaggaaacagcagcgagagagtttggcatagcttattgccccaggttgtggggtcttggaagagagctgccatacaacttaatgcctgatcggctggaggacgatccgagtggaaagggaacaatctggggctctggcttaccacaaactggcgatggaatatgagaggagccctctggaaagaaaaggacagaccctgtgctttcatgaaagtgaagatctggctgaaccagttccacaaggttactgtatacatagcctgagtttaaaaggctgtgcccacttcaagaatgtcattgttagactttgaaatttctaactgcctacctgcataaagaaaataaaatcttttaaatcaaaa

SEQ ID NO: 439755 - DNA, 1594 bp, Homo sapiens
ccgtgggaagatggcggttaacgccctttatttgttggttcacaggttagagcagccagcgggtacagaatggattttggaagagggagtcaccactggacctccaaggaagccacgtgcagacatctacaaccttcgatctcctgacgagtaagtctttgtctcctatgggtctactgtagaaaacacgtgctttgagaagctttagttttctaggaaaacgtgggatttaacaaagcactttctatcgagcatttattaggtatttaaaaaagtgttctgacggccgggcgctgtggctgacgcctgtaaccccagcaaactcacaaggctgaggcaggagaattgcccgaacccgggcggcggaggttgtagtgagttgagattgcgccactgccctacagtcggggcaacagagccagactccgtctcaaaaaaaaaaaaaaaagaaaaacatgttctgaatgttttattctcacagttcaaatattggaactaggtttctggtgaagaaacaggtttaagagaaatgcctgaagtgaaagaaccttgttagtgaagaggcgtttaacattttaatgccacttaaacatatttttggattccattcttcctgtgtgttggggcgcttaaatttccaagtggagggatgatttattgacatattttggaaagccaaatgtgtttttctgttgaactagccactcaaaccagtgcccgactacataactaatatttttgctagagtccaggagtgaggcgtttacaaagtctgggcttcatgggaacacatgtgaagcttattgttccagattgttcttttgtcaggtaacttgtggtaacttgtgttaaaatgcaatctcttggtacttgttcacttcccaactcagtaaatgccaactacttcctcaactcttccagccacactggcttctatcatgggcctgtactcagagtgtaagcactgaagacaggggtgtttggtttggctaccaagttattgccagctacaggatacaacacagaagtgctcaaacaccgaatgcaaatttgcaaatatgaagcataccaaccaaatcttactcctcatggctttcaaatcttactcctcactcaagaacttcctgctggcatatatgatgacttagcttttttccccgacagatcgactatgttgatctaacttttctaagccagtttctgtctgatatgccagcttgagcagctcctttgtcccagctcccctgggcatctagctgatgggagctcatttttctgttttttcatttcaggtttattgttggccaaaaccaggctttgattgaaccaggatgaatgcgggtgttggaagtagaatatatatatacatataaaattgaaactggcgatggaatatgagaggagccctctggaaagaaaaggacagaccctgtgctttcatgaaagtgaagatctggctgaaccagttccacaaggttactgtatacatagcctgagtttaaaaggctgtgcccacttcaagaatgtcattgttagactttgaaatttctaactgcctacctgcataaagaaaataaaatcttttaaatcaaaa

SEQ ID NO: 439756 - DNA, 865 bp, Homo sapiens
gtgcaagctatccggttcaatctacatttttatttagagttgaccaccagaacaacatggattcaaacttgcagctatttgattttgggccttaaatctatctggcactcctcgtgggattccaatggcatctatataaacatgagagtcacgagggacatccattgttttatgatgttctgtttttatgtatgttttctggatgaaataccagggtgaaagggagatagccaattggattagagctcaagtcccacgccaagtaacttggcagagtattcagtaatggtccaccacaacaccaccatacgtttgcttggggatgaataagggacgactgattggtaagctcctggaagggcttaagctcactgcatctcgttaggtctccaagcaaattcaagttctccccctgtgagagacacgaggtaaaattggcattgaaccggatagcttgatggccctcgggggctgacccgcagggtgtcggacttcaggggacttcaggaaacagcagcgagagagtttggcatagcttattgccccaggttgtggggtcttggaagagagctgccatacaacttaatgcctgatcggctggaggacgatccgagtggaaagggaacaatctggggctctggcttaccacaaactggcgatggaatatgagaggagccctctggaaagaaaaggacagaccctgtgctttcatgaaagtgaagatctggctgaaccagttccacaaggttactgtatacatagcctgagtttaaaaggctgtgcccacttcaagaatgtcattgttagactttgaaatttctaactgcctacctgcataaagaaaataaaatcttttaaatcaaaa

SEQ ID NO: 439757 - DNA, 915 bp, Homo sapiens
ggagccatttgctttcgcgtctgcggtgctcggagtgtggtacttctcctagttgcagtcaggcttcatacgctattgtcctgcccgttagagcagccagcgggtacagaatggattttggaagagggagtcaccactggacctccaaggaagccacgtgcagacatctacaaccttcgatctcctgacgagtttattgttggccaaaaccaggctttgattgaaccaggatgaatgcgggtgttggaagtagaatatatatatacatataaaattggtaagtggtgccaacacgtcttccctggctgagtagacacaggctctggagggggtagtagctgcttttcagtgtgggtttgtcaccctacttcttgtacgactcaaatgtggcctttgcagctgatgatacagcttctttccccatcagatcgaccctgttgatctctacactattggccagttttgtctgatgcattggccccagtaataactcctatctttgttttctgcttatctttatcagagactattgcttgttcatgggaactgggctttctctattttttccagcattcagatggcttcttttgacctgttaactttctataggtggcgcccgtttccacggcgctgtggaaagtggggggaacacaactggccgttaaaagagaagagacgcgaaacatgtgcagaccacgcgcaatttccaagggcaccccaaccaccacgggttcaaaggggcaaaaaatcactaccatgcgcgggcaaaaactctggtgaacacagtgaaacagcaccaaagtgcgccatagtcggagtgttgttacaacaagaatataatcttcgtctctctctcttctgcctcctctacacctccatcctcgaaaaaagaagagaagagagagagaagagaca

SEQ ID NO: 439758 - DNA, 429 bp, Homo sapiens
ggagccatttgctttcgcgtctgcggtgctcggagtgtggtacttctcctagttgcagtcaggcttcatacgctattgtcctgcccgtaagttcccgttttgtgtgtggttagagcagccagcgggtacagaatggattttggaagagggagtcaccactggacctccaaggaagccacgtgcagacatctacaaccttcgatctcctgacgaaaactggcgatggaatatgagaggagccctctggaaagaaaaggacagaccctgtgctttcatgaaagtgaagatctggctgaaccagttccacaaggttactgtatacatagcctgagtttaaaaggctgtgcccacttcaagaatgtcattgttagactttgaaatttctaactgcctacctgcataaagaaaataaaatcttttaaatcaaaa

SEQ ID NO: 439759 - DNA, 2016 bp, Homo sapiens
ccgtgggaagatggcggttaacgccctttatttgttggttcacaggttagagcagccagcgggtacagaatggattttggaagagggagtcaccactggacctccaaggaagccacgtgcagacatctacaaccttcgatctcctgacgagtaagtctttgtctcctatgggtctactgtagaaaacacgtgctttgagaagctttagttttctaggaaaacgtgggatttaacaaagcactttctatcgagcatttattaggtatttaaaaaagtgttctgacggccgggcgctgtggctgacgcctgtaaccccagcaaactcacaaggctgaggcaggagaattgcccgaacccgggcggcggaggttgtagtgagttgagattgcgccactgccctacagtcggggcaacagagccagactccgtctcaaaaaaaaaaaaaaaagaaaaacatgttctgaatgttttattctcacagttcaaatattggaactaggtttctggtgaagaaacaggtttaagagaaatgcctgaagtgaaagaaccttgttagtgaagaggcgtttaacattttaatgccacttaaacatatttttggattccattcttcctgtgtgttggggcgcttaaatttccaagtggagggatgatttattgacatattttggaaagccaaatgtgtttttctgttgaactagccactcaaaccagtgcccgactacataactaatatttttgctagagtccaggagtgaggcgtttacaaagtctgggcttcatgggaacacatgtgaagcttattgttccagattgttcttttgtcaggtaacttgtggtaacttgtgttaaaatgcaatctcttggtacttgttcacttcccaactcagtaaatgccaactacttcctcaactcttccagccacactggcttctatcatgggcctgtactcagagtgtaagcactgaagacaggggtgtttggtttggctaccaagttattgccagctacaggatacaacacagaagtgctcaaacaccgaatgcaaatttgcaaatatgaagcataccaaccaaatcttactcctcatggctttcaaatcttactcctcactcaagaacttcctgctggcatatatgatgacttagcttttttccccgacagatcgactatgttgatctaacttttctaagccagtttctgtctgatatgccagcttgagcagctcctttgtcccagctcccctgggcatctagctgatgggagctcatttttctgttttttcatttcaggtttattgttggccaaaaccaggctttgattgaaccaggatgaatgcgggtgttggaagtagaatatatatatacatataaaattggtaagtggtgccaacacgtcttccctggctgagtagacacaggctctggagggggtagtagctgcttttcagtgtgggtttgtcaccctacttcttgtacgactcaaatgtggcctttgcagctgatgatacagcttctttccccatcagatcgaccctgttgatctctacactattggccagttttgtctgatgcattggccccagtaataactcctatctttgttttctgcttatctttatcagagactattgcttgttcatgggaactgggctttctctattttttccagcattcagatggcttcttttgacctgttaactttctataggtggcgcccgtttccacggcgctgtggaaagtggggggaacacaactggccgttaaaagagaagagacgcgaaacatgtgcagaccacgcgcaatttccaagggcaccccaaccaccacgggttcaaaggggcaaaaaatcactaccatgcgcgggcaaaaactctggtgaacacagtgaaacagcaccaaagtgcgccatagtcggagtgttgttacaacaagaatataatcttcgtctctctctcttctgcctcctctacacctccatcctcgaaaaaagaagagaagagagagagaagagaca

SEQ ID NO: 439760 - DNA, 1867 bp, Homo sapiens
  misc_feature (1231)..(1231): n is a, c, g, or t
  misc_feature (1244)..(1244): n is a, c, g, or t
ccgtgggaagatggcggttaacgccctttatttgttggttcacaggttagagcagccagcgggtacagaatggattttggaagagggagtcaccactggacctccaaggaagccacgtgcagacatctacaaccttcgatctcctgacgagtaagtctttgtctcctatgggtctactgtagaaaacacgtgctttgagaagctttagttttctaggaaaacgtgggatttaacaaagcactttctatcgagcatttattaggtatttaaaaaagtgttctgacggccgggcgctgtggctgacgcctgtaaccccagcaaactcacaaggctgaggcaggagaattgcccgaacccgggcggcggaggttgtagtgagttgagattgcgccactgccctacagtcggggcaacagagccagactccgtctcaaaaaaaaaaaaaaaagaaaaacatgttctgaatgttttattctcacagttcaaatattggaactaggtttctggtgaagaaacaggtttaagagaaatgcctgaagtgaaagaaccttgttagtgaagaggcgtttaacattttaatgccacttaaacatatttttggattccattcttcctgtgtgttggggcgcttaaatttccaagtggagggatgatttattgacatattttggaaagccaaatgtgtttttctgttgaactagccactcaaaccagtgcccgactacataactaatatttttgctagagtccaggagtgaggcgtttacaaagtctgggcttcatgggaacacatgtgaagcttattgttccagattgttcttttgtcaggtaacttgtggtaacttgtgttaaaatgcaatctcttggtacttgttcacttcccaactcagtaaatgccaactacttcctcaactcttccagccacactggcttctatcatgggcctgtactcagagtgtaagcactgaagacaggggtgtttggtttggctaccaagttattgccagctacaggatacaacacagaagtgctcaaacaccgaatgcaaatttgcaaatatgaagcataccaaccaaatcttactcctcatggctttcaaatcttactcctcactcaagaacttcctgctggcatatatgatgacttagcttttttccccgacagatcgactatgttgatctaacttttctaagccagtttctgtctgataactttcaaaattttgctttgntgcaacattcttntctaagctttttctctgagatgtttgtagatttatttttatttgcgtgttttaaggtggttcatggtgcaacaattctctttaccttggccgatttggtaagtgtggttgctcagttttctaagtgaggttgcctctatcggttcatatttcattctagtacttgttcttcgcagatattcttgtcttcacgtgttacccttccactgtgatcttttctcttcatccctctgattccttctcttcgtgctcttattggatagcccttcttaatattcccgtttagctacgcctgctttcctcaatgcctcatatgggtttgtttattcaatgctttatccttaaatctgttatcaaccttctctccaccttaggaagatttcaaaccactctgggcattttgtattttgtccttacattttccgtaaattcattttttgcagatttatttatggtctgcttgtctcccattttatcttccatgctacatttatctactcttcttttcctgtcacttaattttccctggcccctagctctcttatgttcggaattattctaatgggcctaattggcgcctagggttatctctccccatatttctgcgttgtttcaccttgcccg

SEQ ID NO: 439761 - DNA, 433 bp, Homo sapiens
cttcgatctcctgacgagtaagtctttgtctcctatgggtctactgtagaaaacacgtgctttgagaagctttagttttctaggaaaacgtgggatttaacaaagcactttctatcgagcatttattaggtatttaaaaaagtgttctgacggccgggcgctgtggctgacgcctgtaaccccagcacttggggaggccaaggcagatgggtcacctgaggtcaagatttggagaccagcctggccaacatggtgaaaccctgactctattaaaaatacagaaattagctgggcgtggtggtacgcgcctgtaatcccagcaactcacaaggctgaggcaggagaattgcccgaacccgggcggcggaggttgtagtgagttgagattgcgccactgccctacagtcggggcaacagagccagactccgtctc

SEQ ID NO: 439762 - DNA, 660 bp, Homo sapiens
ggagccatttgctttcgcgtctgcggtgctcggagtgtggtacttctcctagttgcagtcaggcttcatacgctattgtcctgcccgttagagcagccagcgggtacagaatggattttggaagagggagtcaccactggacctccaaggaagccacgtgcagacatctacaaccttcgatctcctgacgagtttattgttggccaaaaccaggctttgattgaaccaggatgaatgcgggtgttggaagtagaatatatatatacatataaaattggttgggagccacgtgtaccagtgtgtgttgatcttggcttgattcagtctgccttgtaacagaaactggcgatggaatatgagaggagccctctggaaagaaaaggacagaccctgtgctttcatgaaagtgaagatctggctgaaccagttccacaaggttactgtatacatagcctgagtttaaaaggctgtgcccacttcaagaatgtcattgttagactttgaaatttctaactgcctacctgcataaagaaaataaaatcttttaaatcaaaaaaaaaacaaaaacaaaaaaacttgtggtggggggccttgggccccggaaaaggttttttaacccttccgttggggggggggggccccttggtttgcggccccctg

SEQ ID NO: 439763 - DNA, 954 bp, Homo sapiens
ggagccatttgctttcgcgtctgcggtgctcggagtgtggtacttctcctagttgcagtcaggcttcatacgctattgtcctgcccgttagagcagccagcgggtacagaatggattttggaagagggagtcaccactggacctccaaggaagccacgtgcagacatctacaaccttcgatctcctgacgagtttattgttggccaaaaccaggctttgattgaaccaggatgaatgcgggtgttggaagtagaatatatatatacatataaaattgaaactggcgatggaatatgagaggagccctctggaaagaaaaggacagaccctgtgctttcatgaaagtgaagatctggctgaaccagttccacaaggttactgtatacatagcctgagtttaaaaggctgtgcccacttcaagaatgtcattgttagactttgaaatttctaactgcctacctgcataaagaaaataaaatcttttaaatcaaaaaaaaaaaaaagggggggccgccctttttttttttttttttgggaggtccccaacaattcttgggtaattctttccccaaaaggtaaatatacccgaagggtttttaaagttccacaaaaaaaaccttatttgggttccttccccaaagaaaaaaaaaatacatgagagcaacagcccagcccgatagacagcacagagacaactcgcaaccaacaagtccgcccaacgacaagcagaaacaaaaggagggcggcgagccaacacatcagcaaggcgacaagacccacagccaagaggcaggcggccgacagtgacataacaacgagcggccccacggcaacgacaaccgacgataagaacgacgtgtgtgaagacacaccccaccgccgaacgacgggatggcaccagcgagacctatagtacgcgaagcagccaagacgaagagcggggaagcaaggaaa

SEQ ID NO: 439764 - DNA, 407 bp, Homo sapiens
ggagccatttgctttcgcgtctgcggtgctcggagtgtggtacttctcctagttgcagtcaggcttcatacgctattgtcctgcccgttagagcagccagcgggtacagaatggattttggaagagggagtcaccactggacctccaaggaagccacgtgcagacatctacaaccttcgatctcctgacgaaaactggcgatggaatatgagaggagccctctggaaagaaaaggacagaccctgtgctttcatgaaagtgaagatctggctgaaccagttccacaaggttactgtatacatagcctgagtttaaaaggctgtgcccacttcaagaatgtcattgttagactttgaaatttctaactgcctacctgcataaagaaaataaaatcttttaaatcaaaa

SEQ ID NO: 439765 - DNA, 675 bp, Homo sapiens
ggagccatttgctttcgcgtctgcggtgctcggagtgtggtacttctcctagttgcagtcaggcttcatacgctattgtcctgcccgttagagcagccagcgggtacagaatggattttggaagagggagtcaccactggacctccaaggaagccacgtgcagacatctacaaccttcgatctcctgacgagtttattgttggccaaaaccaggctttgattgaaccaggatgaatgcgggtgttggaagtagaatatatatatacatataaaattggttgggagccacgtgtaccagtgtgtgttgatcttggcttgattcagtctgccttgtaacagattttgcctgcctgagctcctctagtagtggccacaattgccagagaagatagagcaggtctctcccaggacttgcagctccagcctgtgtctgcaaggggtgttgtagcgactgatttctccagcccatggcaagaggccttcatcttgtgcctggaaagagggaagtacaagtccgtctggcagagatggtgcagatgggcaagtttttcagacactgcagccagcacttctgggaccgcagcagtggagcctgcagagggccggttctccaggcatgggctactgacattgtcacttccagactccttatgcaataaacaacccctaaacaga

SEQ ID NO: 439766 - DNA, 988 bp, Homo sapiens
ggagccatttgctttcgcgtctgcggtgctcggagtgtggtacttctcctagttgcagtcaggcttcatacgctattgtcctgcccgttagagcagccagcgggtacagaatggattttggaagagggagtcaccactggacctccaaggaagccacgtgcagacatctacaaccttcgatctcctgacgaaaactggcgatggaatatgagaggagccctctggaaagaaaaggacagaccctgtgctttcatgaaagtgaagatctggctgaaccagttccacaaggttactgtatacatagcctgagtttaaaaggctgtgcccacttcaagaatgtcattgttagactttgaaatttctaactgcctacctgcataaagaaaataaaatcttttaaatcaaaatcaaaaagaaagatgtaaaaaaaataaaataaatacaaaaatcaaacacgggcggaggctccggccatagaagaatcgcctccccgaagggtgcgcacaccgtctattgtctcgccccacaccgctaacttctttattccgctctacgagggtgagcgccccctgctttagggcgcgtgcacgctattgtgaaaggtcatttggagcccccctgctgggcgcgccagagcgttacttgtcgcaacccacaccacgccttgcaaccgagcgaggcgtgggagcgatcccaacacccggcggagcgccgcaaagtcaggttgtgccggccgattatcttcgttcgctgtccgttgaagctaccggttgggaaacccccctatctttccatacgcgggtctcccttgaacttgcggcagggggcgatgtgaccaggaggcataaaataagtgcgtcgtgaggcgacctacttcacacatcctgctcccccccttacatgccgaagtacaactctgtgtgaacgccatcggggctgtcccccctacgttgcggcgcagctctgcccccatacattaatcgggaca

SEQ ID NO: 439767 - DNA, 532 bp, Homo sapiens
  misc_feature (55)..(55): n is a, c, g, or t
gggctgactctagaggattttcaacttcgacgacattcaggcttcatacgctatngtcctgccgttagagcagccagcgggtacagaatggattttggaagagggagtcaccactggacctccaaggaagccacgtgcagacatctacaaccttcgatctcctgacgagtttattgttggccaaaaccaggctttgattgaaccaggatgaatgcgggtgttggaagtagaatatatatatacatataaaattggttgggagccacgtgtaccagtgtgtgttgatcttggcttgattcagtctgccttgtaacagaaactggcgatggaatatgagaggagccctctggaaagaaaaggacagaccctgtgctttcatgaaagtgaagatctggctgaaccagttccacaaggttactgtatacatagcctgagtttaaaaggctgtgcccacttcaagaatgtcattgttagactttgaaatttctaactgcctacctgcataaagaaaataaaatcttttaaatcaaaa

SEQ ID NO: 439768 - DNA, 631 bp, Homo sapiens
  misc_feature (495)..(495): n is a, c, g, or t
  misc_feature (511)..(511): n is a, c, g, or t
  misc_feature (513)..(513): n is a, c, g, or t
  misc_feature (526)..(526): n is a, c, g, or t
  misc_feature (571)..(571): n is a, c, g, or t
  misc_feature (598)..(598): n is a, c, g, or t
  misc_feature (628)..(628): n is a, c, g, or t
ggagccatttgctttcgcgtctgcggtgctcggagtgtggtacttctcctagttgcagtcaggcttcatacgctattgtcctgcccgttagagcagccagcgggtacagaatggattttggaagagggagtcaccactggacctccaaggaagccacgtgcagacatctacaaccttcgatctcctgacgagtttattgttggccaaaaccaggctttgattgaaccaggatgaatgcgggtgttggaagtagaatatatatatacatataaaattgaaactggcgatggaatatgagaggagccctctggaaagaaaaggacagaccctgtgctttcatgaaagtgaagatctggctgaaccagttccacaaggttactgtatacatagcctgagtttaaaaggctgtgcccacttcaagaatgtcattgttagactttgaaatttctaactgcctacctgcataaagaaaataaaatcttttaaatcaaaaanttttttttttttctcngngggggggcccggnacccaatcgccctataggggggcggattacaattcactgggccgncggtttacaacggcggggctggggaanccctggggggtacccaacttattcgcttgnagg

SEQ ID NO: 439769 - DNA, 498 bp, Homo sapiens
  misc_feature (81)..(82): n is a, c, g, or t
tctagaggaccccctcgctctgatagcctttcgtacggataacattcacacagtctttctaatgcggaggttcatacgctnngtcctgcccgttagagcagccagcgggtacagaatggattttggaagagggagtcaccactggacctccaaggaagccacgtgcagacatctacaaccttcgatctcctgacgagtttattgttggccaaaaccaggctttgattgaaccaggatgaatgcgggtgttggaagtagaatatatatatacatataaaattgaaactggcgatggaatatgagaggagccctctggaaagaaaaggacagaccctgtgctttcatgaaagtgaagatctggctgaaccagttccacaaggttactgtatacatagcctgagtttaaaaggctgtgcccacttcaagaatgtcattgttagactttgaaatttctaactgcctacctgcataaagaaaataaaatcttttaaatcaaaa

SEQ ID NO: 439770 - DNA, 709 bp, Homo sapiens
gagcgacgcggccacaagcccaggaacctggagcccccagaagccgtgagaggcaggaaggttcctcccttggagacttcggagggaacgcaaccctgcagacatcttttgttttgttttgtttttagagacagggttgcgttctgtcgcccaggctggagtgcagtggtgcggtctcggctcacttcagcctccactgcccaggctcaagcaatcctcccacctcagcctcccgagtagccgggactgtaggcatgagccaccccacctgggtaactttttgttatcataatgtagagatggggtctcactatgttgcccaggctggtcttgaattcccgggctcaagcgattcacccgcctcccaaggtgctgggattacaggtgtgagccgccaccctgaagagaagttggttttggacttctgggctccgggaccgcgggagaatagatttctgttgctttaagctgcaacgtgtggctgtaagggagttaaggatcgatttgagatgaggtggccctaaaaccagcaggctggtgtcctgagaagaggagagagagacggggagacggtcttgtggagacggaggcagagactggagcgctgcggccacaagccaggacgcaccttgatctggggttcccgggcccctggaccgggagaggacactgtcttgtcccaggccacctggtttctggtgccctcgtg

SEQ ID NO: 439771 - DNA, 2896 bp, Homo sapiens
agcgtgtttctctgtggccccgtgcggggcgaccttgctacccaggcccacagtaggctgtatgcgaagagcctgcgcctctgcctccaagaaggcctccaggtttctgcaaatgcgtgaatgagccggatgccagcctctgtcccctggagcccagcgtgaggaagaggcatgccccatcagccttcagcttgagcccggcggcccccgcccccgccccctgccaccctgcactgccccggctcccccgcggcccccacgctgcagtgcggccgggccccctccccgcaggggccgcccccgccgcccacccctagcgcccgtggtggtggtggtggtggtggtggtggtggcccgggccgcagggccatgaaactacaggccgtgatggagacgctgttgcagcggcagcagcgggcgcgccaggagctggaggcccggcagcagctgccccccgatccccctgctgcaccccccggccgggcccgggctgcccccgacgaggacagagagcccgagagtgcccggatgcagcgggctcagatggccgcactggcagccatgcgggctgcagctgcgggcctgggacacccagccagccccggcggctctgaggatgggcccccaggctcggaggaggaggacgcggcccgggaggggacaccgggctcacccgggcgaggcagagaagggccaggagaggagcactttgaggacatggcctccgacgaggacatgaagcccaaatgggaggaggaggagatggaggaagacctcggggaggatgaggaggaggaggaggaggattacgaggatgaggaggaggaggaggacgaggaggggctgggccccccaggccctgccagcttgggcaccacggcactgttcccccgaaaggcccagccaccccaggccttccgcggcgatggcgttcccagggtgctggggggccaggagcggccggggcctggccctgcccaccccggaggggccgcccacgtagccccgcagctgcagccgcctgaccacggcgactggacttacgaggagcagtttaagcagctctacgaactcgacggggaccccaagaggaaggaattcctggatgacttgttcagcttcatgcagaagcgagggacacctgtgaaccgcatccccatcatggccaaacaggtccttgacctgttcatgctgtacgtgctggtgacggagaagggcggcctcgtggaggtcatcaacaagaagctgtggcgtgagatcaccaagggcctcaacctgcccacgtccatcaccagtgcagccttcaccctgcggacccaatacatgaagtacctgtacccctacgagtgtgagaagcggggcctcagtaaccccaatgagctccaggcagccatagacagcaaccgacgggagggccggcgccagagctttggtggctccctctttgcctactcgccaggcggggcacacggcatgctctcctcacccaagctacccgtgtcctccctgggcctggccgcaagcaccaacggcagctccatcacccccgcccctaagatcaagaaagaggaggactcagccatccccatcacagtccctggccgcctgcctgtgtccctggcgggccaccctgtggtggcagcccaggcagcagctgtgcaagcagcagccgcccaagcagctgtggccgcacaggcagctgccctggaacagctgcgggagaagctggagtctgcagagcctccggagaagaagatggccctggtggccgatgagcagcaacggctgatgcaacgtgcactccagcagaacttcctggccatggcggcccagctgcccatgagcattcggatcaacagccaagcctccgaaagccgccaggactctgctgtgaacctgacgggcaccaacggcagcaacagcatcagcatgtcggtggagatcaacggcatcatgtacacaggagttctgtttgctcagccgccggcccccacgccaacctctgctcccaacaaaggaggcggcggcggcggcggcagcagcagcaacgcaggcggccggggaggaaacaccggaaccagcggcggccaggctgggccagcggggctgtccacaccctccacatctacctcaaataactcgttgccttaaccgcatcactccccacccgccacccaccctggagcccgccggcctgggcagggggtccaggtgggccacacaggggccaggatggcggaagatacgggtggggagggaagatatccagaaaggagccacagctgacgccaaaaagaaaagaaaaaagatatatatatatatatatatatatatacgtatatatataaagagaatttaataaaacaggggaaaaccaaggaacacttgaatttctcaggttttggacattcagagagatgaattgtgagaacagcaaagaaatccatcagaaaaacagaaagaggcagacgtttcccagggcgttcaggcagccctgatggaccgaaggctctggtgtctggtttggccccacagcagtgtgggccgatcctgtttacctcatacatccctgcactgtgtgttttcatttttgtctgctttagttctcttttattttctattcaccacacactcaccactcccagcttctcgtgtccagtgaaacccctgaaccaagatcactgaatttttgtttttttcttgttgctttgggaaatttttttttctctgtagggtttttaagaggtttcgggggttttgttgtgtaaatattctattttattcttggggggatcaaaccttaggaaaaggatatctatatatctatatagctatatatttgtgttccttcagggaaactggtcttgaaaaagcaagaaaaaaaagcaaaaaaaaa

SEQ ID NO: 439772 - DNA, 2106 bp, Homo sapiens
gagcgacgcggccacaagcccaggaacctggagcccccagaagccgtgagaggcaggaaggttcctcccttggagacttcggagggaacgcaaccctgcagacatcttttgttttgttttgtttttagagacagggttgcgttctgtcgcccaggctggagtgcagtggtgcggtctcggctcacttcagcctccactgcccaggctcaagcaatcctcccacctcagcctcccgagtagccgggactgtaggcatgagccaccccacctggctctacgaactcgacggggaccccaagaggaaggaattcctggatgacttgttcagcttcatgcagaagcgagggacacctgtgaaccgcatccccatcatggccaaacaggtccttgacctgttcatgctgtacgtgctggtgacggagaagggcggcctcgtggaggtcatcaacaagaagctgtggcgtgagatcaccaagggcctcaacctgcccacgtccatcaccagtgcagccttcaccctgcggacccaatacatgaagtacctgtacccctacgagtgtgagaagcggggcctcagtaaccccaatgagctccaggcagccatagacagcaaccgacgggagggccggcgccagagctttggtggctccctctttgcctactcgccaggcggggcacacggcatgctctcctcacccaagctacccgtgtcctccctgggcctggccgcaagcaccaacggcagctccatcacccccgcccctaagatcaagaaagaggaggactcagccatccccatcacagtccctggccgcctgcctgtgtccctggcgggccaccctgtggtggcagcccaggcagcagctgtgcaagcagcagccgcccaagcagctgtggccgcacaggcagctgccctggaacagctgcgggagaagctggagtctgcagagcctccggagaagaagatggccctggtggccgatgagcagcaacggctgatgcaacgtgcactccagcagaacttcctggccatggcggcccagctgcccatgagcattcggatcaacagccaagcctccgaaagccgccaggactctgctgtgaacctgacgggcaccaacggcagcaacagcatcagcatgtcggtggagatcaacggcatcatgtacacaggagttctgtttgctcagccgccggcccccacgccaacctctgctcccaacaaaggaggcggcggcggcggcggcagcagcagcaacgcaggcggccggggaggaaacaccggaaccagcggcggccaggctgggccagcggggctgtccacaccctccacatctacctcaaataactcgttgccttaaccgcatcactccccacccgccacccaccctggagcccgccggcctgggcagggggtccaggtgggccacacaggggccaggatggcggaagatacgggtggggagggaagatatccagaaaggagccacagctgacgccaaaaagaaaagaaaaaagatatatatatatatatatatatatatacgtatatatataaagagaatttaataaaacaggggaaaaccaaggaacacttgaatttctcaggttttggacattcagagagatgaattgtgagaacagcaaagaaatccatcagaaaaacagaaagaggcagacgtttcccagggcgttcaggcagccctgatggaccgaaggctctggtgtctggtttggccccacagcagtgtgggccgatcctgtttacctcatacatccctgcactgtgtgttttcatttttgtctgctttagttctcttttattttctattcaccacacactcaccactcccagcttctcgtgtccagtgaaacccctgaaccaagatcactgaatttttgtttttttcttgttgctttgggaaatttttttttctctgtagggtttttaagaggtttcgggggttttgttgtgtaaatattctattttattcttggggggatcaaaccttaggaaaaggatatctatatatctatatagctatatatttgtgttccttcagggaaactggtcttgaaaaagcaagaaaaaaaagcaaaaaaaaa

SEQ ID NO: 439773 - DNA, 1187 bp, Homo sapiens
aaaaaaataaaaaattagccagacatggtggcacgcccctgtggtctcagctactcgggaggctgagctgggaggatcacttgagcccatgaggttgaggctgcagtgagctctgatgccaccactgcactctagcctgggggacagagtgagagagaagtttattccccggagcaccccattgggtctcccttgtggcccgcctcgcatcttcttaaactctgcatggcatatgtcttctgttcttgccttaggagttctgtttgctcagccgccggcccccacgccaacctctgctcccaacaaaggaggcggcggcggcggcggcagcagcagcaacgcaggcggccggggaggaaacaccggaaccagcggcggccaggctgggccagcggggctgtccacaccctccacatctacctcaaataactcgttgccttaaccgcatcactccccacccgccacccaccctggagcccgccggcctgggcagggggtccaggtgggccacacaggggccaggatggcggaagatacgggtggggagggaagatatccagaaaggagccacagctgacgccaaaaagaaaagaaaaaagatatatatatatatatatatatatatacgtatatatataaagagaatttaataaaacaggggaaaaccaaggaacacttgaatttctcaggttttggacattcagagagatgaattgtgagaacagcaaagaaatccatcagaaaaacagaaagaggcagacgtttcccagggcgttcaggcagccctgatggaccgaaggctctggtgtctggtttggccccacagcagtgtgggccgatcctgtttacctcatacatccctgcactgtgtgttttcatttttgtctgctttagttctcttttattttctattcaccacacactcaccactcccagcttctcgtgtccagtgaaacccctgaaccaagatcactgaatttttgtttttttcttgttgctttgggaaatttttttttctctgtagggtttttaagaggtttcgggggttttgttgtgtaaatattctattttattcttggggggatcaaaccttaggaaaaggatatctatatatctatatagctatatatttgtgttccttcagggaaactggtcttgaaaaagcaagaaaaaaaagcaaaaaaaaa

SEQ ID NO: 439774 - DNA, 2255 bp, Homo sapiens
agcgtgtttctctgtggccccgtgcggggcgaccttgctacccaggcccacagtaggctgtatgcgaagagcctgcgcctctgcctccaagaaggcctccaggtttctgcaaatgcgtgaatgagccggatgccagcctctgtcccctggagcccagcgtgaggaagaggcatgccccatcagccttcagcttgagcccggcggcccccgcccccgccccctgccaccctgcactgccccggctcccccgcggcccccacgctgcagtgcggccgggccccctccccgcaggggccgcccccgccgcccacccctagcgcccgtggtggtggtggtggtggtggtggtggtggcccgggccgcagggccatgaaactacaggccgtgatggagacgctgttgcagcggcagcagcgggcgcgccaggagctggaggcccggcagcagctgccccccgatccccctgctgcaccccccggccgggcccgggctgcccccgacgaggacagagagcccgagagtgcccggatgcagcgggctcagatggccgcactggcagccatgcgggctgcagctgcgggcctgggacacccagccagccccggcggctctgaggatgggcccccaggctcggaggaggaggacgcggcccgggaggggacaccgggctcacccgggcgaggcagagaagggccaggagaggagcactttgaggacatggcctccgacgaggacatgaagcccaaatgggaggaggaggagatggaggaagacctcggggaggatgaggaggaggaggaggaggattacgaggatgaggaggaggaggaggacgaggaggggctgggccccccaggccctgccagcttgggcaccacggcactgttcccccgaaaggcccagccaccccaggccttccgcggcgatggcgttcccagggtgctggggggccaggagcggccggggcctggccctgcccaccccggaggggccgcccacgtagccccgcagctgcagccgcctgaccacggcgactggacttacgaggagcagtttaagcagctctacgaactcgacggggaccccaagaggaaggaattcctggatgacttgttcagcttcatgcagaagcgagggacacctgtgaaccgcatccccatcatggccaaacaggtccttgacctgttcatgctgtacgtgctggtgacggagaagggcggcctcgtggaggtcatcaacaagaagctgtggcgtgagatcaccaagggcctcaacctgcccacgtccatcaccagtgcagccttcaccctgcggacccaatacatgaagtacctgtacccctacgagtgtgagaagcggggcctcagtaaccccaatgagctccaggcagccatagacagcaaccgacgggagggccggcgccagagctttggtggctccctctttgcctactcgccaggcggggcacacggcatgctctcctcacccaagctacccgtgtcctccctgggcctggccgcaagcaccaacggcagctccatcacccccgcccctaagatcaagaaagaggaggactcagccatccccatcacagtccctggccgcctgcctgtgtccctggcgggccaccctgtggtggcagcccaggcagcagctgtgcaagcagcagccgcccaagcagctgtggccgcacaggcagctgccctggaacagctgcgggagaagctggagtctgcagagcctccggagaagaagatggccctggtggccgatgagcagcaacggctgatgcaacgtgcactccagcagaacttcctggccatggcggcccagctgcccatgagcattcggatcaacagccaagcctccgaaagccgccaggactctgctgtgaacctgacgggcaccaacggcagcaacagcatcagcatgtcggtggagatcaacggcatcatgtacacaggtaggacccctgaggccacgccctgcctggacctcgcctctcccgccgccgtgaactcaggaccctgagttgcgcctggtcccacctgcttgaacctaggtgtgcgggcgagcagggcacggccaggggctttgcaggacaaacagtcaagactgatggagaggataccatcgttcacccggtaccacgctcagcccagagggggtcgtccacagatacatattcagtgtgacgttggatggttcacattcctagttttttgttttaatgagacggagtcttgcacagacat

SEQ ID NO: 439775 - DNA, 407 bp, Homo sapiens
gccactgcaccccagcctgggctacagagcaagactccgtctcaaaaaaaaaaaaaaaaaaaaatcctcatcctcctaaagaggagactaggggtcagacaggatcacagagggaagtgtcttgcccatggtcacacagcagttcgacagcagagagggccagggtgaccagacaggtggtggtaaggtgcaaggaccaacattaaagtcagtaatctgggtttgaatcggctttgccacgtccatgtgcctgctgtattcctgggtgagttgattaacctctctgagcttccatttttccacctgtaaaatagggatcatctgtaattcacacaattttcatgagattccaggtgccaaacacagggataagtgcttaataaatgtttatttgttttgaaaagcgt

SEQ ID NO: 439776 - DNA, 4275 bp, Homo sapiens
gttggcgcatgcgcgcgaggtgcgcaggctcgcgcctttttcccttttctaagctttctgtgttacccccggttccgctgtcttttctgtctacagtttgcgatccccgcgtccaggatggagcagctgaacgaactggagctgctgatggagaagagtttttgggaggaggcggagctgccggcggagctatttcagaagaaagtggtagcttcctttccaagaacagttctgagcacaggaatggataaccggtacctggtgttggcagtcaatactgtacagaacaaagagggaaactgtgaaaagcgcctggtcatcactgcttcacagtcactagaaaataaagaactatgcatccttaggaatgactggtgttctgttccagtagagccaggagatatcattcatttggagggagactgcacatctgacacttggataatagataaagattttggatatttgattctgtatccagacatgctgatttctggcaccagcatagccagtagtattcgatgtatgagaagagctgtcctgagtgaaacttttaggagctctgatccagccacacgccaaatgctaattggtacggttctccatgaggtgtttcaaaaagccataaataatagctttgccccagaaaagctacaagaacttgcttttcaaacaattcaagaaataagacatttgaaggaaatgtaccgcttaaatctaagtcaagatgaaataaaacaagaagtagaggactatcttccttcgttttgtaaatgggcaggagatttcatgcataaaaacacttcgactgacttccctcagatgcagctctctctgccaagtgataatagtaaggataattcaacatgtaacattgaagtcgtgaaaccaatggatattgaagaaagcatttggtcccctaggtttggattgaaaggcaaaatagatgttacagttggtgtgaaaatacatcgagggtataaaacaaaatacaagataatgccgctggaacttaaaactggcaaagaatcaaattctattgaacaccgtagtcaggttgttctgtacactctactaagccaagagagaagagctgatccagaggctggcttgcttctctacctcaagactggtcagatgtaccctgtgcctgccaaccatctagataaaagagaattattaaagctaagaaaccagatggcattctcattgtttcaccgtattagcaaatctgctactagacagaagacacagcttgcttctttgccacaaataattgaggaagagaaaacttgtaaatattgttcacaaattggcaattgtgctctttatagcagagcagttgaacaacagatggattgtagttcagtcccaattgtgatgctgcccaaaatagaagaagaaacccagcatctgaagcaaacacacttagaatatttcagcctttggtgtctaatgttaaccctggagtcacaatcgaaggataataaaaagaatcaccaaaatatctggctaatgcctgcttcggaaatggagaagagtggcagttgcattggaaacctgattagaatggaacatgtaaagatagtttgtgatgggcaatatttacataatttccaatgtaaacatggtgccatacctgtcacaaatctaatggcaggtgacagagttattgtaagtggagaagaaaggtcactgtttgctttgtctagaggatatgtgaaggagattaacatgacaacagtaacttgtttattagacagaaacttgtcggtccttccagaatcaactttgttcagattagaccaagaagaaaaaaattgtgatatagataccccattaggaaatctttccaaattgatggaaaacacgtttgtcagcaaaaaacttcgagatttaattattgactttcgtgaacctcagtttatatcctaccttagttctgttcttccacatgatgcaaaggatacagttgcctgcattctaaagggtttgaataagcctcagaggcaagcgatgaaaaaggtacttctttcaaaagactacacactcatcgtgggtatgcctgggacaggaaaaacaactacgatatgtactctcgtaagaattctctacgcctgtggttttagcgttttgttgaccagctatacacactctgctgttgacaatattcttttgaagttagccaagtttaaaataggatttttgcgtttgggtcagattcagaaggttcatccagctatccagcaatttacagagcaagaaatttgcagatcaaagtccattaaatccttagctcttctagaagaactctacaatagtcaacttatagttgcaacaacatgtatgggaataaaccatccaatattttcccgtaaaatttttgatttttgtattgtggatgaagcctctcaaattagccaaccaatttgtctgggccccctttttttttcacggagatttgtgttagtgggggaccatcagcagcttcctcccctggtgctaaaccgtgaagcaagagctcttggcatgagtgaaagcttattcaagaggctggagcagaataagagtgctgttgtacagttaaccgtgcagtacagaatgaacagtaaaattatgtccttaagtaataagctgacctatgagggcaagctggagtgtggatcagacaaagtggccaatgcagtgataaacctacgtcactttaaagatgtgaagctggaactggaattttatgctgactattctgataatccttggttgatgggagtatttgaacccaacaatcctgtttgtttccttaatacagacaaggttccagcgccagaacaagttgaaaaaggtggtgtgagcaatgtaacagaagccaaactcatagttttcctaacctccatttttgttaaggctggatgcagtccctctgatattggtattattgcaccgtacaggcagcaattaaagatcatcaatgatttattggcacgttctattgggatggtcgaagttaatacagtagacaaataccaaggaagggacaaaagtattgtcctagtatcttttgttagaagtaataaggatggaactgttggtgaactcttgaaagattggcgacgtcttaatgttgctataaccagagccaaacataaactgattcttctggggtgtgtgccctcactaaattgctatcctcctttggagaagctgcttaatcatttaaactcagaaaaattaatcattgatcttccatcaagagaacatgaaagtctttgccacatattgggtgactttcaaagagaataaaacactatttcccttgccttttcatactagggcagtatctcctctagctagtgcccatacagaaaattctatcaccatacaaaatttaatgcagtatttatgttttaaagcacaggtgtaccgaaaactgtgaaaagtctgaatttatgggttctatgcatgcatttttgcctaacctagagaaagagtttgataaatttttaccagctttgaagatggattaacttttgactttgagctttaaacttttaagtcagacatttcaggactaatttgattttgtagatatcattgtaagaactttatttgaaagactgaataaagggatttgatttgttttcatcatttaagcacagtcttgtgatgatgagaacataagtgtgattcttttctgtattttgaggtccctaatccaaagcccattttgctaggattttttctgctatcagatgtgttttcactctaaacctagtcttttatgacatgaattgattacttcctgttaattttctatcctcccttactatcctccttttttgttttcagtattcagtatttcagtattctagagtagattttgatataaaagaaaataattcttacatcatcttttgcaacaaattttgttttctgaattgataataaatttaaaaagttgattcctattttcacatatgttcatatgcccctatgtttgggggtatcactcagttttcccttttttgtgtaaagatgttttgtaaaacaaaattgtctcaaagtgattatattatatatataaaaagtaacagattttaacaaaggttaaaagattcttggggtaacagattcttctggggcttggaaatcttccatttctcttgagggttttttttaatgagtgttaaatatgttaaaatttttatttctacctcatgtgtttttttaaattattacttgaagttttttatttaataaattttttctactaatgga

SEQ ID NO: 439777 - DNA, 595 bp, Homo sapiens
ggacagctatttcttcctttttttttttaatagagacaggcttttgccatgttgtccgggctggtcttgaacttctggtctccagtgatccacctgcctcggcctcccaaagtactgggattacaggcatgagccactacacctggcctcattctattcttaaatttgcacaggtgtccattgtgtagggatgtgttgtaatatatttaaccattcctttgaacttgaataattgaaaattatatttcttacaggttggtgaactcttgaaagattggcgacgtcttaatgttgctataaccagagccaaacataaactgattcttctggggtgtgtgccctcactaaattgctatcctcctttggagaagctgcttaatcatttaaactcagaaaaattaatatcctttttcttctgtatatggtcacatttgattgcactgttgtgagtatttatttgcttgtttaaattaaagctctcactatgttgcttaagctggtcttgaactcctgggctcaagcgatcctcctgtgtaggcctcccaaagtgctgtgattacagatgtgagccacggcccccagcctataacccttt

SEQ ID NO: 439778 - DNA, 396 bp, Homo sapiens
tgtttccctttgtctagaggatatgtgaaggagattaacatgacaacagtaacttgtttattagacagatttcagaagaaagtggtagcttcctttccaagaacagttctgagcacaggaatggataaccggtacctggtgttggcagtcaatactgagacgctttacagccccagaccctgaaaggtcagaaggctgtcttattctcaatatgcattttattttattacccagtctgctcctgacatgaaataaagctcccaaaattaaattctggccctcagaccccactacaggacttaattaacctcacgttcaaggtgtacataatagagtagaggcagccagtagcaatgtatttctgagtgcattcctgcctcccttgagacaaagggc

SEQ ID NO: 439779 - DNA, 4360 bp, Homo sapiens
gttggcgcatgcgcgcgaggtgcgcaggctcgcgcctttttcccttttctaagctttctgtgttacccccggttccgctgtcttttctgtctacagtttgcgatccccgcgtccaggatggagcagctgaacgaactggagctgctgatggagaagagtttttgggaggaggcggagctgccggcggagctatttcagaagaaagtggtagcttcctttccaagaacagttctgagcacaggaatggataaccggtacctggtgttggcagtcaatactgtacagaacaaagagggaaactgtgaaaagcgcctggtcatcactgcttcacagtcactagaaaataaagaactatgcatccttaggaatgactggtgttctgttccagtagagccaggagatatcattcatttggagggagactgcacatctgacacttggataatagataaagattttggatatttgattctgtatccagacatgctgatttctggcaccagcatagccagtagtattcgatgtatgagaagagctgtcctgagtgaaacttttaggagctctgatccagccacacgccaaatgctaattggtacggttctccatgaggtgtttcaaaaagccataaataatagctttgccccagaaaagctacaagaacttgcttttcaaacaattcaagaaataagacatttgaaggaaatgtaccgcttaaatctaagtcaagatgaaataaaacaagaagtagaggactatcttccttcgttttgtaaatgggcaggagatttcatgcataaaaacacttcgactgacttccctcagatgcagctctctctgccaagtgataatagtaaggataattcaacatgtaacattgaagtcgtgaaaccaatggatattgaagaaagcatttggtcccctaggtttggattgaaaggcaaaatagatgttacagttggtgtgaaaatacatcgagggtataaaacaaaatacaagataatgccgctggaacttaaaactggcaaagaatcaaattctattgaacaccgtagtcaggttgttctgtacactctactaagccaagagagaagagctgatccagaggctggcttgcttctctacctcaagactggtcagatgtaccctgtgcctgccaaccatctagataaaagagaattattaaagctaagaaaccagatggcattctcattgtttcaccgtattagcaaatctgctactagacagaagacacagcttgcttctttgccacaaataattgaggaagagaaaacttgtaaatattgttcacaaattggcaattgtgctctttatagcagagcagttgaacaacagatggattgtagttcagtcccaattgtgatgctgcccaaaatagaagaagaaacccagcatctgaagcaaacacacttagaatatttcagcctttggtgtctaatgttaaccctggagtcacaatcgaaggataataaaaagaatcaccaaaatatctggctaatgcctgcttcggaaatggagaagagtggcagttgcattggaaacctgattagaatggaacatgtaaagatagtttgtgatgggcaatatttacataatttccaatgtaaacatggtgccatacctgtcacaaatctaatggcaggtgacagagttattgtaagtggagaagaaaggtcactgtttgctttgtctagaggatatgtgaaggagattaacatgacaacagtaacttgtttattagacagaaacttgtcggtccttccagaatcaactttgttcagattagaccaagaagaaaaaaattgtgatatagataccccattaggaaatctttccaaattgatggaaaacacgtttgtcagcaaaaaacttcgagatttaattattgactttcgtgaacctcagtttatatcctaccttagttctgttcttccacatgatgcaaaggatacagttgcctgcattctaaagggtttgaataagcctcagaggcaagcgatgaaaaaggtacttctttcaaaagactacacactcatcgtgggtatgcctgggacaggaaaaacaactacgatatgtactctcgtaagaattctctacgcctgtggttttagcgttttgttgaccagctatacacactctgctgttgacaatattcttttgaagttagccaagtttaaaataggatttttgcgtttgggtcagattcagaaggttcatccagctatccagcaatttacagagcaagaaatttgcagatcaaagtccattaaatccttagctcttctagaagaactctacaatagtcaacttatagttgcaacaacatgtatgggaataaaccatccaatattttcccgtaaaatttttgatttttgtattgtggatgaagcctctcaaattagccaaccaatttgtctgggccccctttttttttcacggagatttgtgttagtgggggaccatcagcagcttcctcccctggtgctaaaccgtgaagcaagagctcttggcatgagtgaaagcttattcaagaggctggagcagaataagagtgctgttgtacagttaaccgtgcagtacagaatgaacaggtatttgtaacagtgttagctaggagtggttttcatgtttgtttccatctaccaaaactaaagttatcttttgtaattcccttagtaaaattatgtccttaagtaataagctgacctatgagggcaagctggagtgtggatcagacaaagtggccaatgcagtgataaacctacgtcactttaaagatgtgaagctggaactggaattttatgctgactattctgataatccttggttgatgggagtatttgaacccaacaatcctgtttgtttccttaatacagacaaggttccagcgccagaacaagttgaaaaaggtggtgtgagcaatgtaacagaagccaaactcatagttttcctaacctccatttttgttaaggctggatgcagtccctctgatattggtattattgcaccgtacaggcagcaattaaagatcatcaatgatttattggcacgttctattgggatggtcgaagttaatacagtagacaaataccaaggaagggacaaaagtattgtcctagtatcttttgttagaagtaataaggatggaactgttggtgaactcttgaaagattggcgacgtcttaatgttgctataaccagagccaaacataaactgattcttctggggtgtgtgccctcactaaattgctatcctcctttggagaagctgcttaatcatttaaactcagaaaaattaatcattgatcttccatcaagagaacatgaaagtctttgccacatattgggtgactttcaaagagaataaaacactatttcccttgccttttcatactagggcagtatctcctctagctagtgcccatacagaaaattctatcaccatacaaaatttaatgcagtatttatgttttaaagcacaggtgtaccgaaaactgtgaaaagtctgaatttatgggttctatgcatgcatttttgcctaacctagagaaagagtttgataaatttttaccagctttgaagatggattaacttttgactttgagctttaaacttttaagtcagacatttcaggactaatttgattttgtagatatcattgtaagaactttatttgaaagactgaataaagggatttgatttgttttcatcatttaagcacagtcttgtgatgatgagaacataagtgtgattcttttctgtattttgaggtccctaatccaaagcccattttgctaggattttttctgctatcagatgtgttttcactctaaacctagtcttttatgacatgaattgattacttcctgttaattttctatcctcccttactatcctccttttttgttttcagtattcagtatttcagtattctagagtagattttgatataaaagaaaataattcttacatcatcttttgcaacaaattttgttttctgaattgataataaatttaaaaagttgattcctattttcacatatgttcatatgcccctatgtttgggggtatcactcagttttcccttttttgtgtaaagatgttttgtaaaacaaaattgtctcaaagtgattatattatatatataaaaagtaacagattttaacaaaggttaaaagattcttggggtaacagattcttctggggcttggaaatcttccatttctcttgagggttttttttaatgagtgttaaatatgttaaaatttttatttctacctcatgtgtttttttaaattattacttgaagttttttatttaataaattttttctactaatgga

SEQ ID NO: 439780 - DNA, 2377 bp, Homo sapiens
tcttttttctcttacccattattaggtaagaattctctacgcctgtggttttagcgttttgttgaccagctatacacactctgctgttgacaatattcttttgaagttagccaagtttaaaataggatttttgcgtttgggtcagattcagaaggttcatccagctatccagcaatttacagagcaagaaatttgcagatcaaagtccattaaatccttagctcttctagaagaactctacaatagtcaacttatagttgcaacaacatgtatgggaataaaccatccaatattttcccgtaaaatttttgatttttgtattgtggatgaagcctctcaaattagccaaccaatttgtctgggccccctttttttttcacggagatttgtgttagtgggggaccatcagcagcttcctcccctggtgctaaaccgtgaagcaaggtaggcagacacttaagtgttaattttaaactagattattttcaaggaacagatttagtacactgataaacatgaatctgatttattgacagagctcttggcatgagtgaaagcttattcaagaggctggagcagaataagagtgctgttgtacagttaaccgtgcagtacagaatgaacaggtatttgtaacagtgttagctaggagtggttttcatgtttgtttccatctaccaaaactaaagttatcttttgtaattcccttagtaaaattatgtccttaagtaataagctgacctatgagggcaagctggagtgtggatcagacaaagtggccaatgcagtgataaacctacgtcactttaaagatgtgaagctggaactggaattttatgctgactattctgataatccttggttgatgggagtatttgaacccaacaatcctgtttgtttccttaatacagacaaggttccagcgccagaacaagttgaaaaaggtggtgtgagcaatgtaacagaagccaaactcatagttttcctaacctccatttttgttaaggctggatgcagtccctctgatattggtattattgcaccgtacaggcagcaattaaagatcatcaatgatttattggcacgttctattgggatggtcgaagttaatacagtagacaaataccaaggaagggacaaaagtattgtcctagtatcttttgttagaagtaataaggatggaactgttggtgaactcttgaaagattggcgacgtcttaatgttgctataaccagagccaaacataaactgattcttctggggtgtgtgccctcactaaattgctatcctcctttggagaagctgcttaatcatttaaactcagaaaaattaatcattgatcttccatcaagagaacatgaaagtctttgccacatattgggtgactttcaaagagaataaaacactatttcccttgccttttcatactagggcagtatctcctctagctagtgcccatacagaaaattctatcaccatacaaaatttaatgcagtatttatgttttaaagcacaggtgtaccgaaaactgtgaaaagtctgaatttatgggttctatgcatgcatttttgcctaacctagagaaagagtttgataaatttttaccagctttgaagatggattaacttttgactttgagctttaaacttttaagtcagacatttcaggactaatttgattttgtagatatcattgtaagaactttatttgaaagactgaataaagggatttgatttgttttcatcatttaagcacagtcttgtgatgatgagaacataagtgtgattcttttctgtattttgaggtccctaatccaaagcccattttgctaggattttttctgctatcagatgtgttttcactctaaacctagtcttttatgacatgaattgattacttcctgttaattttctatcctcccttactatcctccttttttgttttcagtattcagtatttcagtattctagagtagattttgatataaaagaaaataattcttacatcatcttttgcaacaaattttgttttctgaattgataataaatttaaaaagttgattcctattttcacatatgttcatatgcccctatgtttgggggtatcactcagttttcccttttttgtgtaaagatgttttgtaaaacaaaattgtctcaaagtgattatattatatatataaaaagtaacagattttaacaaaggttaaaagattcttggggtaacagattcttctggggcttggaaatcttccatttctcttgagggttttttttaatgagtgttaaatatgttaaaatttttatttctacctcatgtgtttttttaaattattacttgaagttttttatttaataaattttttctactaatgga

SEQ ID NO: 439781 - DNA, 2308 bp, Homo sapiens
gttatttttgaatttaaatgtaggtttgaataagcctcagaggcaagcgatgaaaaaggtacttctttcaaaagactacacactcatcgtgggtatgcctgggacaggaaaaacaactacgatatgtactctcgtaagaattctctacgcctgtggttttagcgttttgttgaccagctatacacactctgctgttgacaatattcttttgaagttagccaagtttaaaataggatttttgcgtttgggtcagattcagaaggttcatccagctatccagcaatttacagagcaagaaatttgcagatcaaagtccattaaatccttagctcttctagaagaactctacaatagtcaacttatagttgcaacaacatgtatgggaataaaccatccaatattttcccgtaaaatttttgatttttgtattgtggatgaagcctctcaaattagccaaccaatttgtctgggccccctttttttttcacggagatttgtgttagtgggggaccatcagcagcttcctcccctggtgctaaaccgtgaagcaagagctcttggcatgagtgaaagcttattcaagaggctggagcagaataagagtgctgttgtacagttaaccgtgcagtacagaatgaacagtaaaattatgtccttaagtaataagctgacctatgagggcaagctggagtgtggatcagacaaagtggccaatgcagtgataaacctacgtcactttaaagatgtgaagctggaactggaattttatgctgactattctgataatccttggttgatgggagtatttgaacccaacaatcctgtttgtttccttaatacagacaaggttccagcgccagaacaagttgaaaaaggtggtgtgagcaatgtaacagaagccaaactcatagttttcctaacctccatttttgttaaggctggatgcagtccctctgatattggtattattgcaccgtacaggcagcaattaaagatcatcaatgatttattggcacgttctattgggatggtcgaagttaatacagtagacaaataccaaggaagggacaaaagtattgtcctagtatcttttgttagaagtaataaggatggaactgttggtgaactcttgaaagattggcgacgtcttaatgttgctataaccagagccaaacataaactgattcttctggggtgtgtgccctcactaaattgctatcctcctttggagaagctgcttaatcatttaaactcagaaaaattaatcattgatcttccatcaagagaacatgaaagtctttgccacatattgggtgactttcaaagagaataaaacactatttcccttgccttttcatactagggcagtatctcctctagctagtgcccatacagaaaattctatcaccatacaaaatttaatgcagtatttatgttttaaagcacaggtgtaccgaaaactgtgaaaagtctgaatttatgggttctatgcatgcatttttgcctaacctagagaaagagtttgataaatttttaccagctttgaagatggattaacttttgactttgagctttaaacttttaagtcagacatttcaggactaatttgattttgtagatatcattgtaagaactttatttgaaagactgaataaagggatttgatttgttttcatcatttaagcacagtcttgtgatgatgagaacataagtgtgattcttttctgtattttgaggtccctaatccaaagcccattttgctaggattttttctgctatcagatgtgttttcactctaaacctagtcttttatgacatgaattgattacttcctgttaattttctatcctcccttactatcctccttttttgttttcagtattcagtatttcagtattctagagtagattttgatataaaagaaaataattcttacatcatcttttgcaacaaattttgttttctgaattgataataaatttaaaaagttgattcctattttcacatatgttcatatgcccctatgtttgggggtatcactcagttttcccttttttgtgtaaagatgttttgtaaaacaaaattgtctcaaagtgattatattatatatataaaaagtaacagattttaacaaaggttaaaagattcttggggtaacagattcttctggggcttggaaatcttccatttctcttgagggttttttttaatgagtgttaaatatgttaaaatttttatttctacctcatgtgtttttttaaattattacttgaagttttttatttaataaattttttctactaatgga

SEQ ID NO: 439782 - DNA, 1927 bp, Homo sapiens
gttggcgcatgcgcgcgaggtgcgcaggctcgcgcctttttcccttttctaagctttctgtgttacccccggttccgctgtcttttctgtctacagtttgcgatccccgcgtccaggatggagcagctgaacgaactggagctgctgatggagaagagtttttgggaggaggcggagctgccggcggagctatttcagaagaaagtggtagcttcctttccaagaacagttctgagcacaggaatggataaccggtacctggtgttggcagtcaatactgtacagaacaaagagggaaactgtgaaaagcgcctggtcatcactgcttcacagtcactagaaaataaagaactatgcatccttaggaatgactggtgttctgttccagtagagccaggagatatcattcatttggagggagactgcacatctgacacttggataatagataaagattttggatatttgattctgtatccagacatgctgatttctggcaccagcatagccagtagtattcgatgtatgagaagagctgtcctgagtgaaacttttaggagctctgatccagccacacgccaaatgctaattggtacggttctccatgaggtgtttcaaaaagccataaataatagctttgccccagaaaagctacaagaacttgcttttcaaacaattcaagaaataagacatttgaaggaaatgtaccgcttaaatctaagtcaagatgaaataaaacaagaagtagaggactatcttccttcgttttgtaaatgggcaggagatttcatgcataaaaacacttcgactgacttccctcagatgcagctctctctgccaagtgataatagtaaggataattcaacatgtaacattgaagtcgtgaaaccaatggatattgaagaaagcatttggtcccctaggtttggattgaaaggcaaaatagatgttacagttggtgtgaaaatacatcgagggtataaaacaaaatacaagataatgccgctggaacttaaaactggcaaagaatcaaattctattgaacaccgtagtcaggttgttctgtacactctactaagccaagagagaagagctgatccagaggctggcttgcttctctacctcaagactggtcagatgtaccctgtgcctgccaaccatctagataaaagagaattattaaagctaagaaaccagatggcattctcattgtttcaccgtattagcaaatctgctactagacagaagacacagcttgcttctttgccacaaataattgaggaagagaaaacttgtaaatattgttcacaaattggcaattgtgctctttatagcagagcagttgaacaacagatggattgtagttcagtcccaattgtgatgctgcccaaaatagaagaagaaacccagcatctgaagcaaacacacttagaatatttcagcctttggtgtctaatgttaaccctggagtcacaatcgaaggataataaaaagaatcaccaaaatatctggctaatgcctgcttcggaaatggagaagagtggcagttgcattggaaacctgattagaatggaacatgtaaagatagtttgtgatgggcaatatttacataatttccaatgtaaacatggtgccatacctgtcacaaatctaatggcaggtgacagagttattgtaagtggagaagaaaggtcactgtttgctttgtctagaggatatgtgaaggagattaacatgacaacagtaacttgtttattagacaggtaatgaaatgttactttttttgataacagctttattgatatataattcacatctgtgtagttcatccatttaaaatgtacaattcgctggtttttagtatattcacagcgttgtgcagctatcaccacaatcaactttgagtattttcatcaccccaaaaaga

SEQ ID NO: 439783 - DNA, 561 bp, Homo sapiens
ccaatcccagctaattatgtatttttagtagagacggggtttcaccgtgttggttaggctagtcttgaacccctgacctcaggtgatccgcccacctcagcctccccaagtgttgggattacaggcgtaagccattgtgcccggccctaaaatgtttttaaatctgcaagttttacatatgtagtgaaaaagacatgataaactttatttaactcttaaaaagacattcaccttttttttcatagaattattaaagctaagaaaccagatggcattctcattgtttcaccgtattagcaaatctgctactagacagaagacacagcttgcttctttgccacaaataattgaggaagagaaaacttgtaaatattgttcacaaattggcaattgtgctctttatagcaggtaaatattgtctaccaaaggcattatttctagttgagtatgaactcaactaaatacgtttaacactggtggccagacgggcattgataacatcattttagttatttttcctttatattttccttcgtattatttctaaaattaagataatag

SEQ ID NO: 439784 - DNA, 216 bp, Homo sapiens
aacaagtaagttgtaggaaaatgcagacacaatacttacgtatgtaatataaacagaagtttttttctctttggtcttttcatagggagaagagtggcagttgcattggaaacctgattagaatggaacatgtaaagatagtttgtgatgggcaatatttacataatttccaatgtaaacatggtgccatacctgtcacaaatctaatggcaggtg

SEQ ID NO: 439785 - DNA, 4452 bp, Homo sapiens
gttggcgcatgcgcgcgaggtgcgcaggctcgcgcctttttcccttttctaagctttctgtgttacccccggttccgctgtcttttctgtctacagtttgcgatccccgcgtccaggatggagcagctgaacgaactggagctgctgatggagaagagtttttgggaggaggcggagctgccggcggagctatttcagaagaaagtggtagcttcctttccaagaacagttctgagcacaggaatggataaccggtacctggtgttggcagtcaatactgtacagaacaaagagggaaactgtgaaaagcgcctggtcatcactgcttcacagtcactagaaaataaagaactatgcatccttaggaatgactggtgttctgttccagtagagccaggagatatcattcatttggagggagactgcacatctgacacttggataatagataaagattttggatatttgattctgtatccagacatgctgatttctggcaccagcatagccagtagtattcgatgtatgagaagagctgtcctgagtgaaacttttaggagctctgatccagccacacgccaaatgctaattggtacggttctccatgaggtgtttcaaaaagccataaataatagctttgccccagaaaagctacaagaacttgcttttcaaacaattcaagaaataagacatttgaaggaaatgtaccgcttaaatctaagtcaagatgaaataaaacaagaagtagaggactatcttccttcgttttgtaaatgggcaggagatttcatgcataaaaacacttcgactgacttccctcagatgcagctctctctgccaagtgataatagtaaggataattcaacatgtaacattgaagtcgtgaaaccaatggatattgaagaaagcatttggtcccctaggtttggattgaaaggcaaaatagatgttacagttggtgtgaaaatacatcgagggtataaaacaaaatacaagataatgccgctggaacttaaaactggcaaagaatcaaattctattgaacaccgtagtcaggttgttctgtacactctactaagccaagagagaagagctgatccagaggctggcttgcttctctacctcaagactggtcagatgtaccctgtgcctgccaaccatctagataaaagagaattattaaagctaagaaaccagatggcattctcattgtttcaccgtattagcaaatctgctactagacagaagacacagcttgcttctttgccacaaataattgaggaagagaaaacttgtaaatattgttcacaaattggcaattgtgctctttatagcagagcagttgaacaacagatggattgtagttcagtcccaattgtgatgctgcccaaaatagaagaagaaacccagcatctgaagcaaacacacttagaatatttcagcctttggtgtctaatgttaaccctggagtcacaatcgaaggataataaaaagaatcaccaaaatatctggctaatgcctgcttcggaaatggagaagagtggcagttgcattggaaacctgattagaatggaacatgtaaagatagtttgtgatgggcaatatttacataatttccaatgtaaacatggtgccatacctgtcacaaatctaatggcaggtgacagagttattgtaagtggagaagaaaggtcactgtttgctttgtctagaggatatgtgaaggagattaacatgacaacagtaacttgtttattagacagaaacttgtcggtccttccagaatcaactttgttcagattagaccaagaagaaaaaaattgtgatatagataccccattaggaaatctttccaaattgatggaaaacacgtttgtcagcaaaaaacttcgagatttaattattgactttcgtgaacctcagtttatatcctaccttagttctgttcttccacatgatgcaaaggatacagttgcctgcattctaaagggtttgaataagcctcagaggcaagcgatgaaaaaggtacttctttcaaaagactacacactcatcgtgggtatgcctgggacaggaaaaacaactacgatatgtactctcgtaagaattctctacgcctgtggttttagcgttttgttgaccagctatacacactctgctgttgacaatattcttttgaagttagccaagtttaaaataggatttttgcgtttgggtcagattcagaaggttcatccagctatccagcaatttacagagcaagaaatttgcagatcaaagtccattaaatccttagctcttctagaagaactctacaatagtcaacttatagttgcaacaacatgtatgggaataaaccatccaatattttcccgtaaaatttttgatttttgtattgtggatgaagcctctcaaattagccaaccaatttgtctgggccccctttttttttcacggagatttgtgttagtgggggaccatcagcagcttcctcccctggtgctaaaccgtgaagcaaggtaggcagacacttaagtgttaattttaaactagattattttcaaggaacagatttagtacactgataaacatgaatctgatttattgacagagctcttggcatgagtgaaagcttattcaagaggctggagcagaataagagtgctgttgtacagttaaccgtgcagtacagaatgaacaggtatttgtaacagtgttagctaggagtggttttcatgtttgtttccatctaccaaaactaaagttatcttttgtaattcccttagtaaaattatgtccttaagtaataagctgacctatgagggcaagctggagtgtggatcagacaaagtggccaatgcagtgataaacctacgtcactttaaagatgtgaagctggaactggaattttatgctgactattctgataatccttggttgatgggagtatttgaacccaacaatcctgtttgtttccttaatacagacaaggttccagcgccagaacaagttgaaaaaggtggtgtgagcaatgtaacagaagccaaactcatagttttcctaacctccatttttgttaaggctggatgcagtccctctgatattggtattattgcaccgtacaggcagcaattaaagatcatcaatgatttattggcacgttctattgggatggtcgaagttaatacagtagacaaataccaaggaagggacaaaagtattgtcctagtatcttttgttagaagtaataaggatggaactgttggtgaactcttgaaagattggcgacgtcttaatgttgctataaccagagccaaacataaactgattcttctggggtgtgtgccctcactaaattgctatcctcctttggagaagctgcttaatcatttaaactcagaaaaattaatcattgatcttccatcaagagaacatgaaagtctttgccacatattgggtgactttcaaagagaataaaacactatttcccttgccttttcatactagggcagtatctcctctagctagtgcccatacagaaaattctatcaccatacaaaatttaatgcagtatttatgttttaaagcacaggtgtaccgaaaactgtgaaaagtctgaatttatgggttctatgcatgcatttttgcctaacctagagaaagagtttgataaatttttaccagctttgaagatggattaacttttgactttgagctttaaacttttaagtcagacatttcaggactaatttgattttgtagatatcattgtaagaactttatttgaaagactgaataaagggatttgatttgttttcatcatttaagcacagtcttgtgatgatgagaacataagtgtgattcttttctgtattttgaggtccctaatccaaagcccattttgctaggattttttctgctatcagatgtgttttcactctaaacctagtcttttatgacatgaattgattacttcctgttaattttctatcctcccttactatcctccttttttgttttcagtattcagtatttcagtattctagagtagattttgatataaaagaaaataattcttacatcatcttttgcaacaaattttgttttctgaattgataataaatttaaaaagttgattcctattttcacatatgttcatatgcccctatgtttgggggtatcactcagttttcccttttttgtgtaaagatgttttgtaaaacaaaattgtctcaaagtgattatattatatatataaaaagtaacagattttaacaaaggttaaaagattcttggggtaacagattcttctggggcttggaaatcttccatttctcttgagggttttttttaatgagtgttaaatatgttaaaatttttatttctacctcatgtgtttttttaaattattacttgaagttttttatttaataaattttttctactaatgga

SEQ ID NO: 439786 - DNA, 4394 bp, Homo sapiens
gttggcgcatgcgcgcgaggtgcgcaggctcgcgcctttttcccttttctaagctttctgtgttacccccggttccgctgtcttttctgtctacagtttgcgatccccgcgtccaggatggagcagctgaacgaactggagctgctgatggagaagagtttttgggaggaggcggagctgccggcggagctatttcagaagaaagtggtagcttcctttccaagaacagttctgagcacaggaatggataaccggtacctggtgttggcagtcaatactgtacagaacaaagagggaaactgtgaaaagcgcctggtcatcactgcttcacagtcactagaaaataaagaactatgcatccttaggaatgactggtgttctgttccagtagagccaggagatatcattcatttggagggagactgcacatctgacacttggataatagataaagattttggatatttgattctgtatccagacatgctgatttctggcaccagcatagccagtagtattcgatgtatgagaagagctgtcctgagtgaaacttttaggagctctgatccagccacacgccaaatgctaattggtacggttctccatgaggtgtttcaaaaagccataaataatagctttgccccagaaaagctacaagaacttgcttttcaaacaattcaagaaataagacatttgaaggaaatgtaccgcttaaatctaagtcaagatgaaataaaacaagaagtagaggactatcttccttcgttttgtaaatgggcaggagatttcatgcataaaaacacttcgactgacttccctcagatgcagctctctctgccaagtgataatagtaaggataattcaacatgtaacattgaagtcgtgaaaccaatggatattgaagaaagcatttggtcccctaggtttggattgaaaggcaaaatagatgttacagttggtgtgaaaatacatcgagggtataaaacaaaatacaagataatgccgctggaacttaaaactggcaaagaatcaaattctattgaacaccgtagtcaggttgttctgtacactctactaagccaagagagaagagctgatccagaggctggcttgcttctctacctcaagactggtcagatgtaccctgtgcctgccaaccatctagataaaagagaattattaaagctaagaaaccagatggcattctcattgtttcaccgtattagcaaatctgctactagacagaagacacagcttgcttctttgccacaaataattgaggaagagaaaacttgtaaatattgttcacaaattggcaattgtgctctttatagcagagcagttgaacaacagatggattgtagttcagtcccaattgtgatgctgcccaaaatagaagaagaaacccagcatctgaagcaaacacacttagaatatttcagcctttggtgtctaatgttaaccctggagtcacaatcgaaggataataaaaagaatcaccaaaatatctggctaatgcctgcttcggaaatggagaagagtggcagttgcattggaaacctgattagaatggaacatgtaaagatagtttgtgatgggcaatatttacataatttccaatgtaaacatggtgccatacctgtcacaaatctaatggcaggtgacagagttattgtaagtggagaagaaaggtcactgtttgctttgtctagaggatatgtgaaggagattaacatgacaacagtaacttgtttattagacagaaacttgtcggtccttccagaatcaactttgttcagattagaccaagaagaaaaaaattgtgatatagataccccattaggaaatctttccaaattgatggaaaacacgtttgtcagcaaaaaacttcgagatttaattattgactttcgtgaacctcagtttatatcctaccttagttctgttcttccacatgatgcaaaggatacagttgcctgcattctaaagggtttgaataagcctcagaggcaagcgatgaaaaaggtacttctttcaaaagactacacactcatcgtgggtatgcctgggacaggaaaaacaactacgatatgtactctcgtaagaattctctacgcctgtggttttagcgttttgttgaccagctatacacactctgctgttgacaatattcttttgaagttagccaagtttaaaataggatttttgcgtttgggtcagattcagaaggttcatccagctatccagcaatttacagagcaagaaatttgcagatcaaagtccattaaatccttagctcttctagaagaactctacaatagtcaacttatagttgcaacaacatgtatgggaataaaccatccaatattttcccgtaaaatttttgatttttgtattgtggatgaagcctctcaaattagccaaccaatttgtctgggccccctttttttttcacggagatttgtgttagtgggggaccatcagcagcttcctcccctggtgctaaaccgtgaagcaaggtaggcagacacttaagtgttaattttaaactagattattttcaaggaacagatttagtacactgataaacatgaatctgatttattgacagagctcttggcatgagtgaaagcttattcaagaggctggagcagaataagagtgctgttgtacagttaaccgtgcagtacagaatgaacaggtatttgtaacagtgttagctaggagtggttttcatgtttgtttccatctaccaaaactaaagttatcttttgtaattcccttagtaaaattatgtccttaagtaataagctgacctatgagggcaagctggagtgtggatcagacaaagtggccaatgcagtgataaacctacgtcactttaaagatgtgaagctggaactggaattttatgctgactattctgataatccttggttgatgggagtatttgaacccaacaatcctgtttgtttccttaatacagacaaggttccagcgccagaacaagttgaaaaaggtggtgtgagcaatgtaacagaagccaaactcatagttttcctaacctccatttttgttaaggctggatgcagtccctctgatattggtattattgcaccgtacaggcagcaattaaagatcatcaatgatttattggcacgttctattgggatggtcgaagttaatacagtagacaaataccaaggaagggacaaaagtattgtcctagtatcttttgttagaagtaataaggatggaactgttggtgaactcttgaaagattggcgacgtcttaatgttgctataaccagagccaaacataaactgattcttctggggtgtgtgccctcactaaattgctatcctcctttggagaagctgcttaatcatttaaactcagaaaaattaatcattgatcttccatcaagagaacatgaaagtctttgccacatattgggtgactttcaaagagaataaaacactatttcccttgccttttcatactagggcagtatctcctctagctagtgcccatacagaaaattctatcaccatacaaaatttaatgcagtatttatgttttaaagcacaggtgtaccgaaaactgtgaaaagtctgaatttatgggttctatgcatgcatttttgcctaacctagagaaagagtttgataaatttttaccagctttgaagatggattaacttttgactttgagctttaaacttttaagtcagacatttcaggactaatttgattttgtagatatcattgtaagaactttatttgaaagactgaataaagggatttgatttgttttcatcatttaagcacagtcttgtgatgatgagaacataagtgtgattcttttctgtattttgaggtccctaatccaaagcccattttgctaggattttttctgctatcagatgtgttttcactctaaacctagtcttttatgacatgaattgattacttcctgttaattttctatcctcccttactatcctccttttttgttttcagtattcagtatttcagtattctagagtagattttgatataaaagaaaataattcttacatcatcttttgcaacaaattttgttttctgaattgataataaatttaaaaagttgattcctattttcacatatgttcatatgcccctatgtttgggggtatcactcagttttcccttttttgtgtaaagatgttttgtaaaacaaaattgtctcaaagtgattatattatatatataaaaagtaacagattttaacaaaggttaaaagatttttaatgagtgttaaatatgttaaaatttttatttctacctcatgtgtttttttaaattattacttgaagttttttatttaataaattttttctactaatgga

SEQ ID NO: 439787 - DNA, 2873 bp, Homo sapiens
gttggcgcatgcgcgcgaggtgcgcaggctcgcgcctttttcccttttctaagctttctgtgttacccccggttccgctgtcttttctgtctacagtttgcgatccccgcgtccaggatggagcagctgaacgaactggagctgctgatggagaagagtttttgggaggaggcggagctgccggcggagctatttcagaagaaagtggtagcttcctttccaagaacagttctgagcacaggaatggataaccggtacctggtgttggcagtcaatactgtacagaacaaagagggaaactgtgaaaagcgcctggtcatcactgcttcacagtcactagaaaataaagaactatgcatccttaggaatgactggtgttctgttccagtagagccaggagatatcattcatttggagggagactgcacatctgacacttggataatagataaagattttggatatttgattctgtatccagacatgctgatttctggcaccagcatagccagtagtattcgatgtatgagaagagctgtcctgagtgaaacttttaggagctctgatccagccacacgccaaatgctaattggtacggttctccatgaggtgtttcaaaaagccataaataatagctttgccccagaaaagctacaagaacttgcttttcaaacaattcaagaaataagacatttgaaggaaatgtaccgcttaaatctaagtcaagatgaaataaaacaagaagtagaggactatcttccttcgttttgtaaatgggcaggagatttcatgcataaaaacacttcgactgacttccctcagatgcagctctctctgccaagtgataatagtaaggataattcaacatgtaacattgaagtcgtgaaaccaatggatattgaagaaagcatttggtcccctaggtttggattgaaaggcaaaatagatgttacagttggtgtgaaaatacatcgagggtataaaacaaaatacaagataatgccgctggaacttaaaactggcaaagaatcaaattctattgaacaccgtagtcaggttgttctgtacactctactaagccaagagagaagagctgatccagaggctggcttgcttctctacctcaagactggtcagatgtaccctgtgcctgccaaccatctagataaaagagaattattaaagctaagaaaccagatggcattctcattgtttcaccgtattagcaaatctgctactagacagaagacacagcttgcttctttgccacaaataattgaggaagagaaaacttgtaaatattgttcacaaattggcaattgtgctctttatagcagagcagttgaacaacagatggattgtagttcagtcccaattgtgatgctgcccaaaatagaagaagaaacccagcatctgaagcaaacacacttagaatatttcagcctttggtgtctaatgttaaccctggagtcacaatcgaaggataataaaaagaatcaccaaaatatctggctaatgcctgcttcggaaatggagaagagtggcagttgcattggaaacctgattagaatggaacatgtaaagatagtttgtgatgggcaatatttacataatttccaatgtaaacatggtgccatacctgtcacaaatctaatggcaggtgacagagttattgtaagtggagaagaaaggtcactgtttgctttgtctagaggatatgtgaaggagattaacatgacaacagtaacttgtttattagacagaaacttgtcggtccttccagaatcaactttgttcagattagaccaagaagaaaaaaattgtgatatagataccccattaggaaatctttccaaattgatggaaaacacgtttgtcagcaaaaaacttcgagatttaattattgactttcgtgaacctcagtttatatcctaccttagttctgttcttccacatgatgcaaaggatacagttgcctgcattctaaagggtttgaataagcctcagaggcaagcgatgaaaaaggtacttctttcaaaagactacacactcatcgtgggtatgcctgggacaggaaaaacaactacgatatgtactctcgtaagaattctctacgcctgtggttttagcgttttgttgaccagctatacacactctgctgttgacaatattcttttgaagttagccaagtttaaaataggatttttgcgtttgggtcagattcagaaggttcatccagctatccagcaatttacagagcaagaaatttgcagatcaaagtccattaaatccttagctcttctagaagaactctacaatagtcaacttatagttgcaacaacatgtatgggaataaaccatccaatattttcccgtaaaatttttgatttttgtattgtggatgaagcctctcaaattagccaaccaatttgtctgggccccctttttttttcacggagatttgtgttagtgggggaccatcagcagcttcctcccctggtgctaaaccgtgaagcaaggtaggcagacacttaagtgttaattttaaactagattattttcaaggaacagatttagtacactgataaacatgaatctgatttattgacagagctcttggcatgagtgaaagcttattcaagaggctggagcagaataagagtgctgttgtacagttaaccgtgcagtacagaatgaacaggtatttgtaacagtgttagctaggagtggttttcatgtttgtttccatctaccaaaactaaagttatcttttgtaattcccttagtaaaattatgtccttaagtaataagctgacctatgagggcaagctggagtgcagtggtgcaatctcctggtgtctcagaaaaaaaaa

SEQ ID NO: 439788 - DNA, 1433 bp, Homo sapiens
gttggcgcatgcgcgcgaggtgcgcaggctcgcgcctttttcccttttctaagctttctgtgttacccccggttccgctgtcttttctgtctacagtttgcgatccccgcgtccaggatggagcagctgaacgaactggagctgctgatggagaagagtttttgggaggaggcggagctgccggcggagctatttcagaagaaagtggtagcttcctttccaagaacagttctgagcacaggaatggataaccggtacctggtgttggcagtcaatactgtacagaacaaagagggaaactgtgaaaagcgcctggtcatcactgcttcacagtcactagaaaataaagaactatgcatccttaggaatgactggtgttctgttccagtagagccaggagatatcattcatttggagggagactgcacatctgacacttggataatagataaagattttggatatttgattctgtatccagacatgctgatttctggcaccagcatagccagtagtattcgatgtatgagaagagctgtcctgagtgaaacttttaggagctctgatccagccacacgccaaatgctaattggtacggttctccatgaggtgtttcaaaaagccataaataatagctttgccccagaaaagctacaagaacttgcttttcaaacaattcaagaaataagacatttgaaggaaatgtaccgcttaaatctaagtcaagatgaaataaaacaagaagtagaggactatcttccttcgttttgtaaatgggcaggagatttcatgcataaaaacacttcgactgacttccctcagatgcagctctctctgccaagtgataatagtaaggataattcaacatgtaacattgaagtcgtgaaaccaatggatattgaagaaagcatttggtcccctaggtttggattgaaaggcaaaatagatgttacagttggtgtgaaaatacatcgagggtataaaacaaaatacaagataatgccgctggaacttaaaactggcaaagaatcaaattctattgaacaccgtagtcaggttgttctgtacactctactaagccaagagagaagagctgatccagaggctggcttgcttctctacctcaagactggtcagatgtaccctgtgcctgccaaccatctagataaaagagaattattaaagctaagaaaccagatggcattctcattgtttcaccgtattagcaaatctgctactagacagaagacacagcttgcttctttgccacaaataattgaggaagagaaaacttgtaaatattgttcacaaattggcaattgtgctctttatagcagagcagttgaacaacagatggattgtagttcagtcccaattgtgatgctgcccaaaatagaagaagaaacccagatatatacaggggccggctcgat

SEQ ID NO: 439789 - DNA, 2193 bp, Homo sapiens
cctcgctgtacatggcccagcagggcactatgggggtcaggcctgcagcactcacacttggcacctgctccaaaaccctttcaggtctttgaggatctgagccctggcctgggtctcccgccggctcggaaaagctggcctgccgggcagacgagagaaccacacgattcagaaaagcagtgcccttcagcagcctctccaccgtctgggctccccaaaggcagagcgggacgctggaaatgtgtgcgcgctgtggtatgggtgtgcaagtgtgcgaaggcggcgtgttgtgtgagcgagagggtagcggatgtgtgtgtgcgtgtgcgcgcgtggctccgggtgtgcgccgctgcgatagcgggtcctttcccggggcgggcgacgggcgggctgggaaggtctcctcccctcaccacattgagaaatctcagtgagtcaccgagtggttctgcatattaatgagctcgctcgctgcgagggcaggagcggatttaaaagaggccagggcgggcggagggaggctgtggagagagcgcggagacaagcgcagagcgcagcgcacggccacagacagccctgggcatccaccgacggcgcagccggagccagcagagccggaaggcgcgccccgggcagagaaagccgagcagagctgggtggcgtctccgggccgccgctccgacgggccagcgccctccccatgtccctgctcccacgccgcgcccctccggtcagcatgaggctcctggcggccgcgctgctcctgctgctgctggcgctgtacaccgcgcgtgtggacgggtccaaatgcaagtgctcccggaagggacccaagatccgctacagcgacgtgaagaagctggaaatgaagccaaagtacccgcactgcgaggagaagatggttatcatcaccaccaagagcgtgtccaggtaccgaggtcaggagcactgcctgcaccccaagctgcagagcaccaagcgcttcatcaagtggtacaacgcctggaacgagaagcgcagggtctacgaagaatagggtgaaaaacctcagaagggaaaactccaaaccagttgggagacttgtgcaaaggactttgcagattaaaaaaaaaaaaaaaaaaaaaaagcctttctttctcacaggcataagacacaaattatatattgttatgaagcactttttaccaacggtcagtttttacattttatagctgcgtgcgaaaggcttccagatgggagacccatctctcttgtgctccagacttcatcacaggctgctttttatcaaaaaggggaaaactcatgcctttcctttttaaaaaatgcttttttgtatttgtccatacgtcactatacatctgagctttataagcgcccgggaggaacaatgagcttggtggacacatttcattgcagtgttgctccattcctagcttgggaagcttccgcttagaggtcctggcgcctcggcacagctgccacgggctctcctgggcttatggccggtcacagcctcagtgtgactccacagtggcccctgtagccgggcaagcaggagcaggtctctctgcatctgttctctgaggaactcaagtttggttgccagaaaaatgtgcttcattcccccctggttaatttttacacaccctaggaaacatttccaagatcctgtgatggcgagacaaatgatccttaaagaaggtgtggggtctttcccaacctgaggatttctgaaaggttcacaggttcaatatttaatgcttcagaagcatgtgaggttcccaacactgtcagcaaaaaccttaggagaaaacttaaaaatatatgaatacatgcgcaatacacagctacagacacacattctgttgacaagggaaaaccttcaaagcatgtttctttccctcaccacaacagaacatgcagtactaaagcaatatatttgtgattccccatgtaattcttcaatgttaaacagtgcagtcctctttcgaaagctaagatgaccatgcgccctttcctctgtacatatacccttaagaacgccccctccacacactgccccccagtatatgccgcattgtactgctgtgttatatgctatgtacatgtcagaaaccattagcattgcatgcaggtttcatattctttctaagatggaaagtaataaaatatatttgaaatgtacaaaaa

SEQ ID NO: 439790 - DNA, 2935 bp, Homo sapiens
cctcgctgtacatggcccagcagggcactatgggggtcaggcctgcagcactcacacttggcacctgctccaaaaccctttcaggtctttgaggatctgagccctggcctgggtctcccgccggctcggaaaagctggcctgccgggcagacgagagaaccacacgattcagaaaagcagtgcccttcagcagcctctccaccgtctgggctccccaaaggcagagcgggacgctggaaatgtgtgcgcgctgtggtatgggtgtgcaagtgtgcgaaggcggcgtgttgtgtgagcgagagggtagcggatgtgtgtgtgcgtgtgcgcgcgtggctccgggtgtgcgccgctgcgatagcgggtcctttcccggggcgggcgacgggcgggctgggaaggtctcctcccctcaccacattgagaaatctcagtgagtcaccgagtggttctgcatattaatgagctcgctcgctgcgagggcaggagcggatttaaaagaggccagggcgggcggagggaggctgtggagagagcgcggagacaagcgcagagcgcagcgcacggccacagacagccctgggcatccaccgacggcgcagccggagccagcagagccggaaggcgcgccccgggcagagaaagccgagcagagctgggtggcgtctccgggccgccgctccgacgggccagcgccctccccatgtccctgctcccacgccgcgcccctccggtcagcatgaggctcctggcggccgcgctgctcctgctgctgctggcgctgtacaccgcgcgtgtggacgggtccaaatgcaagtgctcccggaagggacccaagatccgctacagcgacgtgaagaagctggaaatgaagccaaagtacccgcactgcgaggagaagatggttatcatcaccaccaagagcgtgtccaggtaccgaggtcaggagcactgcctgcaccccaagctgcagagcaccaagcgcttcatcaagtggtacaacgcctggaacgagaagcgcagggtctacgaagaatagggtgaaaaacctcagaagggaaaactccaaaccagttgggagacttgtgcaaaggactttgcagattaaaaaaaaaaaaaaaaaaaaaaagcctttctttctcacaggcataagacacaaattatatattgttatgaagcactttttaccaacggtcagtttttacattttatagctgcgtgcgaaaggcttccagatgggagacccatctctcttgtgctccagacttcatcacaggctgctttttatcaaaaaggggaaaactcatgcctttcctttttaaaaaatgcttttttgtatttgtccatacgtcactatacatctgagctttataagcgcccgggaggaacaatgagcttggtggacacatttcattgcagtgttgctccattcctagcttgggaagcttccgcttagaggtcctggcgcctcggcacagctgccacgggctctcctgggcttatggccggtcacagcctcagtgtgactccacagtggcccctgtagccgggcaagcaggagcaggtctctctgcatctgttctctgaggaactcaagtttggttgccagaaaaatgtgcttcattcccccctggttaatttttacacaccctaggaaacatttccaagatcctgtgatggcgagacaaatgatccttaaagaaggtgtggggtctttcccaacctgaggatttctgaaaggttcacaggttcaatatttaatgcttcagaagcatgtgaggttcccaacactgtcagcaaaaaccttaggagaaaacttaaaaatatatgaatacatgcgcaatacacagctacagacacacattctgttgacaagggaaaaccttcaaagcatgtttctttccctcaccacaacagaacatgcagtactaaagcaatatatttgtgattccccatgtaattcttcaatgttaaacagtgcagtcctctttcgaaagctaagatgaccatgcgccctttcctctgtacatatacccttaagaacgccccctccacacactgccccccagtatatgccgcattgtactgctgtgttatatgctatgtacatgtcagaaaccattagcattgcatgcaggtttcatattctttctaagatggaaagtaataaaatatatttgaaatgtacaaaaaaaaaaaaaaaaaaaaaaaaaaaaaaaaaaacaaagaaagaaaaagaaaagaaaaagagaaagaaaaaaaaaaaaaagagaaagaaaaaaaaaaaagggggggggcggccacgaagcaacaaaaagaaaagaaaaaaagaacgacaacgaagaggaagcaacggagagacaacaaggataacgagaacaacaagaggtgaaacaaaaagtagcaaaaagagagatgcagggggtagaaaaagagcaaggaggggggacccccacagagaaaaaaaaagcggcggcagggaaaacacccagagagaagggagaaaaaacaaaacgaaagagagagaaactgcacaaacccacaaacggagggaactacacacggacgaagaaaagaaaaaaggaaacaacccaaaacacaaaaacaaaagcaagcagcacagagcagcgagagaaaacaaacgaagaagcaggaggacgaaagcaggatggacgaggcggccggggaggccgaaaggggaaagaagaaaaaacggaaggaggagagagaacggaagacaaagcgagcacgagaaaagagacccagcgagacagcaaaagcgagaaagaggcgagaggaagaagaagaggagaggaggaagaacagcacgagagagacagcagaggaggaaggaacagggaacgaggaagagaggccacgaagagggcagcgagcacgagaagagagatcgaaggcgagaggcaggacaaaagaa

SEQ ID NO: 439791 - DNA, 2103 bp, Homo sapiens
cctcgctgtacatggcccagcagggcactatgggggtcaggcctgcagcactcacacttggcacctgctccaaaaccctttcaggtctttgaggatctgagccctggcctgggtctcccgccggctcggaaaagctggcctgccgggcagacgagagaaccacacgattcagaaaagcagtgcccttcagcagcctctccaccgtctgggctccccaaaggcagagcgggacgctggaaatgtgtgcgcgctgtggtatgggtgtgcaagtgtgcgaaggcggcgtgttgtgtgagcgagagggtagcggatgtgtgtgtgcgtgtgcgcgcgtggctccgggtgtgcgccgctgcgatagcgggtcctttcccggggcgggcgacgggcgggctgggaaggtctcctcccctcaccacattgagaaatctcagtgagtcaccgagtggttctgcatattaatgagctcgctcgctgcgagggcaggagcggatttaaaagaggccagggcgggcggagggaggctgtggagagagcgcggagacaagcgcagagcgcagcgcacggccacagacagccctgggcatccaccgacggcgcagccggagccagcagagccggaaggcgcgccccgggcagagaaagccgagcagagctgggtggcgtctccgggccgccgctccgacgggccagcgccctccccatgtccctgctcccacgccgcgcccctccggtcagcatgaggctcctggcggccgcgctgctcctgctgctgctggcgctgtacaccgcgcgtgtggacgggtccaaatgcaagtgctcccggaagggacccaagatccgctacagcgacgtgaagaagctggaaatgaagccaaagtacccgcactgcgaggagaagatggttatcatcaccaccaagagcgtgtccaggtaccgaggtcaggagcactgcctgcaccccaagctgcagagcaccaagcgcttcatcaagtggtacaacgcctggaacgagaagcgcagggtctacgaagaatagggtgaaaaacctcagaagggaaaactccaaaccagttgggagacttgtgcaaaggactttgcagattaaaaaaaaaaaaaaaaaaaaaaagcctttctttctcacaggcataagacacaaattatatattgttatgaagcactttttaccaacggtcagtttttacattttatagctgcgtgcgaaaggcttccagatgggagacccatctctcttgtgctccagacttcatcacaggctgctttttatcaaaaaggggaaaactcatgcctttcctttttaaaaaatgcttttttgtatttgtccatacgtcactatacatctgagctttataagcgcccgggaggaacaatgagcttggtggacacatttcattgcagtgttgctccattcctagcttgggaagcttccgcttagaggtcctggcgcctcggcacagctgccacgggctctcctgggcttatggccggtcacagcctcagtgtgactccacagtggcccctgtagccgggcaagcaggagcaggtctctctgcatctgttctctgaggaactcaagtttggttgccagaaaaatgtgcttcattcccccctggttaatttttacacaccctaggaaacatttccaagatcctgtgatggcgagacaaatgatccttaaagaaggtgtggggtctttcccaacctgaggatttctgaaaggttcacaggttcaatatttaatgcttcagaagcatgtgaggttcccaacactgtcagcaaaaaccttaggagaaaacttaaaaatatatgaatacatgcgcaatacacagctacagacacacattctgttgacaagggaaaaccttcaaagcatgtttctttccctcaccacaacagaacatgcagtactaaagcaatatatttgtgattccccatgtaattcttcaatgttaaacagtgcagtcctctttcgaaagctaagatgaccatgcgccctttcctctgtacatatacccttaagaacgccccctccacacactgccccccctgcgaacctatgagggatcctctagatcacctcac

SEQ ID NO: 439792 - DNA, 1637 bp, Homo sapiens
aagtcaagtaagggaatgcctcccacccttgctattttctctaaatagagaggctgagtacagacgcggaaagaaacaaggaggtgtgggagcagcccgccatgctagagaaagactacattcctgccactaacagtcggtggccactgggcaaatcttaagtctgtggtgcctcagtttcctcatatgcaaagcgggtttgttccataggcctctgaggacaaaatgagattgcagaagtgagattgcagatggttagaaaagacaaagccacactggtgtgagttttcatggtccccgggaccacatcctcagaaggatccctcccacttctcctgggggttcctgcagttctgggacaggggcattccctgcagaccagacgtgaatgaagccgcttagccagcatcttgtgaacggcctgcctcatgtcctgagccacttacacatgtgttttttctccccagggtctacgaagaatagggtgaaaaacctcagaagggaaaactccaaaccagttgggagacttgtgcaaaggactttgcagattaaaaaaaaaaaaaaaaaaaaaaagcctttctttctcacaggcataagacacaaattatatattgttatgaagcactttttaccaacggtcagtttttacattttatagctgcgtgcgaaaggcttccagatgggagacccatctctcttgtgctccagacttcatcacaggctgctttttatcaaaaaggggaaaactcatgcctttcctttttaaaaaatgcttttttgtatttgtccatacgtcactatacatctgagctttataagcgcccgggaggaacaatgagcttggtggacacatttcattgcagtgttgctccattcctagcttgggaagcttccgcttagaggtcctggcgcctcggcacagctgccacgggctctcctgggcttatggccggtcacagcctcagtgtgactccacagtggcccctgtagccgggcaagcaggagcaggtctctctgcatctgttctctgaggaactcaagtttggttgccagaaaaatgtgcttcattcccccctggttaatttttacacaccctaggaaacatttccaagatcctgtgatggcgagacaaatgatccttaaagaaggtgtggggtctttcccaacctgaggatttctgaaaggttcacaggttcaatatttaatgcttcagaagcatgtgaggttcccaacactgtcagcaaaaaccttaggagaaaacttaaaaatatatgaatacatgcgcaatacacagctacagacacacattctgttgacaagggaaaaccttcaaagcatgtttctttccctcaccacaacagaacatgcagtactaaagcaatatatttgtgattccccatgtaattcttcaatgttaaacagtgcagtcctctttcgaaagctaagatgaccatgcgccctttcctctgtacatatacccttaagaacgccccctccacacactgccccccagtatatgccgcattgtactgctgtgttatatgctatgtacatgtcagaaaccattagcattgcatgcaggtttcatattctttctaagatggaaagtaataaaatatatttgaaatgtacaaaaa

SEQ ID NO: 439793 - DNA, 2147 bp, Homo sapiens
cctcgctgtacatggcccagcagggcactatgggggtcaggcctgcagcactcacacttggcacctgctccaaaaccctttcaggtctttgaggatctgagccctggcctgggtctcccgccggctcggaaaagctggcctgccgggcagacgagagaaccacacgattcagaaaagcagtgcccttcagcagcctctccaccgtctgggctccccaaaggcagagcgggacgctggaaatgtgtgcgcgctgtggtatgggtgtgcaagtgtgcgaaggcggcgtgttgtgtgagcgagagggtagcggatgtgtgtgtgcgtgtgcgcgcgtggctccgggtgtgcgccgctgcgatagcgggtcctttcccggggcgggcgacgggcgggctgggaaggtctcctcccctcaccacattgagaaatctcagtgagtcaccgagtggttctgcatattaatgagctcgctcgctgcgagggcaggagcggatttaaaagaggccagggcgggcggagggaggctgtggagagagcgcggagacaagcgcagagcgcagcgcacggccacagacagccctgggcatccaccgacggcgcagccggagccagcagagccggaaggcgcgccccgggcagagaaagccgagcagagctgggtggcgtctccgggccgccgctccgacgggccagcgccctccccatgtccctgctcccacgccgcgcccctccggtcagcatgaggctcctggcggccgcgctgctcctgctgctgctggcgctgtacaccgcgcgtgtggacgggtccaaatgcaagtgctcccggaagggacccaagatccgctacagcgacgtgaagaagctggaaatgaagccaaagtacccgcactgcgaggagaagatggttatcatcaccaccaagagcgtgtccaggtaccgaggtcaggagcactgcctgcaccccaagctgcagagcaccaagcgcttcatcaagtggtacaacgcctggaacgagaagcgcagggtctacgaagaatagggtgaaaaacctcagaagggaaaactccaaaccagttgggagacttgtgcaaaggactttgcagattaaaaaaaaaaaaaaaaaaaaaaagcctttctttctcacaggcataagacacaaattatatattgttatgaagcactttttaccaacggtcagtttttacattttatagctgcgtgcgaaaggcttccagatgggagacccatctctcttgtgctccagacttcatcacaggctgctttttatcaaaaaggggaaaactcatgcctttcctttttaaaaaatgcttttttgtatttgtccatacgtcactatacatctgagctttataagcgcccgggaggaacaatgagcttggtggacacatttcattgcagtgttgctccattcctagcttgggaagcttccgcttagaggtcctggcgcctcggcacagctgccacgggctctcctgggcttatggccggtcacagcctcagtgtgactccacagtggcccctgtagccgggcaagcaggagcaggtctctctgcatctgttctctgaggaactcaagtttggttgccagaaaaatgtgcttcattcccccctggttaatttttacacaccctaggaaacatttccaagatcctgtgatggcgagacaaatgatccttaaagaaggtgtggggtctttcccaacctgaggatttctgaaaggttcacaggttcaatatttaatgcttcagaagcatgtgaggttcccaacactgtcagcaaaaaccttaggagaaaacttaaaaatatatgaatacatgcgcaatacacagctacagacacacattctgttgacaagggaatactaaagcaatatatttgtgattccccatgtaattcttcaatgttaaacagtgcagtcctctttcgaaagctaagatgaccatgcgccctttcctctgtacatatacccttaagaacgccccctccacacactgccccccagtatatgccgcattgtactgctgtgttatatgctatgtacatgtcagaaaccattagcattgcatgcaggtttcatattctttctaagatggaaagtaataaaatatatttgaaatgtacaaaaa

SEQ ID NO: 439794 - DNA, 1868 bp, Homo sapiens
cctcgctgtacatggcccagcagggcactatgggggtcaggcctgcagcactcacacttggcacctgctccaaaaccctttcaggtctttgaggatctgagccctggcctgggtctcccgccggctcggaaaagctggcctgccgggcagacgagagaaccacacgattcagaaaagcagtgcccttcagcagcctctccaccgtctgggctccccaaaggcagagcgggacgctggaaatgtgtgcgcgctgtggtatgggtgtgcaagtgtgcgaaggcggcgtgttgtgtgagcgagagggtagcggatgtgtgtgtgcgtgtgcgcgcgtggctccgggtgtgcgccgctgcgatagcgggtcctttcccggggcgggcgacgggcgggctgggaaggtctcctcccctcaccacattgagaaatctcagtgagtcaccgagtggttctgcatattaatgagctcgctcgctgcgagggcaggagcggatttaaaagaggccagggcgggcggagggaggctgtggagagagcgcggagacaagcgcagagcgcagcgcacggccacagacagccctgggcatccaccgacggcgcagccggagccagcagagccggaaggcgcgccccgggcagagaaagccgagcagagctgggtggcgtctccgggccgccgctccgacgggccagcgccctccccatgtccctgctcccacgccgcgcccctccggtcagcatgaggctcctggcggccgcgctgctcctgctgctgctggcgctgtacaccgcgcgtgtggacgggtccaaatgcaagtgctcccggaagggacccaagatccgctacagcgacgtgaagaagctggaaatgaagccaaagtacccgcactgcgaggagaagatggttatcatcaccaccaagagcgtgtccaggtaccgaggtcaggagcactgcctgcaccccaagctgcagagcaccaagcgcttcatcaagtggtacaacgcctggaacgagaagcgcagggtctacgaagaatagggtgaaaaacctcagaagggaaaactccaaaccagttgggagacttgtgcaaaggactttgcagattaaaaaaaaaaaaaaaaaaaaaaagcctttctttctcacaggcataagacacaaattatatattgttatgaagcactttttaccaacggtcagtttttacattttatagctgcgtgcgaaaggcttccagatgggagacccatctctcttgtgctccagacttcatcacaggctgctttttatcaaaaaggggaaaactcatgcctttcctttttaaaaaatgcttttttgtatttgtccatacgtcactatacatctgagctttataagcgcccgggaggaacaatgagcttggtggacacatttcattgcagtgttgctccattcctagcttgggaagcttccgcttagaggtcctggcgcctcggcacagctgccacgggctctcctgggcttatggccggtcacagcctcagtgtgactccacagtggcccctgtagccgggcaagcaggagcaggtctctctgcatctgttctctgaggaactcaagtttggttgccagaaaaatgtgcttcattcccccctggttaatttttacacaccctaggaaacatttccaagatcctgtgatggcgagacactcgagggccgcacgggaagaaagacccggagtccggaaggagaacaactcgggagaggggccgcacggggagaaagacccggagtccggaaggagaagaactcgggagaggggccgcgcggggagaaagaacgggagacactcgagtgtctccggaatcgggggtagctgttcgattata

SEQ ID NO: 439795 - DNA, 256 bp, Homo sapiens
aaaaaaaaaaaaaaaaaaagcctttctttctcacaggcataagacacaaattatatattgttatgaagcactttttaccaacggtcagtttttacattttatagctgcgtgcgaaaggcttccagatgggagacccatctctcttgtgctccagacttcatcacaggctgctttttatcaaaaaggggaaaactcatgcctttcctttttaaaaaatgcttttttgtatttgtccatacgtcactatacatctgag

SEQ ID NO: 439796 - DNA, 2111 bp, Homo sapiens
cctcgctgtacatggcccagcagggcactatgggggtcaggcctgcagcactcacacttggcacctgctccaaaaccctttcaggtctttgaggatctgagccctggcctgggtctcccgccggctcggaaaagctggcctgccgggcagacgagagaaccacacgattcagaaaagcagtgcccttcagcagcctctccaccgtctgggctccccaaaggcagagcgggacgctggaaatgtgtgcgcgctgtggtatgggtgtgcaagtgtgcgaaggcggcgtgttgtgtgagcgagagggtagcggatgtgtgtgtgcgtgtgcgcgcgtggctccgggtgtgcgccgctgcgatagcgggtcctttcccggggcgggcgacgggcgggctgggaaggtctcctcccctcaccacattgagaaatctcagtgagtcaccgagtggttctgcatattaatgagctcgctcgctgcgagggcaggagcggatttaaaagaggccagggcgggcggagggaggctgtggagagagcgcggagacaagcgcagagcgcagcgcacggccacagacagccctgggcatccaccgacggcgcagccggagccacgccctccccatgtccctgctcccacgccgcgcccctccggtcagcatgaggctcctggcggccgcgctgctcctgctgctgctggcgctgtacaccgcgcgtgtggacgggtccaaatgcaagtgctcccggaagggacccaagatccgctacagcgacgtgaagaagctggaaatgaagccaaagtacccgcactgcgaggagaagatggttatcatcaccaccaagagcgtgtccaggtaccgaggtcaggagcactgcctgcaccccaagctgcagagcaccaagcgcttcatcaagtggtacaacgcctggaacgagaagcgcagggtctacgaagaatagggtgaaaaacctcagaagggaaaactccaaaccagttgggagacttgtgcaaaggactttgcagattaaaaaaaaaaaaaaaaaaaaaaagcctttctttctcacaggcataagacacaaattatatattgttatgaagcactttttaccaacggtcagtttttacattttatagctgcgtgcgaaaggcttccagatgggagacccatctctcttgtgctccagacttcatcacaggctgctttttatcaaaaaggggaaaactcatgcctttcctttttaaaaaatgcttttttgtatttgtccatacgtcactatacatctgagctttataagcgcccgggaggaacaatgagcttggtggacacatttcattgcagtgttgctccattcctagcttgggaagcttccgcttagaggtcctggcgcctcggcacagctgccacgggctctcctgggcttatggccggtcacagcctcagtgtgactccacagtggcccctgtagccgggcaagcaggagcaggtctctctgcatctgttctctgaggaactcaagtttggttgccagaaaaatgtgcttcattcccccctggttaatttttacacaccctaggaaacatttccaagatcctgtgatggcgagacaaatgatccttaaagaaggtgtggggtctttcccaacctgaggatttctgaaaggttcacaggttcaatatttaatgcttcagaagcatgtgaggttcccaacactgtcagcaaaaaccttaggagaaaacttaaaaatatatgaatacatgcgcaatacacagctacagacacacattctgttgacaagggaaaaccttcaaagcatgtttctttccctcaccacaacagaacatgcagtactaaagcaatatatttgtgattccccatgtaattcttcaatgttaaacagtgcagtcctctttcgaaagctaagatgaccatgcgccctttcctctgtacatatacccttaagaacgccccctccacacactgccccccagtatatgccgcattgtactgctgtgttatatgctatgtacatgtcagaaaccattagcattgcatgcaggtttcatattctttctaagatggaaagtaataaaatatatttgaaatgtacaaaaa

SEQ ID NO: 439797 - DNA, 1390 bp, Homo sapiens
gcatcaggacgactctagtagtatccccttagtctgagcgacgttgaataatcatgtaaattgaagccaatacgatacgctgctctgtgagagataccattgttatcatcaccaccaagagcgtgtccaggtaccgaggtcaggagcactgcctgcaccccaagctgcagagcaccaagcgcttcatcaagtggtacaacgcctggaacgagaagcgcagggtctacgaagaatagggtgaaaaacctcagaagggaaaactccaaaccagttgggagacttgtgcaaaggactttgcagattaaaaaaaaaaaaaaaaaaaaaaagcctttctttctcacaggcataagacacaaattatatattgttatgaagcactttttaccaacggtcagtttttacattttatagctgcgtgcgaaaggcttccagatgggagacccatctctcttgtgctccagacttcatcacaggctgctttttatcaaaaaggggaaaactcatgcctttcctttttaaaaaatgcttttttgtatttgtccatacgtcactatacatctgagctttataagcgcccgggaggaacaatgagcttggtggacacatttcattgcagtgttgctccattcctagcttgggaagcttccgcttagaggtcctggcgcctcggcacagctgccacgggctctcctgggcttatggccggtcacagcctcagtgtgactccacagtggcccctgtagccgggcaagcaggagcaggtctctctgcatctgttctctgaggaactcaagtttggttgccagaaaaatgtgcttcattcccccctggttaatttttacacaccctaggaaacatttccaagatcctgtgatggcgagacaaatgatccttaaagaaggtgtggggtctttcccaacctgaggatttctgaaaggttcacaggttcaatatttaatgcttcagaagcatgtgaggttcccaacactgtcagcaaaaaccttaggagaaaacttaaaaatatatgaatacatgcgcaatacacagctacagacacacattctgttgacaagggaaaaccttcaaagcatgtttctttccctcaccacaacagaacatgcagtactaaagcaatatatttgtgattccccatgtaattcttcaatgttaaacagtgcagtcctctttcgaaagctaagatgaccatgcgccctttcctctgtacatatacccttaagaacgccccctccacacactgccccccagtatatgccgcattgtactgctgtgttatatgctatgtacatgtcagaaaccattagcattgcatgcaggtttcatattctttctaagatggaaagtaataaaatatatttgaaatgtacaaaaa

SEQ ID NO: 439798 - DNA, 1923 bp, Homo sapiens
cctcgctgtacatggcccagcagggcactatgggggtcaggcctgcagcactcacacttggcacctgctccaaaaccctttcaggtctttgaggatctgagccctggcctgggtctcccgccggctcggaaaagctggcctgccgggcagacgagagaaccacacgattcagaaaagcagtgcccttcagcagcctctccaccgtctgggctccccaaaggcagagcgggacgctggaaatgtgtgcgcgctgtggtatgggtgtgcaagtgtgcgaaggcggcgtgttgtgtgagcgagagggtagcggatgtgtgtgtgcgtgtgcgcgcgtggctccgggtgtgcgccgctgcgatagcgggtcctttcccggggcgggcgacgggcgggctgggaaggtctcctcccctcaccacattgagaaatctcagtgagtcaccgagtggttctgcatattaatgagctcgctcgctgcgagggcaggagcggatttaaaagaggccagggcgggcggagggaggctgtggagagagcgcggagacaagcgcagagcgcagcgcacggccacagacagccctgggcatccaccgacggcgcagccggagccagcagagccggaaggcgcgccccgggcagagaaagccgagcagagctgggtggcgtctccgggccgccgctccgacgggccagcgccctccccatgtccctgctcccacgccgcgcccctccggtcagcatgaggctcctggcggccgcgctgctcctgctgctgctggcgctgtacaccgcgcgtgtggacgggtccaaatgcaagtgctcccggaagggacccaagatccgctacagcgacgtgaagaagctggaaatgaagccaaagtacccgcactgcgaggagaagatggttatcatcaccaccaagagcgtgtccaggtaccgaggtcaggagcactgcctgcaccccaagctgcagagcaccaagcgcttcatcaagtggtacaacgcctggaacgagaagcgcagggtctacgaagaatagggtgaaaaacctcagaagggaaaactccaaaccagttgggagacttgtgcaaaggactttgcagattaaaaaaaaaaaaaaaaaaaaaaagcctttctttctcacaggcataagacacaaattatatattgttatgaagcactttttaccaacggtcagtttttacattttatagctgcgtgcgaaaggcttccagatgggagacccatctctcttgtgctccagacttcatcacaggctgctttttatcaaaaaggggaaaactcatgcctttcctttttaaaaaatgcttttttgtatttgtccatacgtcactatacatctgagctttataagcgcccgggaggaacaatgagcttggtggacacatttcattgcagtgttgctccattcctagcttgggaagcttccgcttagaggtcctggcgcctcggcacagctgccacgggctctcctgggcttatggccggtcacagcctcagtgtgactccacagtggcccctgtagccgggcaagcaggagcaggtctctctgcatctgttctctgaggaactcaagtttggttgccagaaaaatgtgcttcattcccccctggttaatttttacacaccctaggaaacatttccaagatcctgtgatggcgagacaaatgatccttaaagaaggtgtggggtctttcccaacctgaggatttctgaaaggttcacaggttcaatatttaatgcttcagaagcatgtgaggttcccaacactgtcagcaaaaaccttaggagaaaacttaaaaatatatgctatgtacatgtcagaaaccattagcattgcatgcaggtttcatattctttctaagatggaaagtaataaaatatatttgaaatgtacaaaaa

SEQ ID NO: 439799 - DNA, 1257 bp, Homo sapiens
cctcgctgtacatggcccagcagggcactatgggggtcaggcctgcagcactcacacttggcacctgctccaaaaccctttcaggtctttgaggatctgagccctggcctgggtctcccgccggctcggaaaagctggcctgccgggcagacgagagaaccacacgattcagaaaagcagtgcccttcagcagcctctccaccgtctgggctccccaaaggcagagcgggacgctggaaatgtgtgcgcgctgtggtatgggtgtgcaagtgtgcgaaggcggcgtgttgtgtgagcgagagggtagcggatgtgtgtgtgcgtgtgcgcgcgtggctccgggtgtgcgccgctgcgatagcgggtcctttcccggggcgggcgacgggcgggctgggaaggtctcctcccctcaccacattgagaaatctcagtgagtcaccgagtggttctgcatattaatgagctcgctcgctgcgagggcaggagcggatttaaaagaggccagggcgggcggagggaggctgtggagagagcgcggagacaagcgcagagcgcagcgcacggccacagacagccctgggcatccaccgacggcgcagccggagccagcagagccggaaggcgcgccccgggcagagaaagccgagcagagctgggtggcgtctccgggccgccgctccgacgggccagcgccctccccatgtccctgctcccacgccgcgcccctccggtcagcatgaggctcctggcggccgcgctgctcctgctgctgctggcgctgtacaccgcgcgtgtggacgggtccaaatgcaagtgctcccggaagggacccaagatccgctacagcgacgtgaagaagctggaaatgaagccaaagtacccgcactgcgaggagaagatggttatcatcaccaccaagagcgtgtccaggtaccgaggtcaggagcactgcctgcaccccaagctgcagagcaccaagcgcttcatcaagtggtacaacgcctggaacgagaagcgcagggtctacgaagaatagggtgaaaaacctcagaagggaaaactccaaaccagttgggagacttgtgcaaaggactttgcagattaaaaaaaaaaaaaaaaaaaaaaagcctttctttctcacaggcataagacacaaattatatattgttatgaagcactttttaccaacggtcagttttcgacagggtattgccacgtcacgacgcgatgaacaacggagagacatcgatctgc

SEQ ID NO: 439800 - DNA, 1043 bp, Homo sapiens
agtttgaaacatctagtctttctaggtgtttaaaagtgtacaacagcatgcgccaccatgcccggccggcttatgatttaaaacatgaattgtttatttctggaattttccacataatatttttggaccaaggttgcctcaggtaacaaactacagaaagtgaaattgcagataaaggggattactgctcctctgctctaaaattggtgtttgggtgatcagaagcaggtagccaatgggaagagcacttctgagtgataactaaagcagtttggtggccttttcacattctccaatgttcaaacatattttccactttccattttctctttcacctcattttgcctctctatcccccatccctgcttatttcttaagcccattgatggcactcattaaattgtatttagggctaatgagtcattgttccttaatatcgttttcaatatgccacaatttaggacacatttaaaattttctaaaacaatatcctaatcaatattgactaatttgagccacattcccaactctaactcagcacacactgccagtcttccccaatatctgtctcctctcaattccccaccacaccttataaaattgtaatcaaagatatctcactctgtcattgttaatctaagaataaaaacactgactttaatacggttttactaagtttcaaccttctaattaggtaggcctctaggtattctgcagatcactgctggtcttgatagccattaatatatgtttgtattatgttatttttcaactaaatcgcagttggaaaaaaacatatttaatattatgcccttggatctgttactgcatcactagcacttgtgatgcaatagaacacttcgcctgtactgaaagggccaagagtaaatgccttgttttgtttttttgttttgttttgttttgctttttgttaaaacatgtctatagagttggcagttaatgctgaatttgtcaaataccccttccaaaattatacttgtatttaaaaaataaatggatctacctaatttctattgatttaa

SEQ ID NO: 439801 - DNA, 5155 bp, Homo sapiens
acgcggcagccacaaacggatgtgaggtgaggcaggagcggcgacctttgaaggaaaaaaggaagtgtttggacgacagcgagcgggagaagcggggtcaaagggagcactatgtctgcggaagtccccgaggcagcctccgcggaggagcagaaggaaatggaagataaagtgactagtccagagaaagcagaagaagcaaaattaaaagcaagatatcctcatctgggacaaaagcctggaggttcagatttcttaaggaaacggttgcagaaagggcaaaaatattttgattctggggattacaacatggctaaagcaaaaatgaagaacaagcaacttcctactgcagctccggataagacggaggtcactggtgaccacattcccactccgcaagaccttcctcaacggaagccgtcccttgttgctagcaagctggctggctgattaagaggctgaactgcatgaatctgctaaatctcattatttctccttaatatgttacttatctactttttatttcctttcattcactagtcatttgagactgacagctttgcaggtagcagtagtgtgtgctgctattgtggaatatacgtgtgtagagtttttgattagtttaacagtgcactggtgaagaggacatgttagagcaacataagtaaactacttgaaaatagttgtatatattacctaacttctagtgtagtactggttctaacaagtaacaagcaagttttaaaattttaatgttttggctttcattacttcatcttaattatagctttgtatgttactcttatttaatataatctctattgtattgatttcttctgtatttaccttttggattttgtaaaacagaagtttaagaccacaagttagaagaaaggtcacatatttcaaacacaactagatggggctctgaaagatttgtatctctgtgcttgaacttgaatggccttaaacctgtttcagctttaacagtagaattttacttgggcaatatttgcccattctggtgtaacttatgtgactctagtgcttaacagctgccgttgaagctaatattcagttctgtagagttagaataccttttgttgttgaagatgtgaatgaagtatgcatgtgcattaactgttgaattcacttttgtgccatttttgtaaatacagtagttttgcacaacctctcacaaatgtctgtattaatttcacatacttaaaaagtagataatgtgccaaccagaagcacaagagttcctacacaaaactctgtaaatcattatagcttttgtataataagagtagtttacaatctcgggcttatagaataccaaactgaaatcttagttcaatctgccatagacttaagcttttcatttgttactaatatccatgacattcagtggccttgtgcaaatacgatatgttgcttaggcatatcttttgtcctatgcagaacctttcattttgatttttatgaaagttgcaattcatgtaatttatataaactttttaaatgtagaaactttttacttccacactcagttttggagaccctagaataaaaggcttcaatactctgcattccatgccctctgccacctgcttttttttcccctttgttctttgactcaaatggtattgagctgtttgttgtatatggaagcataggtgtctatatccttactcttttatataacacaataatggcgttttccttctaatttctcagttgttaacttctttctcttttttttttaggatagggccttgctctgtcacctgagctctagtgcagtagtgcaatcacagctcactgcaaccttactcctaggctcaagttaactattcttgatcctttattattactaatattctacaattgtttaaataaaaggaactttataatgaaacggttcggaatactggctcaagaacctatgtcaagatgagctgaattttggtaaattattttaggaattatgacaagctaattgaattaggcttgtgacaattagagtaatttacatgacaggtaaaactcctattaaaaatgtttagatgtttgcttctgtagatgtcactttagtaaaataccaatttagttttacttgtggcttatctagttagaacttagcagactttactgggacaagtttactgctcttgtaggagctcctctcacaagtagttgtaatgctgtagcatgatactcaggatcagtagcttgagatgttactatttttctcttcatctttgacttgcagagagcctcccgtttttggatccaggcatcttttctgaatcctggttccatcagtatacctgctctcctatgaccccaaatcatagtcaatggtgcctcaaacatagcaccttaagttaaaggctgcctagtgctctgaggaaagcttgctgattatcttcctgatctactcaccccaaaaggcagaaaagcaacacagtcactgctgtggtcatttgtaatgtaaagatcagttatatatatatatttgtaatgagagcaagtatatactcattatagaatcaatttaagaagtttaaaataacccagagtagaatttctatatctagtcttggtttttttcatgaatatttgcaagtaattaccattaaattcacacatgaaagattaatctgaaagatcagagaccatgttattcctgaccacgatagaactgctcctgtggtttgggacaagtaataaaacaactgcttgagttttgtttgtaaaatacataattaatatttgacctacctcaaaatgtattgaggatctgtgaaatgctaagtgcccaaaataaaatattgctgattgtctttttattaaaagtaaatttcctcattaagccaacctgccttctgtaagtcacagtgcttaaatctcaggatttttcattaggagagacctgtcgttaaggatttgtaggtataattgcttagcctccattattggtgcttgggatagagaggttttagatttttgttttttttttgttctgcctcaaagctcagtttattgaagacatttgtaagctattggatcatcacttgaatcaagattttgactagtgagcttaattgtccatttcttacaatttcaaagttacagtctcagaaatggttaattttaataactgtcctatcataaattaatgttggaataaattgaagttgttgataaatacttcatgaaaactaaagtctgaaataaattacttgttttatgtccaatagctactacatttgatagaacagttttgaggaacatttcattcttgaacgcagcatctgacatggttctcagcaagttggaatagtaaggattattggcttgtttcgatgagtggaagcggcatgtttgtagcatacaagttattcaataatcttgtgctgatgacctaaaaatatgtcttaactattcatcaaggaaagcctggtgaagcctttacttgttactacttcaacagttggaattagttgctctttttacttgatgaaacaaaactatacctctgaatatttatggatactttttactaaatcaggcttgtgttcttaatccaaattagtaaagttttatggaagctgaaatgtaatacagtagtctccccttatctgtaagagatacattccaagacccctagtggatgcctgaaacctcagatagtactgaaccctttatcaactatgttttttcagtctgacaaccaaggcggctactaagtgactaaggggcaggtagtatacagtgtggataagcaggacaaaggggtgattcacatcccaggcaggacagagcaggagatcatgagatttcatcactcaggatggcttgtgatttattttattttattcttttttttttttgagatggagtctcactcttgcccaggctggagtgcagtggtgcgatcttggctcactgcaacctctgcctcctgggttcaagcagttctcctgcctcagcctcccaagtagctgggattacaggcgtccgccaccatgcccagccaatttttgtacttttagtagagatggggtttcaccatgttggccaggctggtcttgaactcctgacctcaggtgatccactcgcctcggcctcccaaagtgctgggattataggcatgcgccaccatgcccggccggcttatgatttaaaacatgaattgtttatttctggaattttccacataatatttttggaccaaggttgcctcaggtaacaaactacagaaagtgaaattgcagataaaggggattactgctcctctgctctaaaattggtgtttgggtgatcagaagcaggtagccaatgggaagagcacttctgagtgataactaaagcagtttggtggccttttcacattctccaatgttcaaacatattttccactttccattttctctttcacctcattttgcctctctatcccccatccctgcttatttcttaagcccattgatggcactcattaaattgtatttagggctaatgagtcattgttccttaatatcgttttcaatatgccacaatttaggacacatttaaaattttctaaaacaatatcctaatcaatattgactaatttgagccacattcccaactctaactcagcacacactgccagtcttccccaatatctgtctcctctcaattccccaccacaccttataaaattgtaatcaaagatatctcactctgtcattgttaatctaagaataaaaacactgactttaatacggttttactaagtttcaaccttctaattaggtaggcctctaggtattctgcagatcactgctggtcttgatagccattaatatatgtttgtattatgttatttttcaactaaatcgcagttggaaaaaaacatatttaatattatgcccttggatctgttactgcatcactagcacttgtgatgcaatagaacacttcgcctgtactgaaagggccaagagtaaatgccttgttttgtttttttgttttgttttgttttgctttttgttaaaacatgtctatagagttggcagttaatgctgaatttgtcaaataccccttccaaaattatacttgtatttaaaaaataaatggatctacctaatttctattgatttaa

SEQ ID NO: 439802 - DNA, 5158 bp, Homo sapiens
agatagagatgttttaaaggcttctgggtttgatttcttagtcagatgctgtggtacttggcatttaacaactagaattcagaatccagatttttaaaggtgaattattttaaataactgagttgtaatagagaagtaatttatttgaaattattttaggaaatggaagataaagtgactagtccagagaaagcagaagaagcaaaattaaaagcaagatatcctcatctgggacaaaagcctggaggttcagatttcttaaggaaacggttgcagaaagggcaaaaatattttgattctggggattacaacatggctaaagcaaaaatgaagaacaagcaacttcctactgcagctccggataagacggaggtcactggtgaccacattcccactccgcaagaccttcctcaacggaagccgtcccttgttgctagcaagctggctggctgattaagaggctgaactgcatgaatctgctaaatctcattatttctccttaatatgttacttatctactttttatttcctttcattcactagtcatttgagactgacagctttgcaggtagcagtagtgtgtgctgctattgtggaatatacgtgtgtagagtttttgattagtttaacagtgcactggtgaagaggacatgttagagcaacataagtaaactacttgaaaatagttgtatatattacctaacttctagtgtagtactggttctaacaagtaacaagcaagttttaaaattttaatgttttggctttcattacttcatcttaattatagctttgtatgttactcttatttaatataatctctattgtattgatttcttctgtatttaccttttggattttgtaaaacagaagtttaagaccacaagttagaagaaaggtcacatatttcaaacacaactagatggggctctgaaagatttgtatctctgtgcttgaacttgaatggccttaaacctgtttcagctttaacagtagaattttacttgggcaatatttgcccattctggtgtaacttatgtgactctagtgcttaacagctgccgttgaagctaatattcagttctgtagagttagaataccttttgttgttgaagatgtgaatgaagtatgcatgtgcattaactgttgaattcacttttgtgccatttttgtaaatacagtagttttgcacaacctctcacaaatgtctgtattaatttcacatacttaaaaagtagataatgtgccaaccagaagcacaagagttcctacacaaaactctgtaaatcattatagcttttgtataataagagtagtttacaatctcgggcttatagaataccaaactgaaatcttagttcaatctgccatagacttaagcttttcatttgttactaatatccatgacattcagtggccttgtgcaaatacgatatgttgcttaggcatatcttttgtcctatgcagaacctttcattttgatttttatgaaagttgcaattcatgtaatttatataaactttttaaatgtagaaactttttacttccacactcagttttggagaccctagaataaaaggcttcaatactctgcattccatgccctctgccacctgcttttttttcccctttgttctttgactcaaatggtattgagctgtttgttgtatatggaagcataggtgtctatatccttactcttttatataacacaataatggcgttttccttctaatttctcagttgttaacttctttctcttttttttttaggatagggccttgctctgtcacctgagctctagtgcagtagtgcaatcacagctcactgcaaccttactcctaggctcaagttaactattcttgatcctttattattactaatattctacaattgtttaaataaaaggaactttataatgaaacggttcggaatactggctcaagaacctatgtcaagatgagctgaattttggtaaattattttaggaattatgacaagctaattgaattaggcttgtgacaattagagtaatttacatgacaggtaaaactcctattaaaaatgtttagatgtttgcttctgtagatgtcactttagtaaaataccaatttagttttacttgtggcttatctagttagaacttagcagactttactgggacaagtttactgctcttgtaggagctcctctcacaagtagttgtaatgctgtagcatgatactcaggatcagtagcttgagatgttactatttttctcttcatctttgacttgcagagagcctcccgtttttggatccaggcatcttttctgaatcctggttccatcagtatacctgctctcctatgaccccaaatcatagtcaatggtgcctcaaacatagcaccttaagttaaaggctgcctagtgctctgaggaaagcttgctgattatcttcctgatctactcaccccaaaaggcagaaaagcaacacagtcactgctgtggtcatttgtaatgtaaagatcagttatatatatatatttgtaatgagagcaagtatatactcattatagaatcaatttaagaagtttaaaataacccagagtagaatttctatatctagtcttggtttttttcatgaatatttgcaagtaattaccattaaattcacacatgaaagattaatctgaaagatcagagaccatgttattcctgaccacgatagaactgctcctgtggtttgggacaagtaataaaacaactgcttgagttttgtttgtaaaatacataattaatatttgacctacctcaaaatgtattgaggatctgtgaaatgctaagtgcccaaaataaaatattgctgattgtctttttattaaaagtaaatttcctcattaagccaacctgccttctgtaagtcacagtgcttaaatctcaggatttttcattaggagagacctgtcgttaaggatttgtaggtataattgcttagcctccattattggtgcttgggatagagaggttttagatttttgttttttttttgttctgcctcaaagctcagtttattgaagacatttgtaagctattggatcatcacttgaatcaagattttgactagtgagcttaattgtccatttcttacaatttcaaagttacagtctcagaaatggttaattttaataactgtcctatcataaattaatgttggaataaattgaagttgttgataaatacttcatgaaaactaaagtctgaaataaattacttgttttatgtccaatagctactacatttgatagaacagttttgaggaacatttcattcttgaacgcagcatctgacatggttctcagcaagttggaatagtaaggattattggcttgtttcgatgagtggaagcggcatgtttgtagcatacaagttattcaataatcttgtgctgatgacctaaaaatatgtcttaactattcatcaaggaaagcctggtgaagcctttacttgttactacttcaacagttggaattagttgctctttttacttgatgaaacaaaactatacctctgaatatttatggatactttttactaaatcaggcttgtgttcttaatccaaattagtaaagttttatggaagctgaaatgtaatacagtagtctccccttatctgtaagagatacattccaagacccctagtggatgcctgaaacctcagatagtactgaaccctttatcaactatgttttttcagtctgacaaccaaggcggctactaagtgactaaggggcaggtagtatacagtgtggataagcaggacaaaggggtgattcacatcccaggcaggacagagcaggagatcatgagatttcatcactcaggatggcttgtgatttattttattttattcttttttttttttgagatggagtctcactcttgcccaggctggagtgcagtggtgcgatcttggctcactgcaacctctgcctcctgggttcaagcagttctcctgcctcagcctcccaagtagctgggattacaggcgtccgccaccatgcccagccaatttttgtacttttagtagagatggggtttcaccatgttggccaggctggtcttgaactcctgacctcaggtgatccactcgcctcggcctcccaaagtgctgggattataggcatgcgccaccatgcccggccggcttatgatttaaaacatgaattgtttatttctggaattttccacataatatttttggaccaaggttgcctcaggtaacaaactacagaaagtgaaattgcagataaaggggattactgctcctctgctctaaaattggtgtttgggtgatcagaagcaggtagccaatgggaagagcacttctgagtgataactaaagcagtttggtggccttttcacattctccaatgttcaaacatattttccactttccattttctctttcacctcattttgcctctctatcccccatccctgcttatttcttaagcccattgatggcactcattaaattgtatttagggctaatgagtcattgttccttaatatcgttttcaatatgccacaatttaggacacatttaaaattttctaaaacaatatcctaatcaatattgactaatttgagccacattcccaactctaactcagcacacactgccagtcttccccaatatctgtctcctctcaattccccaccacaccttataaaattgtaatcaaagatatctcactctgtcattgttaatctaagaataaaaacactgactttaatacggttttactaagtttcaaccttctaattaggtaggcctctaggtattctgcagatcactgctggtcttgatagccattaatatatgtttgtattatgttatttttcaactaaatcgcagttggaaaaaaacatatttaatattatgcccttggatctgttactgcatcactagcacttgtgatgcaatagaacacttcgcctgtactgaaagggccaagagtaaatgccttgttttgtttttttgttttgttttgttttgctttttgttaaaacatgtctatagagttggcagttaatgctgaatttgtcaaataccccttccaaaattatacttgtatttaaaaaataaatggatctacctaatttctattgatttaa

SEQ ID NO: 439803 - DNA, 5167 bp, Homo sapiens
  misc_feature (39)..(39): n is a, c, g, or t
  misc_feature (42)..(42): n is a, c, g, or t
  misc_feature (49)..(49): n is a, c, g, or t
  misc_feature (66)..(66): n is a, c, g, or t
  misc_feature (72)..(72): n is a, c, g, or t
  misc_feature (74)..(74): n is a, c, g, or t
tccaagcatcagaacgtgataaagcggggaacataatgncanccggtgnaaatatcgagacacatntaacgngntccggtgtgagcaacggcgggctggagaagcggggtcaaagggagcactatgtctgcggaagtccccgaggcagcctccgcggaggagcagaaggaaatggaagataaagtgactagtccagagaaagcagaagaagcaaaattaaaagcaagatatcctcatctgggacaaaagcctggaggttcagatttcttaaggaaacggttgcagaaagggcaaaaatattttgattctggggattacaacatggctaaagcaaaaatgaagaacaagcaacttcctactgcagctccggataagacggaggtcactggtgaccacattcccactccgcaagaccttcctcaacggaagccgtcccttgttgctagcaagctggctggctgattaagaggctgaactgcatgaatctgctaaatctcattatttctccttaatatgttacttatctactttttatttcctttcattcactagtcatttgagactgacagctttgcaggtagcagtagtgtgtgctgctattgtggaatatacgtgtgtagagtttttgattagtttaacagtgcactggtgaagaggacatgttagagcaacataagtaaactacttgaaaatagttgtatatattacctaacttctagtgtagtactggttctaacaagtaacaagcaagttttaaaattttaatgttttggctttcattacttcatcttaattatagctttgtatgttactcttatttaatataatctctattgtattgatttcttctgtatttaccttttggattttgtaaaacagaagtttaagaccacaagttagaagaaaggtcacatatttcaaacacaactagatggggctctgaaagatttgtatctctgtgcttgaacttgaatggccttaaacctgtttcagctttaacagtagaattttacttgggcaatatttgcccattctggtgtaacttatgtgactctagtgcttaacagctgccgttgaagctaatattcagttctgtagagttagaataccttttgttgttgaagatgtgaatgaagtatgcatgtgcattaactgttgaattcacttttgtgccatttttgtaaatacagtagttttgcacaacctctcacaaatgtctgtattaatttcacatacttaaaaagtagataatgtgccaaccagaagcacaagagttcctacacaaaactctgtaaatcattatagcttttgtataataagagtagtttacaatctcgggcttatagaataccaaactgaaatcttagttcaatctgccatagacttaagcttttcatttgttactaatatccatgacattcagtggccttgtgcaaatacgatatgttgcttaggcatatcttttgtcctatgcagaacctttcattttgatttttatgaaagttgcaattcatgtaatttatataaactttttaaatgtagaaactttttacttccacactcagttttggagaccctagaataaaaggcttcaatactctgcattccatgccctctgccacctgcttttttttcccctttgttctttgactcaaatggtattgagctgtttgttgtatatggaagcataggtgtctatatccttactcttttatataacacaataatggcgttttccttctaatttctcagttgttaacttctttctcttttttttttaggatagggccttgctctgtcacctgagctctagtgcagtagtgcaatcacagctcactgcaaccttactcctaggctcaagttaactattcttgatcctttattattactaatattctacaattgtttaaataaaaggaactttataatgaaacggttcggaatactggctcaagaacctatgtcaagatgagctgaattttggtaaattattttaggaattatgacaagctaattgaattaggcttgtgacaattagagtaatttacatgacaggtaaaactcctattaaaaatgtttagatgtttgcttctgtagatgtcactttagtaaaataccaatttagttttacttgtggcttatctagttagaacttagcagactttactgggacaagtttactgctcttgtaggagctcctctcacaagtagttgtaatgctgtagcatgatactcaggatcagtagcttgagatgttactatttttctcttcatctttgacttgcagagagcctcccgtttttggatccaggcatcttttctgaatcctggttccatcagtatacctgctctcctatgaccccaaatcatagtcaatggtgcctcaaacatagcaccttaagttaaaggctgcctagtgctctgaggaaagcttgctgattatcttcctgatctactcaccccaaaaggcagaaaagcaacacagtcactgctgtggtcatttgtaatgtaaagatcagttatatatatatatttgtaatgagagcaagtatatactcattatagaatcaatttaagaagtttaaaataacccagagtagaatttctatatctagtcttggtttttttcatgaatatttgcaagtaattaccattaaattcacacatgaaagattaatctgaaagatcagagaccatgttattcctgaccacgatagaactgctcctgtggtttgggacaagtaataaaacaactgcttgagttttgtttgtaaaatacataattaatatttgacctacctcaaaatgtattgaggatctgtgaaatgctaagtgcccaaaataaaatattgctgattgtctttttattaaaagtaaatttcctcattaagccaacctgccttctgtaagtcacagtgcttaaatctcaggatttttcattaggagagacctgtcgttaaggatttgtaggtataattgcttagcctccattattggtgcttgggatagagaggttttagatttttgttttttttttgttctgcctcaaagctcagtttattgaagacatttgtaagctattggatcatcacttgaatcaagattttgactagtgagcttaattgtccatttcttacaatttcaaagttacagtctcagaaatggttaattttaataactgtcctatcataaattaatgttggaataaattgaagttgttgataaatacttcatgaaaactaaagtctgaaataaattacttgttttatgtccaatagctactacatttgatagaacagttttgaggaacatttcattcttgaacgcagcatctgacatggttctcagcaagttggaatagtaaggattattggcttgtttcgatgagtggaagcggcatgtttgtagcatacaagttattcaataatcttgtgctgatgacctaaaaatatgtcttaactattcatcaaggaaagcctggtgaagcctttacttgttactacttcaacagttggaattagttgctctttttacttgatgaaacaaaactatacctctgaatatttatggatactttttactaaatcaggcttgtgttcttaatccaaattagtaaagttttatggaagctgaaatgtaatacagtagtctccccttatctgtaagagatacattccaagacccctagtggatgcctgaaacctcagatagtactgaaccctttatcaactatgttttttcagtctgacaaccaaggcggctactaagtgactaaggggcaggtagtatacagtgtggataagcaggacaaaggggtgattcacatcccaggcaggacagagcaggagatcatgagatttcatcactcaggatggcttgtgatttattttattttattcttttttttttttgagatggagtctcactcttgcccaggctggagtgcagtggtgcgatcttggctcactgcaacctctgcctcctgggttcaagcagttctcctgcctcagcctcccaagtagctgggattacaggcgtccgccaccatgcccagccaatttttgtacttttagtagagatggggtttcaccatgttggccaggctggtcttgaactcctgacctcaggtgatccactcgcctcggcctcccaaagtgctgggattataggcatgcgccaccatgcccggccggcttatgatttaaaacatgaattgtttatttctggaattttccacataatatttttggaccaaggttgcctcaggtaacaaactacagaaagtgaaattgcagataaaggggattactgctcctctgctctaaaattggtgtttgggtgatcagaagcaggtagccaatgggaagagcacttctgagtgataactaaagcagtttggtggccttttcacattctccaatgttcaaacatattttccactttccattttctctttcacctcattttgcctctctatcccccatccctgcttatttcttaagcccattgatggcactcattaaattgtatttagggctaatgagtcattgttccttaatatcgttttcaatatgccacaatttaggacacatttaaaattttctaaaacaatatcctaatcaatattgactaatttgagccacattcccaactctaactcagcacacactgccagtcttccccaatatctgtctcctctcaattccccaccacaccttataaaattgtaatcaaagatatctcactctgtcattgttaatctaagaataaaaacactgactttaatacggttttactaagtttcaaccttctaattaggtaggcctctaggtattctgcagatcactgctggtcttgatagccattaatatatgtttgtattatgttatttttcaactaaatcgcagttggaaaaaaacatatttaatattatgcccttggatctgttactgcatcactagcacttgtgatgcaatagaacacttcgcctgtactgaaagggccaagagtaaatgccttgttttgtttttttgttttgttttgttttgctttttgttaaaacatgtctatagagttggcagttaatgctgaatttgtcaaataccccttccaaaattatacttgtatttaaaaaataaatggatctacctaatttctattgatttaa

SEQ ID NO: 439804 - DNA, 5984 bp, Homo sapiens
  misc_feature (5575)..(5575): n is a, c, g, or t
aagagtggtatcaacgcagagtcgccattacggccgggggaaggaaaaaaggaagtgtttggacgacagcgagcgggagaagcggggtcaagtaggtaggggtgcggtgcgggaggggcaggcgggctccggcgtgcgagggccttggccagcggagcgtttcgcggctccgtgtcgtcataaggcggcggccattttcgcgggcggaggcggcccggcgggccctgggagagctgggacgggcggcggccgggtggcctcggccacccgctaattgcatcttttcccggcgtctcgtctgcagagggagcactatgtctgcggaagtccccgaggcagcctccgcggaggagcagaaggaaatggaagataaagtgactagtccagagaaagcagaagaagcaaaattaaaagcaagatatcctcatctgggacaaaagcctggaggttcagatttcttaaggaaacggttgcagaaagggcaaaaatattttgattctggggattacaacatggctaaagcaaaaatgaagaacaagcaacttcctactgcagctccggataagacggaggtcactggtgaccacattcccactccgcaagaccttcctcaacggaagccgtcccttgttgctagcaagctggctggctgattaagaggctgaactgcatgaatctgctaaatctcattatttctccttaatatgttacttatctactttttatttcctttcattcactagtcatttgagactgacagctttgcaggtagcagtagtgtgtgctgctattgtggaatatacgtgtgtagagtttttgattagtttaacagtgcactggtgaagaggacatgttagagcaacataagtaaactacttgaaaatagttgtatatattacctaacttctagtgtagtactggttctaacaagtaacaagcaagttttaaaattttaatgttttggctttcattacttcatcttaattatagctttgtatgttactcttatttaatataatctctattgtattgatttcttctgtatttaccttttggattttgtaaaacagaagtttaagaccacaagttagaagaaaggtcacatatttcaaacacaactagatggggctctgaaagatttgtatctctgtgcttgaacttgaatggccttaaacctgtttcagctttaacagtagaattttacttgggcaatatttgcccattctggtgtaacttatgtgactctagtgcttaacagctgccgttgaagctaatattcagttctgtagagttagaataccttttgttgttgaagatgtgaatgaagtatgcatgtgcattaactgttgaattcacttttgtgccatttttgtaaatacagtagttttgcacaacctctcacaaatgtctgtattaatttcacatacttaaaaagtagataatgtgccaaccagaagcacaagagttcctacacaaaactctgtaaatcattatagcttttgtataataagagtagtttacaatctcgggcttatagaataccaaactgaaatcttagttcaatctgccatagacttaagcttttcatttgttactaatatccatgacattcagtggccttgtgcaaatacgatatgttgcttaggcatatcttttgtcctatgcagaacctttcattttgatttttatgaaagttgcaattcatgtaatttatataaactttttaaatgtagaaactttttacttccacactcagttttggagaccctagaataaaaggcttcaatactctgcattccatgccctctgccacctgcttttttttcccctttgttctttgactcaaatggtattgagctgtttgttgtatatggaagcataggtgtctatatccttactcttttatataacacaataatggcgttttccttctaatttctcagttgttaacttctttctcttttttttttaggatagggccttgctctgtcacctgagctctagtgcagtagtgcaatcacagctcactgcaaccttactcctaggctcaagttaactattcttgatcctttattattactaatattctacaattgtttaaataaaaggaactttataatgaaacggttcggaatactggctcaagaacctatgtcaagatgagctgaattttggtaaattattttaggaattatgacaagctaattgaattaggcttgtgacaattagagtaatttacatgacaggtaaaactcctattaaaaatgtttagatgtttgcttctgtagatgtcactttagtaaaataccaatttagttttacttgtggcttatctagttagaacttagcagactttactgggacaagtttactgctcttgtaggagctcctctcacaagtagttgtaatgctgtagcatgatactcaggatcagtagcttgagatgttactatttttctcttcatctttgacttgcagagagcctcccgtttttggatccaggcatcttttctgaatcctggttccatcagtatacctgctctcctatgaccccaaatcatagtcaatggtgcctcaaacatagcaccttaagttaaaggctgcctagtgctctgaggaaagcttgctgattatcttcctgatctactcaccccaaaaggcagaaaagcaacacagtcactgctgtggtcatttgtaatgtaaagatcagttatatatatatatttgtaatgagagcaagtatatactcattatagaatcaatttaagaagtttaaaataacccagagtagaatttctatatctagtcttggtttttttcatgaatatttgcaagtaattaccattaaattcacacatgaaagattaatctgaaagatcagagaccatgttattcctgaccacgatagaactgctcctgtggtttgggacaagtaataaaacaactgcttgagttttgtttgtaaaatacataattaatatttgacctacctcaaaatgtattgaggatctgtgaaatgctaagtgcccaaaataaaatattgctgattgtctttttattaaaagtaaatttcctcattaagccaacctgccttctgtaagtcacagtgcttaaatctcaggatttttcattaggagagacctgtcgttaaggatttgtaggtataattgcttagcctccattattggtgcttgggatagagaggttttagatttttgttttttttttgttctgcctcaaagctcagtttattgaagacatttgtaagctattggatcatcacttgaatcaagattttgactagtgagcttaattgtccatttcttacaatttcaaagttacagtctcagaaatggttaattttaataactgtcctatcataaattaatgttggaataaattgaagttgttgataaatacttcatgaaaactaaagtctgaaataaattacttgttttatgtccaatagctactacatttgatagaacagttttgaggaacatttcattcttgaacgcagcatctgacatggttctcagcaagttggaatagtaaggattattggcttgtttcgatgagtggaagcggcatgtttgtagcatacaagttattcaataatcttgtgctgatgacctaaaaatatgtcttaactattcatcaaggaaagcctggtgaagcctttacttgttactacttcaacagttggaattagttgctctttttacttgatgaaacaaaactatacctctgaatatttatggatactttttactaaatcaggcttgtgttcttaatccaaattagtaaagttttatggaagctgaaatgtaatacagtagtctccccttatctgtaagagatacattccaagacccctagtggatgcctgaaacctcagatagtactgaaccctttatcaactatgttttttcagtctgacaaccaaggcggctactaagtgactaaggggcaggtagtatacagtgtggataagcaggacaaaggggtgattcacatcccaggcaggacagagcaggagatcatgagatttcatcactcaggatggcttgtgatttattttattttattcttttttttttttgagatggagtctcactcttgcccaggctggagtgcagtggtgcgatcttggctcactgcaacctctgcctcctgggttcaagcagttctcctgcctcagcctcccaagtagctgggattacaggcgtccgccaccatgcccagccaatttttgtacttttagtagagatggggtttcaccatgttggccaggctggtcttgaactcctgacctcaggtgatccactcgcctcggcctcccaaagtgctgggattataggcatgcgccaccatgcccggccggcttatgatttaaaacatgaattgtttatttctggaattttccacataatatttttggaccaaggttgcctcaggtaacaaactacagaaagtgaaattgcagataaaggggattactgctcctctgctctaaaattggtgtttgggtgatcagaagcaggtagccaatgggaagagcacttctgagtgataactaaagcagtttggtggccttttcacattctccaatgttcaaacatattttccactttccattttctctttcacctcattttgcctctctatcccccatccctgcttatttcttaagcccattgatggcactcattaaattgtatttagggctaatgagtcattgttccttaatatcgttttcaatatgccacaatttaggacacatttaaaattttctaaaacaatatcctaatcaatattgactaatttgagccacattcccaactctaactcagcacacactgccagtcttccccaatatctgtctcctctcaattccccaccacaccttataaaattgtaatcaaagatatctcactctgtcattgttaatctaagaataaaaacactgactttaatacggttttactaagtttcaaccttctaattaggtaggcctctaggtattctgcagatcactgctggtcttgatagccattaatatatgtttgtattatgttatttttcaactaaatcgcagttggaaaaaaacatatttaatattatgcccttggatctgttactgcatcactagcacttgtgatgcaatagaacacttcgcctgtactgaaagggccaagagtaaatgccttgttttgtttttttgttttgttttgttttgctttttgttaaaacatgtctatagagttggcagttaatgctgaatttgtcaaataccccttccaaaattatacttgtatttaaaaaataaatggatctacctaatttctattgatttaatttgcagttttgtcttattaaagtggtatgtttttcagtgtattttttctgaagttgatctctttacatttcagctattactgtatgcaggaagaaactgacttgtaatctttgattttttttttttttttgcatttgtaaaggctttgtacttaaggtaggattaaatgtttgcagattgtgaaaaaaaaaaaaaaaaaaaaaaaaaaaaaaaaanaaaaaaaaaaaaaagggggggggggggcaataaaaataatccccgagggggggcgacaagattttaggcacacccaggtttttgtggtcgaaacaggggtggccccacataaggaggagcacacaataaaatacgagcagagacggagcaggcaccggttgaaaaaccacgcgctgagagagacgggaaaccaactgcagcacacggcggaatcactggggaaggaggacccccaaatcgtgcgggggcgggggcacagtatgtgcgggacagcacacaccacaagaaagtaaagccccgcgcatgaaaacatataaacacagagcggcgactcatggggcgcaaccaacagacggaagtagctggcgcgagaacagatactgacaaagaatactatgaaaaaatttag

SEQ ID NO: 439805 - DNA, 5800 bp, Homo sapiens
  misc_feature (5391)..(5391): n is a, c, g, or t
aagagtggtatcaacgcagagtcgccattacggccgggggaaggaaaaaaggaagtgtttggacgacagcgagcgggagaagcggggtcaagtaggtaggggtgcggtgcgggaggggcaggcgggctccggcgtgcgagggccttggccagcggagcgtttcgcggctccgtgtcgtcataaggcggcggccattttcgcgggcggaggcggcccggcgggccctgggagagctgggacgggcggcggccgggtggcctcggccacccgctaattgcatcttttcccggcgtctcgtctgcagagggagcactatgtctgcggaagtccccgaggcagcctccgcggaggagcagaaggaaatggaagataaagtgactagtccagagaaagcagaagaagcaaaattaaaagcaagatatcctcatctgggacaaaagcctggaggttcagatttcttaaggaaacggttgcagaaagggcaaaaatattttgattctggggattacaacatggctaaagcaaaaatgaagaacaagcaacttcctactgcagctccggataagacggaggtcactggtgaccacattcccactccgcaagaccttcctcaacggaagccgtcccttgttgctagcaagctggctggctgattaagaggctgaactgcatgaatctgctaaatctcattatttctccttaatatgttacttatctactttttatttcctttcattcactagtcatttgagactgacagctttgcaggtagcagtagtgtgtgctgctattgtggaatatacgtgtgtagagtttttgattagtttaacagtgcactggtgaagaggacatgttagagcaacataagtaaactacttgaaaatagttgtatatattacctaacttctagtgtagtactggttctaacaagtaacaagcaagttttaaaattttaatgttttggctttcattacttcatcttaattatagctttgtatgttactcttatttaatataatctctattgtattgatttcttctgtatttaccttttggattttgtaaaacagaagtttaagaccacaagttagaagaaaggtcacatatttcaaacacaactagatggggctctgaaagatttgtatctctgtgcttgaacttgaatggccttaaacctgtttcagctttaacagtagaattttacttgggcaatatttgcccattctggtgtaacttatgtgactctagtgcttaacagctgccgttgaagctaatattcagttctgtagagttagaataccttttgttgttgaagatgtgaatgaagtatgcatgtgcattaactgttgaattcacttttgtgccatttttgtaaatacagtagttttgcacaacctctcacaaatgtctgtattaatttcacatacttaaaaagtagataatgtgccaaccagaagcacaagagttcctacacaaaactctgtaaatcattatagcttttgtataataagagtagtttacaatctcgggcttatagaataccaaactgaaatcttagttcaatctgccatagacttaagcttttcatttgttactaatatccatgacattcagtggccttgtgcaaatacgatatgttgcttaggcatatcttttgtcctatgcagaacctttcattttgatttttatgaaagttgcaattcatgtaatttatataaactttttaaatgtagaaactttttacttccacactcagttttggagaccctagaataaaaggcttcaatactctgcattccatgccctctgccacctgcttttttttcccctttgttctttgactcaaatggtattgagctgtttgttgtatatggaagcataggtgtctatatccttactcttttatataacacaataatggcgttttccttctaatttctcagttgttaacttctttctcttttttttttaggatagggccttgctctgtcacctgagctctagtgcagtagtgcaatcacagctcactgcaaccttactcctaggctcaagttaactattcttgatcctttattattactaatattctacaattgtttaaataaaaggaactttataatgaaacggttcggaatactggctcaagaacctatgtcaagatgagctgaattttggtaaattattttaggaattatgacaagctaattgaattaggcttgtgacaattagagtaatttacatgacaggtaaaactcctattaaaaatgtttagatgtttgcttctgtagatgtcactttagtaaaataccaatttagttttacttgtggcttatctagttagaacttagcagactttactgggacaagtttactgctcttgtaggagctcctctcacaagtagttgtaatgctgtagcatgatactcaggatcagtagcttgagatgttactatttttctcttcatctttgacttgcagagagcctcccgtttttggatccaggcatcttttctgaatcctggttccatcagtatacctgctctcctatgaccccaaatcatagtcaatggtgcctcaaacatagcaccttaagttaaaggctgcctagtgctctgaggaaagcttgctgattatcttcctgatctactcaccccaaaaggcagaaaagcaacacagtcactgctgtggtcatttgtaatgtaaagatcagttatatatatatatttgtaatgagagcaagtatatactcattatagaatcaatttaagaagtttaaaataacccagagtagaatttctatatctagtcttggtttttttcatgaatatttgcaagtaattaccattaaattcacacatgaaagattaatctgaaagatcagagaccatgttattcctgaccacgatagaactgctcctgtggtttgggacaagtaataaaacaactgcttgagttttgtttgtaaaatacataattaatatttgacctacctcaaaatgtattgaggatctgtgaaatgctaagtgcccaaaataaaatattgctgattgtctttttattaaaagtaaatttcctcattaagccaacctgccttctgtaagtcacagtgcttaaatctcaggatttttcattaggagagacctgtcgttaaggatttgtaggtataattgcttagcctccattattggtgcttgggatagagaggttttagatttttgttttttttttgttctgcctcaaagctcagtttattgaagacatttgtaagctattggatcatcacttgaatcaagattttgactagtgagcttaattgtccatttcttacaatttcaaagttacagtctcagaaatggttaattttaataactgtcctatcataaattaatgttggaataaattgaagttgttgataaatacttcatgaaaactaaagtctgaaataaattacttgttttatgtccaatagctactacatttgatagaacagttttgaggaacatttcattcttgaacgcagcatctgacatggttctcagcaagttggaatagtaaggattattggcttgtttcgatgagtggaagcggcatgtttgtagcatacaagttattcaataatcttgtgctgatgacctaaaaatatgtcttaactattcatcaaggaaagcctggtgaagcctttacttgttactacttcaacagttggaattagttgctctttttacttgatgaaacaaaactatacctctgaatatttatggatactttttactaaatcaggcttgtgttcttaatccaaattagtaaagttttatggaagctgaaatgtaatacagtagtctccccttatctgtaagagatacattccaagacccctagtggatgcctgaaacctcagatagtactgaaccctttatcaactatgttttttcagtctgacaaccaaggcggctactaagtgactaaggggcaggtagtatacagtgtggataagcaggacaaaggggtgattcacatcccaggcaggacagagcaggagatcatgagatttcatcactcaggatggcttgtgatttattttattttattcttttttttttttgagatggagtctcactcttgcccaggctggagtgcagtggtgcgatcttggctcactgcaacctctgcctcctgggttcaagcagttctcctgcctcagcctcccaagtagctgggattacaggcgtccgccaccatgcccagccaatttttgtacttttagtagagatggggtttcaccatgttggccaggctggtcttgaactcctgacctcaggtgatccactcgcctcggcctcccaaagtgctgggattataggcatgcgccaccatgcccggccggcttatgatttaaaacatgaattgtttatttctggaattttccacataatatttttggaccaaggttgcctcaggtaacaaactacagaaagtgaaattgcagataaaggggattactgctcctctgctctaaaattggtgtttgggtgatcagaagcaggtagccaatgggaagagcacttctgagtgataactaaagcagtttggtggccttttcacattctccaatgttcaaacatattttccactttccattttctctttcacctcattttgcctctctatcccccatccctgcttatttcttaagcccattgatggcactcattaaattgtatttagggctaatgagtcattgttccttaatatcgttttcaatatgccacaatttaggacacatttaaaattttctaaaacaatatcctaatcaatattgactaatttgagccacattcccaactctaactcagcacacactgccagtcttccccaatatctgtctcctctcaattccccaccacaccttataaaattgtaatcaaagatatctcactctgtcattgttaatctaagaataaaaacactgactttaatacggttttactaagtttcaaccttctaattaggtaggcctctaggtattctgcagatcactgctggtcttgatagccattaatatatgtttgtattatgttatttttcaactaaatcgcagttggaaaaaaacatatttaatattatgcccttggatctgttactgcatcactagcacttgtgatgcaatagaacacttcgcctgtactgaaagggccaagagtaaatgccttgttttgtttttttgttttgttttgttttgctttttgttaaaacatgtctatagagttggcagttaatgctgaatttgtcaaataccccttccaaaattatacttgtatttaaaaaataaatggatctacctaatttctattgatttaaaaaaaaaaaaaaaaaaaaaaaaaaaaaaaaaanaaaaaaaaaaaaaagggggggggggggcaataaaaataatccccgagggggggcgacaagattttaggcacacccaggtttttgtggtcgaaacaggggtggccccacataaggaggagcacacaataaaatacgagcagagacggagcaggcaccggttgaaaaaccacgcgctgagagagacgggaaaccaactgcagcacacggcggaatcactggggaaggaggacccccaaatcgtgcgggggcgggggcacagtatgtgcgggacagcacacaccacaagaaagtaaagccccgcgcatgaaaacatataaacacagagcggcgactcatggggcgcaaccaacagacggaagtagctggcgcgagaacagatactgacaaagaatactatgaaaaaatttag

SEQ ID NO: 439806 - DNA, 5415 bp, Homo sapiens
aagagtggtatcaacgcagagtcgccattacggccgggggaaggaaaaaaggaagtgtttggacgacagcgagcgggagaagcggggtcaagtaggtaggggtgcggtgcgggaggggcaggcgggctccggcgtgcgagggccttggccagcggagcgtttcgcggctccgtgtcgtcataaggcggcggccattttcgcgggcggaggcggcccggcgggccctgggagagctgggacgggcggcggccgggtggcctcggccacccgctaattgcatcttttcccggcgtctcgtctgcagagggagcactatgtctgcggaagtccccgaggcagcctccgcggaggagcagaagagtgaacacaacatgctcccttggtctctgcaaccatcgattcctaacagcctagaggaaatggaagataaagtgactagtccagagaaagcagaagaagcaaaattaaaagcaagatatcctcatctgggacaaaagcctggaggttcagatttcttaaggaaacggttgcagaaagggcaaaaatattttgattctggggattacaacatggctaaagcaaaaatgaagaacaagcaacttcctactgcagctccggataagacggaggtcactggtgaccacattcccactccgcaagaccttcctcaacggaagccgtcccttgttgctagcaagctggctggctgattaagaggctgaactgcatgaatctgctaaatctcattatttctccttaatatgttacttatctactttttatttcctttcattcactagtcatttgagactgacagctttgcaggtagcagtagtgtgtgctgctattgtggaatatacgtgtgtagagtttttgattagtttaacagtgcactggtgaagaggacatgttagagcaacataagtaaactacttgaaaatagttgtatatattacctaacttctagtgtagtactggttctaacaagtaacaagcaagttttaaaattttaatgttttggctttcattacttcatcttaattatagctttgtatgttactcttatttaatataatctctattgtattgatttcttctgtatttaccttttggattttgtaaaacagaagtttaagaccacaagttagaagaaaggtcacatatttcaaacacaactagatggggctctgaaagatttgtatctctgtgcttgaacttgaatggccttaaacctgtttcagctttaacagtagaattttacttgggcaatatttgcccattctggtgtaacttatgtgactctagtgcttaacagctgccgttgaagctaatattcagttctgtagagttagaataccttttgttgttgaagatgtgaatgaagtatgcatgtgcattaactgttgaattcacttttgtgccatttttgtaaatacagtagttttgcacaacctctcacaaatgtctgtattaatttcacatacttaaaaagtagataatgtgccaaccagaagcacaagagttcctacacaaaactctgtaaatcattatagcttttgtataataagagtagtttacaatctcgggcttatagaataccaaactgaaatcttagttcaatctgccatagacttaagcttttcatttgttactaatatccatgacattcagtggccttgtgcaaatacgatatgttgcttaggcatatcttttgtcctatgcagaacctttcattttgatttttatgaaagttgcaattcatgtaatttatataaactttttaaatgtagaaactttttacttccacactcagttttggagaccctagaataaaaggcttcaatactctgcattccatgccctctgccacctgcttttttttcccctttgttctttgactcaaatggtattgagctgtttgttgtatatggaagcataggtgtctatatccttactcttttatataacacaataatggcgttttccttctaatttctcagttgttaacttctttctcttttttttttaggatagggccttgctctgtcacctgagctctagtgcagtagtgcaatcacagctcactgcaaccttactcctaggctcaagttaactattcttgatcctttattattactaatattctacaattgtttaaataaaaggaactttataatgaaacggttcggaatactggctcaagaacctatgtcaagatgagctgaattttggtaaattattttaggaattatgacaagctaattgaattaggcttgtgacaattagagtaatttacatgacaggtaaaactcctattaaaaatgtttagatgtttgcttctgtagatgtcactttagtaaaataccaatttagttttacttgtggcttatctagttagaacttagcagactttactgggacaagtttactgctcttgtaggagctcctctcacaagtagttgtaatgctgtagcatgatactcaggatcagtagcttgagatgttactatttttctcttcatctttgacttgcagagagcctcccgtttttggatccaggcatcttttctgaatcctggttccatcagtatacctgctctcctatgaccccaaatcatagtcaatggtgcctcaaacatagcaccttaagttaaaggctgcctagtgctctgaggaaagcttgctgattatcttcctgatctactcaccccaaaaggcagaaaagcaacacagtcactgctgtggtcatttgtaatgtaaagatcagttatatatatatatttgtaatgagagcaagtatatactcattatagaatcaatttaagaagtttaaaataacccagagtagaatttctatatctagtcttggtttttttcatgaatatttgcaagtaattaccattaaattcacacatgaaagattaatctgaaagatcagagaccatgttattcctgaccacgatagaactgctcctgtggtttgggacaagtaataaaacaactgcttgagttttgtttgtaaaatacataattaatatttgacctacctcaaaatgtattgaggatctgtgaaatgctaagtgcccaaaataaaatattgctgattgtctttttattaaaagtaaatttcctcattaagccaacctgccttctgtaagtcacagtgcttaaatctcaggatttttcattaggagagacctgtcgttaaggatttgtaggtataattgcttagcctccattattggtgcttgggatagagaggttttagatttttgttttttttttgttctgcctcaaagctcagtttattgaagacatttgtaagctattggatcatcacttgaatcaagattttgactagtgagcttaattgtccatttcttacaatttcaaagttacagtctcagaaatggttaattttaataactgtcctatcataaattaatgttggaataaattgaagttgttgataaatacttcatgaaaactaaagtctgaaataaattacttgttttatgtccaatagctactacatttgatagaacagttttgaggaacatttcattcttgaacgcagcatctgacatggttctcagcaagttggaatagtaaggattattggcttgtttcgatgagtggaagcggcatgtttgtagcatacaagttattcaataatcttgtgctgatgacctaaaaatatgtcttaactattcatcaaggaaagcctggtgaagcctttacttgttactacttcaacagttggaattagttgctctttttacttgatgaaacaaaactatacctctgaatatttatggatactttttactaaatcaggcttgtgttcttaatccaaattagtaaagttttatggaagctgaaatgtaatacagtagtctccccttatctgtaagagatacattccaagacccctagtggatgcctgaaacctcagatagtactgaaccctttatcaactatgttttttcagtctgacaaccaaggcggctactaagtgactaaggggcaggtagtatacagtgtggataagcaggacaaaggggtgattcacatcccaggcaggacagagcaggagatcatgagatttcatcactcaggatggcttgtgatttattttattttattcttttttttttttgagatggagtctcactcttgcccaggctggagtgcagtggtgcgatcttggctcactgcaacctctgcctcctgggttcaagcagttctcctgcctcagcctcccaagtagctgggattacaggcgtccgccaccatgcccagccaatttttgtacttttagtagagatggggtttcaccatgttggccaggctggtcttgaactcctgacctcaggtgatccactcgcctcggcctcccaaagtgctgggattataggcatgcgccaccatgcccggccggcttatgatttaaaacatgaattgtttatttctggaattttccacataatatttttggaccaaggttgcctcaggtaacaaactacagaaagtgaaattgcagataaaggggattactgctcctctgctctaaaattggtgtttgggtgatcagaagcaggtagccaatgggaagagcacttctgagtgataactaaagcagtttggtggccttttcacattctccaatgttcaaacatattttccactttccattttctctttcacctcattttgcctctctatcccccatccctgcttatttcttaagcccattgatggcactcattaaattgtatttagggctaatgagtcattgttccttaatatcgttttcaatatgccacaatttaggacacatttaaaattttctaaaacaatatcctaatcaatattgactaatttgagccacattcccaactctaactcagcacacactgccagtcttccccaatatctgtctcctctcaattccccaccacaccttataaaattgtaatcaaagatatctcactctgtcattgttaatctaagaataaaaacactgactttaatacggttttactaagtttcaaccttctaattaggtaggcctctaggtattctgcagatcactgctggtcttgatagccattaatatatgtttgtattatgttatttttcaactaaatcgcagttggaaaaaaacatatttaatattatgcccttggatctgttactgcatcactagcacttgtgatgcaatagaacacttcgcctgtactgaaagggccaagagtaaatgccttgttttgtttttttgttttgttttgttttgctttttgttaaaacatgtctatagagttggcagttaatgctgaatttgtcaaataccccttccaaaattatacttgtatttaaaaaataaatggatctacctaatttctattgatttaa

SEQ ID NO: 439807 - DNA, 5026 bp, Homo sapiens
gtacggcatatgtgaccaggcgtcgaggaaatggaagataaagtgactagtccagagaaagcagaagaagcaaaattaaaagcaagatatcctcatctgggacaaaagcctggaggttcagatttcttaaggaaacggttgcagaaagggcaaaaatattttgattctggggattacaacatggctaaagcaaaaatgaagaacaagcaacttcctactgcagctccggataagacggaggtcactggtgaccacattcccactccgcaagaccttcctcaacggaagccgtcccttgttgctagcaagctggctggctgattaagaggctgaactgcatgaatctgctaaatctcattatttctccttaatatgttacttatctactttttatttcctttcattcactagtcatttgagactgacagctttgcaggtagcagtagtgtgtgctgctattgtggaatatacgtgtgtagagtttttgattagtttaacagtgcactggtgaagaggacatgttagagcaacataagtaaactacttgaaaatagttgtatatattacctaacttctagtgtagtactggttctaacaagtaacaagcaagttttaaaattttaatgttttggctttcattacttcatcttaattatagctttgtatgttactcttatttaatataatctctattgtattgatttcttctgtatttaccttttggattttgtaaaacagaagtttaagaccacaagttagaagaaaggtcacatatttcaaacacaactagatggggctctgaaagatttgtatctctgtgcttgaacttgaatggccttaaacctgtttcagctttaacagtagaattttacttgggcaatatttgcccattctggtgtaacttatgtgactctagtgcttaacagctgccgttgaagctaatattcagttctgtagagttagaataccttttgttgttgaagatgtgaatgaagtatgcatgtgcattaactgttgaattcacttttgtgccatttttgtaaatacagtagttttgcacaacctctcacaaatgtctgtattaatttcacatacttaaaaagtagataatgtgccaaccagaagcacaagagttcctacacaaaactctgtaaatcattatagcttttgtataataagagtagtttacaatctcgggcttatagaataccaaactgaaatcttagttcaatctgccatagacttaagcttttcatttgttactaatatccatgacattcagtggccttgtgcaaatacgatatgttgcttaggcatatcttttgtcctatgcagaacctttcattttgatttttatgaaagttgcaattcatgtaatttatataaactttttaaatgtagaaactttttacttccacactcagttttggagaccctagaataaaaggcttcaatactctgcattccatgccctctgccacctgcttttttttcccctttgttctttgactcaaatggtattgagctgtttgttgtatatggaagcataggtgtctatatccttactcttttatataacacaataatggcgttttccttctaatttctcagttgttaacttctttctcttttttttttaggatagggccttgctctgtcacctgagctctagtgcagtagtgcaatcacagctcactgcaaccttactcctaggctcaagttaactattcttgatcctttattattactaatattctacaattgtttaaataaaaggaactttataatgaaacggttcggaatactggctcaagaacctatgtcaagatgagctgaattttggtaaattattttaggaattatgacaagctaattgaattaggcttgtgacaattagagtaatttacatgacaggtaaaactcctattaaaaatgtttagatgtttgcttctgtagatgtcactttagtaaaataccaatttagttttacttgtggcttatctagttagaacttagcagactttactgggacaagtttactgctcttgtaggagctcctctcacaagtagttgtaatgctgtagcatgatactcaggatcagtagcttgagatgttactatttttctcttcatctttgacttgcagagagcctcccgtttttggatccaggcatcttttctgaatcctggttccatcagtatacctgctctcctatgaccccaaatcatagtcaatggtgcctcaaacatagcaccttaagttaaaggctgcctagtgctctgaggaaagcttgctgattatcttcctgatctactcaccccaaaaggcagaaaagcaacacagtcactgctgtggtcatttgtaatgtaaagatcagttatatatatatatttgtaatgagagcaagtatatactcattatagaatcaatttaagaagtttaaaataacccagagtagaatttctatatctagtcttggtttttttcatgaatatttgcaagtaattaccattaaattcacacatgaaagattaatctgaaagatcagagaccatgttattcctgaccacgatagaactgctcctgtggtttgggacaagtaataaaacaactgcttgagttttgtttgtaaaatacataattaatatttgacctacctcaaaatgtattgaggatctgtgaaatgctaagtgcccaaaataaaatattgctgattgtctttttattaaaagtaaatttcctcattaagccaacctgccttctgtaagtcacagtgcttaaatctcaggatttttcattaggagagacctgtcgttaaggatttgtaggtataattgcttagcctccattattggtgcttgggatagagaggttttagatttttgttttttttttgttctgcctcaaagctcagtttattgaagacatttgtaagctattggatcatcacttgaatcaagattttgactagtgagcttaattgtccatttcttacaatttcaaagttacagtctcagaaatggttaattttaataactgtcctatcataaattaatgttggaataaattgaagttgttgataaatacttcatgaaaactaaagtctgaaataaattacttgttttatgtccaatagctactacatttgatagaacagttttgaggaacatttcattcttgaacgcagcatctgacatggttctcagcaagttggaatagtaaggattattggcttgtttcgatgagtggaagcggcatgtttgtagcatacaagttattcaataatcttgtgctgatgacctaaaaatatgtcttaactattcatcaaggaaagcctggtgaagcctttacttgttactacttcaacagttggaattagttgctctttttacttgatgaaacaaaactatacctctgaatatttatggatactttttactaaatcaggcttgtgttcttaatccaaattagtaaagttttatggaagctgaaatgtaatacagtagtctccccttatctgtaagagatacattccaagacccctagtggatgcctgaaacctcagatagtactgaaccctttatcaactatgttttttcagtctgacaaccaaggcggctactaagtgactaaggggcaggtagtatacagtgtggataagcaggacaaaggggtgattcacatcccaggcaggacagagcaggagatcatgagatttcatcactcaggatggcttgtgatttattttattttattcttttttttttttgagatggagtctcactcttgcccaggctggagtgcagtggtgcgatcttggctcactgcaacctctgcctcctgggttcaagcagttctcctgcctcagcctcccaagtagctgggattacaggcgtccgccaccatgcccagccaatttttgtacttttagtagagatggggtttcaccatgttggccaggctggtcttgaactcctgacctcaggtgatccactcgcctcggcctcccaaagtgctgggattataggcatgcgccaccatgcccggccggcttatgatttaaaacatgaattgtttatttctggaattttccacataatatttttggaccaaggttgcctcaggtaacaaactacagaaagtgaaattgcagataaaggggattactgctcctctgctctaaaattggtgtttgggtgatcagaagcaggtagccaatgggaagagcacttctgagtgataactaaagcagtttggtggccttttcacattctccaatgttcaaacatattttccactttccattttctctttcacctcattttgcctctctatcccccatccctgcttatttcttaagcccattgatggcactcattaaattgtatttagggctaatgagtcattgttccttaatatcgttttcaatatgccacaatttaggacacatttaaaattttctaaaacaatatcctaatcaatattgactaatttgagccacattcccaactctaactcagcacacactgccagtcttccccaatatctgtctcctctcaattccccaccacaccttataaaattgtaatcaaagatatctcactctgtcattgttaatctaagaataaaaacactgactttaatacggttttactaagtttcaaccttctaattaggtaggcctctaggtattctgcagatcactgctggtcttgatagccattaatatatgtttgtattatgttatttttcaactaaatcgcagttggaaaaaaacatatttaatattatgcccttggatctgttactgcatcactagcacttgtgatgcaatagaacacttcgcctgtactgaaagggccaagagtaaatgccttgttttgtttttttgttttgttttgttttgctttttgttaaaacatgtctatagagttggcagttaatgctgaatttgtcaaataccccttccaaaattatacttgtatttaaaaaataaatggatctacctaatttctattgatttaa

SEQ ID NO: 439808 - DNA, 5202 bp, Homo sapiens
aagagtggtatcaacgcagagtcgccattacggccgggggaaggaaaaaaggaagtgtttggacgacagcgagcgggagaagcggggtcaaagggagcactatgtctgcggaagtccccgaggcagcctccgcggaggagcagaagagtgaacacaacatgctcccttggtctctgcaaccatcgattcctaacagcctagaggaaatggaagataaagtgactagtccagagaaagcagaagaagcaaaattaaaagcaagatatcctcatctgggacaaaagcctggaggttcagatttcttaaggaaacggttgcagaaagggcaaaaatattttgattctggggattacaacatggctaaagcaaaaatgaagaacaagcaacttcctactgcagctccggataagacggaggtcactggtgaccacattcccactccgcaagaccttcctcaacggaagccgtcccttgttgctagcaagctggctggctgattaagaggctgaactgcatgaatctgctaaatctcattatttctccttaatatgttacttatctactttttatttcctttcattcactagtcatttgagactgacagctttgcaggtagcagtagtgtgtgctgctattgtggaatatacgtgtgtagagtttttgattagtttaacagtgcactggtgaagaggacatgttagagcaacataagtaaactacttgaaaatagttgtatatattacctaacttctagtgtagtactggttctaacaagtaacaagcaagttttaaaattttaatgttttggctttcattacttcatcttaattatagctttgtatgttactcttatttaatataatctctattgtattgatttcttctgtatttaccttttggattttgtaaaacagaagtttaagaccacaagttagaagaaaggtcacatatttcaaacacaactagatggggctctgaaagatttgtatctctgtgcttgaacttgaatggccttaaacctgtttcagctttaacagtagaattttacttgggcaatatttgcccattctggtgtaacttatgtgactctagtgcttaacagctgccgttgaagctaatattcagttctgtagagttagaataccttttgttgttgaagatgtgaatgaagtatgcatgtgcattaactgttgaattcacttttgtgccatttttgtaaatacagtagttttgcacaacctctcacaaatgtctgtattaatttcacatacttaaaaagtagataatgtgccaaccagaagcacaagagttcctacacaaaactctgtaaatcattatagcttttgtataataagagtagtttacaatctcgggcttatagaataccaaactgaaatcttagttcaatctgccatagacttaagcttttcatttgttactaatatccatgacattcagtggccttgtgcaaatacgatatgttgcttaggcatatcttttgtcctatgcagaacctttcattttgatttttatgaaagttgcaattcatgtaatttatataaactttttaaatgtagaaactttttacttccacactcagttttggagaccctagaataaaaggcttcaatactctgcattccatgccctctgccacctgcttttttttcccctttgttctttgactcaaatggtattgagctgtttgttgtatatggaagcataggtgtctatatccttactcttttatataacacaataatggcgttttccttctaatttctcagttgttaacttctttctcttttttttttaggatagggccttgctctgtcacctgagctctagtgcagtagtgcaatcacagctcactgcaaccttactcctaggctcaagttaactattcttgatcctttattattactaatattctacaattgtttaaataaaaggaactttataatgaaacggttcggaatactggctcaagaacctatgtcaagatgagctgaattttggtaaattattttaggaattatgacaagctaattgaattaggcttgtgacaattagagtaatttacatgacaggtaaaactcctattaaaaatgtttagatgtttgcttctgtagatgtcactttagtaaaataccaatttagttttacttgtggcttatctagttagaacttagcagactttactgggacaagtttactgctcttgtaggagctcctctcacaagtagttgtaatgctgtagcatgatactcaggatcagtagcttgagatgttactatttttctcttcatctttgacttgcagagagcctcccgtttttggatccaggcatcttttctgaatcctggttccatcagtatacctgctctcctatgaccccaaatcatagtcaatggtgcctcaaacatagcaccttaagttaaaggctgcctagtgctctgaggaaagcttgctgattatcttcctgatctactcaccccaaaaggcagaaaagcaacacagtcactgctgtggtcatttgtaatgtaaagatcagttatatatatatatttgtaatgagagcaagtatatactcattatagaatcaatttaagaagtttaaaataacccagagtagaatttctatatctagtcttggtttttttcatgaatatttgcaagtaattaccattaaattcacacatgaaagattaatctgaaagatcagagaccatgttattcctgaccacgatagaactgctcctgtggtttgggacaagtaataaaacaactgcttgagttttgtttgtaaaatacataattaatatttgacctacctcaaaatgtattgaggatctgtgaaatgctaagtgcccaaaataaaatattgctgattgtctttttattaaaagtaaatttcctcattaagccaacctgccttctgtaagtcacagtgcttaaatctcaggatttttcattaggagagacctgtcgttaaggatttgtaggtataattgcttagcctccattattggtgcttgggatagagaggttttagatttttgttttttttttgttctgcctcaaagctcagtttattgaagacatttgtaagctattggatcatcacttgaatcaagattttgactagtgagcttaattgtccatttcttacaatttcaaagttacagtctcagaaatggttaattttaataactgtcctatcataaattaatgttggaataaattgaagttgttgataaatacttcatgaaaactaaagtctgaaataaattacttgttttatgtccaatagctactacatttgatagaacagttttgaggaacatttcattcttgaacgcagcatctgacatggttctcagcaagttggaatagtaaggattattggcttgtttcgatgagtggaagcggcatgtttgtagcatacaagttattcaataatcttgtgctgatgacctaaaaatatgtcttaactattcatcaaggaaagcctggtgaagcctttacttgttactacttcaacagttggaattagttgctctttttacttgatgaaacaaaactatacctctgaatatttatggatactttttactaaatcaggcttgtgttcttaatccaaattagtaaagttttatggaagctgaaatgtaatacagtagtctccccttatctgtaagagatacattccaagacccctagtggatgcctgaaacctcagatagtactgaaccctttatcaactatgttttttcagtctgacaaccaaggcggctactaagtgactaaggggcaggtagtatacagtgtggataagcaggacaaaggggtgattcacatcccaggcaggacagagcaggagatcatgagatttcatcactcaggatggcttgtgatttattttattttattcttttttttttttgagatggagtctcactcttgcccaggctggagtgcagtggtgcgatcttggctcactgcaacctctgcctcctgggttcaagcagttctcctgcctcagcctcccaagtagctgggattacaggcgtccgccaccatgcccagccaatttttgtacttttagtagagatggggtttcaccatgttggccaggctggtcttgaactcctgacctcaggtgatccactcgcctcggcctcccaaagtgctgggattataggcatgcgccaccatgcccggccggcttatgatttaaaacatgaattgtttatttctggaattttccacataatatttttggaccaaggttgcctcaggtaacaaactacagaaagtgaaattgcagataaaggggattactgctcctctgctctaaaattggtgtttgggtgatcagaagcaggtagccaatgggaagagcacttctgagtgataactaaagcagtttggtggccttttcacattctccaatgttcaaacatattttccactttccattttctctttcacctcattttgcctctctatcccccatccctgcttatttcttaagcccattgatggcactcattaaattgtatttagggctaatgagtcattgttccttaatatcgttttcaatatgccacaatttaggacacatttaaaattttctaaaacaatatcctaatcaatattgactaatttgagccacattcccaactctaactcagcacacactgccagtcttccccaatatctgtctcctctcaattccccaccacaccttataaaattgtaatcaaagatatctcactctgtcattgttaatctaagaataaaaacactgactttaatacggttttactaagtttcaaccttctaattaggtaggcctctaggtattctgcagatcactgctggtcttgatagccattaatatatgtttgtattatgttatttttcaactaaatcgcagttggaaaaaaacatatttaatattatgcccttggatctgttactgcatcactagcacttgtgatgcaatagaacacttcgcctgtactgaaagggccaagagtaaatgccttgttttgtttttttgttttgttttgttttgctttttgttaaaacatgtctatagagttggcagttaatgctgaatttgtcaaataccccttccaaaattatacttgtatttaaaaaataaatggatctacctaatttctattgatttaa

SEQ ID NO: 439809 - DNA, 5305 bp, Homo sapiens
aagagtggtatcaacgcagagtcgccattacggccgggggaaggaaaaaaggaagtgtttggacgacagcgagcgggagaagcggggtcaagtaggtaggggtgcggtgcgggaggggcaggcgggctccggcgtgcgagggccttggccagcggagcgtttcgcggctccgtgtcgtcataaggcggcggccattttcgcgggcggaggcggcccggcgggccctgggagagctgggacgggcggcggccgggtggcctcggccacccgctaattgcatcttttcccggcgtctcgtctgcagagggagcactatgtctgcggaagtccccgaggcagcctccgcggaggagcagaaggaaatggaagataaagtgactagtccagagaaagcagaagaagcaaaattaaaagcaagatatcctcatctgggacaaaagcctggaggttcagatttcttaaggaaacggttgcagaaagggcaaaaatattttgattctggggattacaacatggctaaagcatggtgaccacattcccactccgcaagaccttcctcaacggaagccgtcccttgttgctagcaagctggctggctgattaagaggctgaactgcatgaatctgctaaatctcattatttctccttaatatgttacttatctactttttatttcctttcattcactagtcatttgagactgacagctttgcaggtagcagtagtgtgtgctgctattgtggaatatacgtgtgtagagtttttgattagtttaacagtgcactggtgaagaggacatgttagagcaacataagtaaactacttgaaaatagttgtatatattacctaacttctagtgtagtactggttctaacaagtaacaagcaagttttaaaattttaatgttttggctttcattacttcatcttaattatagctttgtatgttactcttatttaatataatctctattgtattgatttcttctgtatttaccttttggattttgtaaaacagaagtttaagaccacaagttagaagaaaggtcacatatttcaaacacaactagatggggctctgaaagatttgtatctctgtgcttgaacttgaatggccttaaacctgtttcagctttaacagtagaattttacttgggcaatatttgcccattctggtgtaacttatgtgactctagtgcttaacagctgccgttgaagctaatattcagttctgtagagttagaataccttttgttgttgaagatgtgaatgaagtatgcatgtgcattaactgttgaattcacttttgtgccatttttgtaaatacagtagttttgcacaacctctcacaaatgtctgtattaatttcacatacttaaaaagtagataatgtgccaaccagaagcacaagagttcctacacaaaactctgtaaatcattatagcttttgtataataagagtagtttacaatctcgggcttatagaataccaaactgaaatcttagttcaatctgccatagacttaagcttttcatttgttactaatatccatgacattcagtggccttgtgcaaatacgatatgttgcttaggcatatcttttgtcctatgcagaacctttcattttgatttttatgaaagttgcaattcatgtaatttatataaactttttaaatgtagaaactttttacttccacactcagttttggagaccctagaataaaaggcttcaatactctgcattccatgccctctgccacctgcttttttttcccctttgttctttgactcaaatggtattgagctgtttgttgtatatggaagcataggtgtctatatccttactcttttatataacacaataatggcgttttccttctaatttctcagttgttaacttctttctcttttttttttaggatagggccttgctctgtcacctgagctctagtgcagtagtgcaatcacagctcactgcaaccttactcctaggctcaagttaactattcttgatcctttattattactaatattctacaattgtttaaataaaaggaactttataatgaaacggttcggaatactggctcaagaacctatgtcaagatgagctgaattttggtaaattattttaggaattatgacaagctaattgaattaggcttgtgacaattagagtaatttacatgacaggtaaaactcctattaaaaatgtttagatgtttgcttctgtagatgtcactttagtaaaataccaatttagttttacttgtggcttatctagttagaacttagcagactttactgggacaagtttactgctcttgtaggagctcctctcacaagtagttgtaatgctgtagcatgatactcaggatcagtagcttgagatgttactatttttctcttcatctttgacttgcagagagcctcccgtttttggatccaggcatcttttctgaatcctggttccatcagtatacctgctctcctatgaccccaaatcatagtcaatggtgcctcaaacatagcaccttaagttaaaggctgcctagtgctctgaggaaagcttgctgattatcttcctgatctactcaccccaaaaggcagaaaagcaacacagtcactgctgtggtcatttgtaatgtaaagatcagttatatatatatatttgtaatgagagcaagtatatactcattatagaatcaatttaagaagtttaaaataacccagagtagaatttctatatctagtcttggtttttttcatgaatatttgcaagtaattaccattaaattcacacatgaaagattaatctgaaagatcagagaccatgttattcctgaccacgatagaactgctcctgtggtttgggacaagtaataaaacaactgcttgagttttgtttgtaaaatacataattaatatttgacctacctcaaaatgtattgaggatctgtgaaatgctaagtgcccaaaataaaatattgctgattgtctttttattaaaagtaaatttcctcattaagccaacctgccttctgtaagtcacagtgcttaaatctcaggatttttcattaggagagacctgtcgttaaggatttgtaggtataattgcttagcctccattattggtgcttgggatagagaggttttagatttttgttttttttttgttctgcctcaaagctcagtttattgaagacatttgtaagctattggatcatcacttgaatcaagattttgactagtgagcttaattgtccatttcttacaatttcaaagttacagtctcagaaatggttaattttaataactgtcctatcataaattaatgttggaataaattgaagttgttgataaatacttcatgaaaactaaagtctgaaataaattacttgttttatgtccaatagctactacatttgatagaacagttttgaggaacatttcattcttgaacgcagcatctgacatggttctcagcaagttggaatagtaaggattattggcttgtttcgatgagtggaagcggcatgtttgtagcatacaagttattcaataatcttgtgctgatgacctaaaaatatgtcttaactattcatcaaggaaagcctggtgaagcctttacttgttactacttcaacagttggaattagttgctctttttacttgatgaaacaaaactatacctctgaatatttatggatactttttactaaatcaggcttgtgttcttaatccaaattagtaaagttttatggaagctgaaatgtaatacagtagtctccccttatctgtaagagatacattccaagacccctagtggatgcctgaaacctcagatagtactgaaccctttatcaactatgttttttcagtctgacaaccaaggcggctactaagtgactaaggggcaggtagtatacagtgtggataagcaggacaaaggggtgattcacatcccaggcaggacagagcaggagatcatgagatttcatcactcaggatggcttgtgatttattttattttattcttttttttttttgagatggagtctcactcttgcccaggctggagtgcagtggtgcgatcttggctcactgcaacctctgcctcctgggttcaagcagttctcctgcctcagcctcccaagtagctgggattacaggcgtccgccaccatgcccagccaatttttgtacttttagtagagatggggtttcaccatgttggccaggctggtcttgaactcctgacctcaggtgatccactcgcctcggcctcccaaagtgctgggattataggcatgcgccaccatgcccggccggcttatgatttaaaacatgaattgtttatttctggaattttccacataatatttttggaccaaggttgcctcaggtaacaaactacagaaagtgaaattgcagataaaggggattactgctcctctgctctaaaattggtgtttgggtgatcagaagcaggtagccaatgggaagagcacttctgagtgataactaaagcagtttggtggccttttcacattctccaatgttcaaacatattttccactttccattttctctttcacctcattttgcctctctatcccccatccctgcttatttcttaagcccattgatggcactcattaaattgtatttagggctaatgagtcattgttccttaatatcgttttcaatatgccacaatttaggacacatttaaaattttctaaaacaatatcctaatcaatattgactaatttgagccacattcccaactctaactcagcacacactgccagtcttccccaatatctgtctcctctcaattccccaccacaccttataaaattgtaatcaaagatatctcactctgtcattgttaatctaagaataaaaacactgactttaatacggttttactaagtttcaaccttctaattaggtaggcctctaggtattctgcagatcactgctggtcttgatagccattaatatatgtttgtattatgttatttttcaactaaatcgcagttggaaaaaaacatatttaatattatgcccttggatctgttactgcatcactagcacttgtgatgcaatagaacacttcgcctgtactgaaagggccaagagtaaatgccttgttttgtttttttgttttgttttgttttgctttttgttaaaacatgtctatagagttggcagttaatgctgaatttgtcaaataccccttccaaaattatacttgtatttaaaaaataaatggatctacctaatttctattgatttaa

SEQ ID NO: 439810 - DNA, 5042 bp, Homo sapiens
  misc_feature (12)..(12): n is a, c, g, or t
attatggccggnacgacagcgagctggattttcggggtcaaagggagcactatgtctgcggaagtccccgaggcagcctccgcggaggagcagaaggaaatggaagataaagtgactagtccagagaaagcagaagaagcaaaattaaaagcaagatatcctcatctgggacaaaagcctggaggttcagatttcttaaggaaacggttgcagaaagggcaaaaatattttgattctggggattacaacatggctaaagcatggtgaccacattcccactccgcaagaccttcctcaacggaagccgtcccttgttgctagcaagctggctggctgattaagaggctgaactgcatgaatctgctaaatctcattatttctccttaatatgttacttatctactttttatttcctttcattcactagtcatttgagactgacagctttgcaggtagcagtagtgtgtgctgctattgtggaatatacgtgtgtagagtttttgattagtttaacagtgcactggtgaagaggacatgttagagcaacataagtaaactacttgaaaatagttgtatatattacctaacttctagtgtagtactggttctaacaagtaacaagcaagttttaaaattttaatgttttggctttcattacttcatcttaattatagctttgtatgttactcttatttaatataatctctattgtattgatttcttctgtatttaccttttggattttgtaaaacagaagtttaagaccacaagttagaagaaaggtcacatatttcaaacacaactagatggggctctgaaagatttgtatctctgtgcttgaacttgaatggccttaaacctgtttcagctttaacagtagaattttacttgggcaatatttgcccattctggtgtaacttatgtgactctagtgcttaacagctgccgttgaagctaatattcagttctgtagagttagaataccttttgttgttgaagatgtgaatgaagtatgcatgtgcattaactgttgaattcacttttgtgccatttttgtaaatacagtagttttgcacaacctctcacaaatgtctgtattaatttcacatacttaaaaagtagataatgtgccaaccagaagcacaagagttcctacacaaaactctgtaaatcattatagcttttgtataataagagtagtttacaatctcgggcttatagaataccaaactgaaatcttagttcaatctgccatagacttaagcttttcatttgttactaatatccatgacattcagtggccttgtgcaaatacgatatgttgcttaggcatatcttttgtcctatgcagaacctttcattttgatttttatgaaagttgcaattcatgtaatttatataaactttttaaatgtagaaactttttacttccacactcagttttggagaccctagaataaaaggcttcaatactctgcattccatgccctctgccacctgcttttttttcccctttgttctttgactcaaatggtattgagctgtttgttgtatatggaagcataggtgtctatatccttactcttttatataacacaataatggcgttttccttctaatttctcagttgttaacttctttctcttttttttttaggatagggccttgctctgtcacctgagctctagtgcagtagtgcaatcacagctcactgcaaccttactcctaggctcaagttaactattcttgatcctttattattactaatattctacaattgtttaaataaaaggaactttataatgaaacggttcggaatactggctcaagaacctatgtcaagatgagctgaattttggtaaattattttaggaattatgacaagctaattgaattaggcttgtgacaattagagtaatttacatgacaggtaaaactcctattaaaaatgtttagatgtttgcttctgtagatgtcactttagtaaaataccaatttagttttacttgtggcttatctagttagaacttagcagactttactgggacaagtttactgctcttgtaggagctcctctcacaagtagttgtaatgctgtagcatgatactcaggatcagtagcttgagatgttactatttttctcttcatctttgacttgcagagagcctcccgtttttggatccaggcatcttttctgaatcctggttccatcagtatacctgctctcctatgaccccaaatcatagtcaatggtgcctcaaacatagcaccttaagttaaaggctgcctagtgctctgaggaaagcttgctgattatcttcctgatctactcaccccaaaaggcagaaaagcaacacagtcactgctgtggtcatttgtaatgtaaagatcagttatatatatatatttgtaatgagagcaagtatatactcattatagaatcaatttaagaagtttaaaataacccagagtagaatttctatatctagtcttggtttttttcatgaatatttgcaagtaattaccattaaattcacacatgaaagattaatctgaaagatcagagaccatgttattcctgaccacgatagaactgctcctgtggtttgggacaagtaataaaacaactgcttgagttttgtttgtaaaatacataattaatatttgacctacctcaaaatgtattgaggatctgtgaaatgctaagtgcccaaaataaaatattgctgattgtctttttattaaaagtaaatttcctcattaagccaacctgccttctgtaagtcacagtgcttaaatctcaggatttttcattaggagagacctgtcgttaaggatttgtaggtataattgcttagcctccattattggtgcttgggatagagaggttttagatttttgttttttttttgttctgcctcaaagctcagtttattgaagacatttgtaagctattggatcatcacttgaatcaagattttgactagtgagcttaattgtccatttcttacaatttcaaagttacagtctcagaaatggttaattttaataactgtcctatcataaattaatgttggaataaattgaagttgttgataaatacttcatgaaaactaaagtctgaaataaattacttgttttatgtccaatagctactacatttgatagaacagttttgaggaacatttcattcttgaacgcagcatctgacatggttctcagcaagttggaatagtaaggattattggcttgtttcgatgagtggaagcggcatgtttgtagcatacaagttattcaataatcttgtgctgatgacctaaaaatatgtcttaactattcatcaaggaaagcctggtgaagcctttacttgttactacttcaacagttggaattagttgctctttttacttgatgaaacaaaactatacctctgaatatttatggatactttttactaaatcaggcttgtgttcttaatccaaattagtaaagttttatggaagctgaaatgtaatacagtagtctccccttatctgtaagagatacattccaagacccctagtggatgcctgaaacctcagatagtactgaaccctttatcaactatgttttttcagtctgacaaccaaggcggctactaagtgactaaggggcaggtagtatacagtgtggataagcaggacaaaggggtgattcacatcccaggcaggacagagcaggagatcatgagatttcatcactcaggatggcttgtgatttattttattttattcttttttttttttgagatggagtctcactcttgcccaggctggagtgcagtggtgcgatcttggctcactgcaacctctgcctcctgggttcaagcagttctcctgcctcagcctcccaagtagctgggattacaggcgtccgccaccatgcccagccaatttttgtacttttagtagagatggggtttcaccatgttggccaggctggtcttgaactcctgacctcaggtgatccactcgcctcggcctcccaaagtgctgggattataggcatgcgccaccatgcccggccggcttatgatttaaaacatgaattgtttatttctggaattttccacataatatttttggaccaaggttgcctcaggtaacaaactacagaaagtgaaattgcagataaaggggattactgctcctctgctctaaaattggtgtttgggtgatcagaagcaggtagccaatgggaagagcacttctgagtgataactaaagcagtttggtggccttttcacattctccaatgttcaaacatattttccactttccattttctctttcacctcattttgcctctctatcccccatccctgcttatttcttaagcccattgatggcactcattaaattgtatttagggctaatgagtcattgttccttaatatcgttttcaatatgccacaatttaggacacatttaaaattttctaaaacaatatcctaatcaatattgactaatttgagccacattcccaactctaactcagcacacactgccagtcttccccaatatctgtctcctctcaattccccaccacaccttataaaattgtaatcaaagatatctcactctgtcattgttaatctaagaataaaaacactgactttaatacggttttactaagtttcaaccttctaattaggtaggcctctaggtattctgcagatcactgctggtcttgatagccattaatatatgtttgtattatgttatttttcaactaaatcgcagttggaaaaaaacatatttaatattatgcccttggatctgttactgcatcactagcacttgtgatgcaatagaacacttcgcctgtactgaaagggccaagagtaaatgccttgttttgtttttttgttttgttttgttttgctttttgttaaaacatgtctatagagttggcagttaatgctgaatttgtcaaataccccttccaaaattatacttgtatttaaaaaataaatggatctacctaatttctattgatttaa

SEQ ID NO: 439811 - DNA, 4112 bp, Homo sapiens
aagagtggtatcaacgcagagtcgccattacggccgggggaaggaaaaaaggaagtgtttggacgacagcgagcgggagaagcggggtcaagtaggtaggggtgcggtgcgggaggggcaggcgggctccggcgtgcgagggccttggccagcggagcgtttcgcggctccgtgtcgtcataaggcggcggccattttcgcgggcggaggcggcccggcgggccctgggagagctgggacgggcggcggccgggtggcctcggccacccgctaattgcatcttttcccggcgtctcgtctgcagagggagcactatgtctgcggaagtccccgaggcagcctccgcggaggagcagaaggaaatggaagataaagtgactagtccagagaaagcagaagaagcaaaattaaaagcaagatatcctcatctgggacaaaagcctggaggttcagatttcttaaggaaacggttgcagaaagggcaaaaatattttgattctggggattacaacatggctaaagcaaaaatgaagaacaagcaacttcctactgcagctccggataagacggaggtcactggtgaccacattcccactccgcaagaccttcctcaacggaagccgtcccttgttgctagcaagctggctggctgattaagaggctgaactgcatgaatctgctaaatctcattatttctccttaatatgttacttatctactttttatttcctttcattcactagtcatttgagactgacagctttgcaggtagcagtagtgtgtgctgctattgtggaatatacgtgtgtagagtttttgattagtttaacagtgcactggtgaagaggacatgttagagcaacataagtaaactacttgaaaatagttgtatatattacctaacttctagtgtagtactggttctaacaagtaacaagcaagttttaaaattttaatgttttggctttcattacttcatcttaattatagctttgtatgttactcttatttaatataatctctattgtattgatttcttctgtatttaccttttggattttgtaaaacagaagtttaagaccacaagttagaagaaaggtcacatatttcaaacacaactagatggggctctgaaagatttgtatctctgtgcttgaacttgaatggccttaaacctgtttcagctttaacagtagaattttacttgggcaatatttgcccattctggtgtaacttatgtgactctagtgcttaacagctgccgttgaagctaatattcagttctgtagagttagaataccttttgttgttgaagatgtgaatgaagtatgcatgtgcattaactgttgaattcacttttgtgccatttttgtaaatacagtagttttgcacaacctctcacaaatgtctgtattaatttcacatacttaaaaagtagataatgtgccaaccagaagcacaagagttcctacacaaaactctgtaaatcattatagcttttgtataataagagtagtttacaatctcgggcttatagaataccaaactgaaatcttagttcaatctgccatagacttaagcttttcatttgttactaatatccatgacattcagtggccttgtgcaaatacgatatgttgcttaggcatatcttttgtcctatgcagaacctttcattttgatttttatgaaagttgcaattcatgtaatttatataaactttttaaatgtagaaactttttacttccacactcagttttggagaccctagaataaaaggcttcaatactctgcattccatgccctctgccacctgcttttttttcccctttgttctttgactcaaatggtattgagctgtttgttgtatatggaagcataggtgtctatatccttactcttttatataacacaataatggcgttttccttctaatttctcagttgttaacttctttctcttttttttttaggatagggccttgctctgtcacctgagctctagtgcagtagtgcaatcacagctcactgcaaccttactcctaggctcaagttaactattcttgatcctttattattactaatattctacaattgtttaaataaaaggaactttataatgaaacggttcggaatactggctcaagaacctatgtcaagatgagctgaattttggtaaattattttaggaattatgacaagctaattgaattaggcttgtgacaattagagtaatttacatgacaggtaaaactcctattaaaaatgtttagatgtttgcttctgtagatgtcactttagtaaaataccaatttagttttacttgtggcttatctagttagaacttagcagactttactgggacaagtttactgctcttgtaggagctcctctcacaagtagttgtaatgctgtagcatgatactcaggatcagtagcttgagatgttactatttttctcttcatctttgacttgcagagagcctcccgtttttggatccaggcatcttttctgaatcctggttccatcagtatacctgctctcctatgaccccaaatcatagtcaatggtgcctcaaacatagcaccttaagttaaaggctgcctagtgctctgaggaaagcttgctgattatcttcctgatctactcaccccaaaaggcagaaaagcaacacagtcactgctgtggtcatttgtaatgtaaagatcagttatatatatatatttgtaatgagagcaagtatatactcattatagaatcaatttaagaagtttaaaataacccagagtagaatttctatatctagtcttggtttttttcatgaatatttgcaagtaattaccattaaattcacacatgaaagattaatctgaaagatcagagaccatgttattcctgaccacgatagaactgctcctgtggtttgggacaagtaataaaacaactgcttgagttttgtttgtaaaatacataattaatatttgacctacctcaaaatgtattgaggatctgtgaaatgctaagtgcccaaaataaaatattgctgattgtctttttattaaaagtaaatttcctcattaagccaacctgccttctgtaagtcacagtgcttaaatctcaggatttttcattaggagagacctgtcgttaaggatttgtaggtataattgcttagcctccattattggtgcttgggatagagaggttttagatttttgttttttttttgttctgcctcaaagctcagtttattgaagacatttgtaagctattggatcatcacttgaatcaagattttgactagtgagcttaattgtccatttcttacaatttcaaagttacagtctcagaaatggttaattttaataactgtcctatcataaattaatgttggaataaattgaagttgttgataaatacttcatgaaaactaaagtctgaaataaattacttgttttatgtccaatagctactacatttgatagaacagttttgaggaacatttcattcttgaacgcagcatctgacatggttctcagcaagttggaatagtaaggattattggcttgtttcgatgagtggaagcggcatgtttgtagcatacaagttattcaataatcttgtgctgatgacctaaaaatatgtcttaactattcatcaaggaaagcctggtgaagcctttacttgttactacttcaacagttggaattagttgctctttttacttgatgaaacaaaactatacctctgaatatttatggatactttttactaaatcaggcttgtgttcttaatccaaattagtaaagttttatggaagctgaggcaggagaactggcatgaacctgggaggcaaagctgcagtgagccgagacaaggccatggcacctcaagactgggcaacagagcagatccgttcaaaaaaaaaagaaagaacaagatggggcctattcgggaggacaagggaccacggcggaatctcacattggaaggcaggcagggaccacagcgaaaagaaacatccggtaacagaacccgtctgtacattaaaataggaaggggggcgtaccaacggaaaagcgaagagggaaagaggagcaacagagaattca

SEQ ID NO: 439812 - DNA, 2398 bp, Homo sapiens
aaacagtcatacatcgagagacagaaaattaactgaaaagcagtttagagactgggggaggccggatctctagagccatcctgctgattgtctttttattaaaagtaaatttcctcattaagccaacctgccttctgtaagtcacagtgcttaaatctcaggatttttcattaggagagacctgtcgttaaggatttgtaggtataattgcttagcctccattattggtgcttgggatagagaggttttagatttttgttttttttttgttctgcctcaaagctcagtttattgaagacatttgtaagctattggatcatcacttgaatcaagattttgactagtgagcttaattgtccatttcttacaatttcaaagttacagtctcagaaatggttaattttaataactgtcctatcataaattaatgttggaataaattgaagttgttgataaatacttcatgaaaactaaagtctgaaataaattacttgttttatgtccaatagctactacatttgatagaacagttttgaggaacatttcattcttgaacgcagcatctgacatggttctcagcaagttggaatagtaaggattattggcttgtttcgatgagtggaagcggcatgtttgtagcatacaagttattcaataatcttgtgctgatgacctaaaaatatgtcttaactattcatcaaggaaagcctggtgaagcctttacttgttactacttcaacagttggaattagttgctctttttacttgatgaaacaaaactatacctctgaatatttatggatactttttactaaatcaggcttgtgttcttaatccaaattagtaaagttttatggaagctgaaatgtaatacagtagtctccccttatctgtaagagatacattccaagacccctagtggatgcctgaaacctcagatagtactgaaccctttatcaactatgttttttcagtctgacaaccaaggcggctactaagtgactaaggggcaggtagtatacagtgtggataagcaggacaaaggggtgattcacatcccaggcaggacagagcaggagatcatgagatttcatcactcaggatggcttgtgatttattttattttattcttttttttttttgagatggagtctcactcttgcccaggctggagtgcagtggtgcgatcttggctcactgcaacctctgcctcctgggttcaagcagttctcctgcctcagcctcccaagtagctgggattacaggcgtccgccaccatgcccagccaatttttgtacttttagtagagatggggtttcaccatgttggccaggctggtcttgaactcctgacctcaggtgatccactcgcctcggcctcccaaagtgctgggattataggcatgcgccaccatgcccggccggcttatgatttaaaacatgaattgtttatttctggaattttccacataatatttttggaccaaggttgcctcaggtaacaaactacagaaagtgaaattgcagataaaggggattactgctcctctgctctaaaattggtgtttgggtgatcagaagcaggtagccaatgggaagagcacttctgagtgataactaaagcagtttggtggccttttcacattctccaatgttcaaacatattttccactttccattttctctttcacctcattttgcctctctatcccccatccctgcttatttcttaagcccattgatggcactcattaaattgtatttagggctaatgagtcattgttccttaatatcgttttcaatatgccacaatttaggacacatttaaaattttctaaaacaatatcctaatcaatattgactaatttgagccacattcccaactctaactcagcacacactgccagtcttccccaatatctgtctcctctcaattccccaccacaccttataaaattgtaatcaaagatatctcactctgtcattgttaatctaagaataaaaacactgactttaatacggttttactaagtttcaaccttctaattaggtaggcctctaggtattctgcagatcactgctggtcttgatagccattaatatatgtttgtattatgttatttttcaactaaatcgcagttggaaaaaaacatatttaatattatgcccttggatctgttactgcatcactagcacttgtgatgcaatagaacacttcgcctgtactgaaagggccaagagtaaatgccttgttttgtttttttgttttgttttgttttgctttttgttaaaacatgtctatagagttggcagttaatgctgaatttgtcaaataccccttccaaaattatacttgtatttaaaaaataaatggatctacctaatttctattgatttaa

SEQ ID NO: 439813 - DNA, 1829 bp, Homo sapiens
  misc_feature (1434)..(1434): n is a, c, g, or t
  misc_feature (1451)..(1451): n is a, c, g, or t
aagagtggtatcaacgcagagtcgccattacggccgggggaaggaaaaaaggaagtgtttggacgacagcgagcgggagaagcggggtcaagtaggtaggggtgcggtgcgggaggggcaggcgggctccggcgtgcgagggccttggccagcggagcgtttcgcggctccgtgtcgtcataaggcggcggccattttcgcgggcggaggcggcccggcgggccctgggagagctgggacgggcggcggccgggtggcctcggccacccgctaattgcatcttttcccggcgtctcgtctgcagagggagcactatgtctgcggaagtccccgaggcagcctccgcggaggagcagaaggaaatggaagataaagtgactagtccagagaaagcagaagaagcaaaattaaaagcaagatatcctcatctgggacaaaagcctggaggttcagatttcttaaggaaacggttgcagaaagggcaaaaatattttgattctggggattacaacatggctaaagcaaaaatgaagaacaagcaacttcctactgcagctccggataagacggaggtcactggtgaccacattcccactccgcaagaccttcctcaacggaagccgtcccttgttgctagcaagctggctggctgattaagaggctgaactgcatgaatctgctaaatctcattatttctccttaatatgttacttatctactttttatttcctttcattcactagtcatttgagactgacagctttgcaggtagcagtagtgtgtgctgctattgtggaatatacgtgtgtagagtttttgattagtttaacagtgcactggtgaagaggacatgttagagcaacataagtaaactacttgaaaatagttgtatatattacctaacttctagtgtagtactggttctaacaagtaacaagcaagttttaaaattttaatgttttggctttcattacttcatcttaattatagctttgtatgttactcttatttaatataatctctattgtattgatttcttctgtatttaccttttggattttgtaaaacagaagtttaagaccacaagttagaagaaaggtcacatatttcaaacacaactagatggggctctgaaagatttgtatctctgtgcttgaacttgaatggccttaaacctgtttcagctttaacagtagaattttacttgggcaatatttgcccattctggtgtaacttatgtgactctagtgcttaacagctgccgttgaagctaatattcagttctgtagagttagaataccttttgttgttgaagatgtgaatgaagtatgcatgtgcattaactgttgaattcacttttgtgccatttttgtaaatacagtagttttgcacaacctctcaaaaaaaaaaaaaaaaaaaaaaaaaaaaaaaaanaaaaaaaaaaaaaacanaaagaacaaagacacagcaataaaaggcatagaatgagaactaaacaagataacaaacacaaaaaagaagggggggggggcaaataaagctactcccaggagggaacgaaatagcacagcaacacgagtatagtgaaaaagaaggggcgacaacaagggagacggtataaatacagagcaggcgcgggagcacagaaaacaaactggcgcagagacaaaagcgctcggaggtcgtagagaggagagaacacaacttggggagtggagataagagaacaacaaaccacgaaaatagtgcagaggaagataataaaaaaggagagatggggaacacacacaatggcggaaaaagtaatcagggagatgtagaatacacgg

SEQ ID NO: 439814 - DNA, 1183 bp, Homo sapiens
actcctagaggatcccaactacacagctatccacgtagctgggattacaggcgtccgccaccatgcccagccaatttttgtacttttagtagagatggggtttcaccatgttggccaggctggtcttgaactcctgacctcaggtgatccactcgcctcggcctcccaaagtgctgggattataggcatgcgccaccatgcccggccggcttatgatttaaaacatgaattgtttatttctggaattttccacataatatttttggaccaaggttgcctcaggtaacaaactacagaaagtgaaattgcagataaaggggattactgctcctctgctctaaaattggtgtttgggtgatcagaagcaggtagccaatgggaagagcacttctgagtgataactaaagcagtttggtggccttttcacattctccaatgttcaaacatattttccactttccattttctctttcacctcattttgcctctctatcccccatccctgcttatttcttaagcccattgatggcactcattaaattgtatttagggctaatgagtcattgttccttaatatcgttttcaatatgccacaatttaggacacatttaaaattttctaaaacaatatcctaatcaatattgactaatttgagccacattcccaactctaactcagcacacactgccagtcttccccaatatctgtctcctctcaattccccaccacaccttataaaattgtaatcaaagatatctcactctgtcattgttaatctaagaataaaaacactgactttaatacggttttactaagtttcaaccttctaattaggtaggcctctaggtattctgcagatcactgctggtcttgatagccattaatatatgtttgtattatgttatttttcaactaaatcgcagttggaaaaaaacatatttaatattatgcccttggatctgttactgcatcactagcacttgtgatgcaatagaacacttcgcctgtactgaaagggccaagagtaaatgccttgttttgtttttttgttttgttttgttttgctttttgttaaaacatgtctatagagttggcagttaatgctgaatttgtcaaataccccttccaaaattatacttgtatttaaaaaataaatggatctacctaatttctattgatttaa

SEQ ID NO: 439815 - DNA, 966 bp, Homo sapiens
  misc_feature (557)..(557): n is a, c, g, or t
cgaggtgacctagaggttcccgattgcattgtcttccctaatatatgtttgtattatgttatttttcaactaaatcgcagttggaaaaaaacatatttaatattatgcccttggatctgttactgcatcactagcacttgtgatgcaatagaacacttcgcctgtactgaaagggccaagagtaaatgccttgttttgtttttttgttttgttttgttttgctttttgttaaaacatgtctatagagttggcagttaatgctgaatttgtcaaataccccttccaaaattatacttgtatttaaaaaataaatggatctacctaatttctattgatttaatttgcagttttgtcttattaaagtggtatgtttttcagtgtattttttctgaagttgatctctttacatttcagctattactgtatgcaggaagaaactgacttgtaatctttgattttttttttttttttgcatttgtaaaggctttgtacttaaggtaggattaaatgtttgcagattgtgaaaaaaaaaaaaaaaaaaaaaaaaaaaaaaaaanaaaaaaaaaaaaaagggggggggggggcaataaaaataatccccgagggggggcgacaagattttaggcacacccaggtttttgtggtcgaaacaggggtggccccacataaggaggagcacacaataaaatacgagcagagacggagcaggcaccggttgaaaaaccacgcgctgagagagacgggaaaccaactgcagcacacggcggaatcactggggaaggaggacccccaaatcgtgcgggggcgggggcacagtatgtgcgggacagcacacaccacaagaaagtaaagccccgcgcatgaaaacatataaacacagagcggcgactcatggggcgcaaccaacagacggaagtagctggcgcgagaacagatactgacaaagaatactatgaaaaaatttag

SEQ ID NO: 439816 - DNA, 1139 bp, Homo sapiens
aagagtggtatcaacgcagagtcgccattacggccgggggaaggaaaaaaggaagtgtttggacgacagcgagcgggagaagcggggtcaagtaggtaggggtgcggtgcgggaggggcaggcgggctccggcgtgcgagggccttggccagcggagcgtttcgcggctccgtgtcgtcataaggcggcggccattttcgcgggcggaggcggcccggcgggccctgggagagctgggacgggcggcggccgggtggcctcggccacccgctaattgcatcttttcccggcgtctcgtctgcagagggagcactatgtctgcggaagtccccgaggcagcctccgcggaggagcagaagagtgaacacaacatgctcccttggtctctgcaaccatcgattcctaacagcctagaggtaaacctcagaaaagtttttaaatgtttctcttagccgtcttagcagtttgcgatacaacagtttgttagggttgcttcttttgtttgtgcaagacttgaatacttaacttctaatccagaagctgtgtttactataacataaaatattaaagatgagctgatggtgaaatcctcaagtgtgaagaaagtttcttagctttatagctttatggaaacaagtacattgtattttttcattcagatgaatgaacttttattgaacattcattaaatgctaggcactaggcaaacaaagacttaatagaatgacaacagtaattttccatagagcttgatacagtattggtaccttcctggcagtatcccaaaggatttgttggctttcattaatcctttctagttattcgtcaatcagtgcatcagtcaacatgttgctgagcagatagaggagaatttgcttagagtggtcagatttttattgctgacgttgctgtataaccctcctctgccgaaggctgaaaagtggtatcagtcattgagacataattctgctcagtgtataatagactacaaaataatccttagttatttgagtgtcctttttacgtgtatatatttataacttataccccacctattcacagaaaggatttctgatgtatttcagtggtacaattcacaaaaatgcacatgccgagacaataactattattaaaaatac

SEQ ID NO: 439817 - DNA, 542 bp, Homo sapiens
gactcaccaaactaatatgtcttggaaaggatacccacaggaaagctgtcaatgaaattatttgtcaggtaagagatacaggttggtgcctttatgagtggtagaagaggaaaagaacctttatctgcattattttaatatatcaaccataaagagatataaattgttttcccatgcttccagtattttaaaaataggagttcatattggtattttcaggagctcttttgacaactacttttggttacctaaaggctgaagaatgtttttgttatgtttgagacagggtcttactctgtcgcccaggctggggtgcaatggcacaatgatagcatattgccgccttgaactcctgggttcacctagcctcccacctcagcctccaagtagctgggactgcaggtgtgagcaaccgcctcatccatgttttctatttctattcagagtgaacacaacatgctcccttggtctctgcaaccatcgattcctaacagcctagaggtaaacctcagaaaagtttttaaatgtttctcttagccgtc

SEQ ID NO: 439818 - DNA, 5358 bp, Homo sapiens
aagagtggtatcaacgcagagtcgccattacggccgggggaaggaaaaaaggaagtgtttggacgacagcgagcgggagaagcggggtcaagtaggtaggggtgcggtgcgggaggggcaggcgggctccggcgtgcgagggccttggccagcggagcgtttcgcggctccgtgtcgtcataaggcggcggccattttcgcgggcggaggcggcccggcgggccctgggagagctgggacgggcggcggccgggtggcctcggccacccgctaattgcatcttttcccggcgtctcgtctgcagagggagcactatgtctgcggaagtccccgaggcagcctccgcggaggagcagaaggaaatggaagataaagtgactagtccagagaaagcagaagaagcaaaattaaaagcaagatatcctcatctgggacaaaagcctggaggttcagatttcttaaggaaacggttgcagaaagggcaaaaatattttgattctggggattacaacatggctaaagcaaaaatgaagaacaagcaacttcctactgcagctccggataagacggaggtcactggtgaccacattcccactccgcaagaccttcctcaacggaagccgtcccttgttgctagcaagctggctggctgattaagaggctgaactgcatgaatctgctaaatctcattatttctccttaatatgttacttatctactttttatttcctttcattcactagtcatttgagactgacagctttgcaggtagcagtagtgtgtgctgctattgtggaatatacgtgtgtagagtttttgattagtttaacagtgcactggtgaagaggacatgttagagcaacataagtaaactacttgaaaatagttgtatatattacctaacttctagtgtagtactggttctaacaagtaacaagcaagttttaaaattttaatgttttggctttcattacttcatcttaattatagctttgtatgttactcttatttaatataatctctattgtattgatttcttctgtatttaccttttggattttgtaaaacagaagtttaagaccacaagttagaagaaaggtcacatatttcaaacacaactagatggggctctgaaagatttgtatctctgtgcttgaacttgaatggccttaaacctgtttcagctttaacagtagaattttacttgggcaatatttgcccattctggtgtaacttatgtgactctagtgcttaacagctgccgttgaagctaatattcagttctgtagagttagaataccttttgttgttgaagatgtgaatgaagtatgcatgtgcattaactgttgaattcacttttgtgccatttttgtaaatacagtagttttgcacaacctctcacaaatgtctgtattaatttcacatacttaaaaagtagataatgtgccaaccagaagcacaagagttcctacacaaaactctgtaaatcattatagcttttgtataataagagtagtttacaatctcgggcttatagaataccaaactgaaatcttagttcaatctgccatagacttaagcttttcatttgttactaatatccatgacattcagtggccttgtgcaaatacgatatgttgcttaggcatatcttttgtcctatgcagaacctttcattttgatttttatgaaagttgcaattcatgtaatttatataaactttttaaatgtagaaactttttacttccacactcagttttggagaccctagaataaaaggcttcaatactctgcattccatgccctctgccacctgcttttttttcccctttgttctttgactcaaatggtattgagctgtttgttgtatatggaagcataggtgtctatatccttactcttttatataacacaataatggcgttttccttctaatttctcagttgttaacttctttctcttttttttttaggatagggccttgctctgtcacctgagctctagtgcagtagtgcaatcacagctcactgcaaccttactcctaggctcaagttaactattcttgatcctttattattactaatattctacaattgtttaaataaaaggaactttataatgaaacggttcggaatactggctcaagaacctatgtcaagatgagctgaattttggtaaattattttaggaattatgacaagctaattgaattaggcttgtgacaattagagtaatttacatgacaggtaaaactcctattaaaaatgtttagatgtttgcttctgtagatgtcactttagtaaaataccaatttagttttacttgtggcttatctagttagaacttagcagactttactgggacaagtttactgctcttgtaggagctcctctcacaagtagttgtaatgctgtagcatgatactcaggatcagtagcttgagatgttactatttttctcttcatctttgacttgcagagagcctcccgtttttggatccaggcatcttttctgaatcctggttccatcagtatacctgctctcctatgaccccaaatcatagtcaatggtgcctcaaacatagcaccttaagttaaaggctgcctagtgctctgaggaaagcttgctgattatcttcctgatctactcaccccaaaaggcagaaaagcaacacagtcactgctgtggtcatttgtaatgtaaagatcagttatatatatatatttgtaatgagagcaagtatatactcattatagaatcaatttaagaagtttaaaataacccagagtagaatttctatatctagtcttggtttttttcatgaatatttgcaagtaattaccattaaattcacacatgaaagattaatctgaaagatcagagaccatgttattcctgaccacgatagaactgctcctgtggtttgggacaagtaataaaacaactgcttgagttttgtttgtaaaatacataattaatatttgacctacctcaaaatgtattgaggatctgtgaaatgctaagtgcccaaaataaaatattgctgattgtctttttattaaaagtaaatttcctcattaagccaacctgccttctgtaagtcacagtgcttaaatctcaggatttttcattaggagagacctgtcgttaaggatttgtaggtataattgcttagcctccattattggtgcttgggatagagaggttttagatttttgttttttttttgttctgcctcaaagctcagtttattgaagacatttgtaagctattggatcatcacttgaatcaagattttgactagtgagcttaattgtccatttcttacaatttcaaagttacagtctcagaaatggttaattttaataactgtcctatcataaattaatgttggaataaattgaagttgttgataaatacttcatgaaaactaaagtctgaaataaattacttgttttatgtccaatagctactacatttgatagaacagttttgaggaacatttcattcttgaacgcagcatctgacatggttctcagcaagttggaatagtaaggattattggcttgtttcgatgagtggaagcggcatgtttgtagcatacaagttattcaataatcttgtgctgatgacctaaaaatatgtcttaactattcatcaaggaaagcctggtgaagcctttacttgttactacttcaacagttggaattagttgctctttttacttgatgaaacaaaactatacctctgaatatttatggatactttttactaaatcaggcttgtgttcttaatccaaattagtaaagttttatggaagctgaaatgtaatacagtagtctccccttatctgtaagagatacattccaagacccctagtggatgcctgaaacctcagatagtactgaaccctttatcaactatgttttttcagtctgacaaccaaggcggctactaagtgactaaggggcaggtagtatacagtgtggataagcaggacaaaggggtgattcacatcccaggcaggacagagcaggagatcatgagatttcatcactcaggatggcttgtgatttattttattttattcttttttttttttgagatggagtctcactcttgcccaggctggagtgcagtggtgcgatcttggctcactgcaacctctgcctcctgggttcaagcagttctcctgcctcagcctcccaagtagctgggattacaggcgtccgccaccatgcccagccaatttttgtacttttagtagagatggggtttcaccatgttggccaggctggtcttgaactcctgacctcaggtgatccactcgcctcggcctcccaaagtgctgggattataggcatgcgccaccatgcccggccggcttatgatttaaaacatgaattgtttatttctggaattttccacataatatttttggaccaaggttgcctcaggtaacaaactacagaaagtgaaattgcagataaaggggattactgctcctctgctctaaaattggtgtttgggtgatcagaagcaggtagccaatgggaagagcacttctgagtgataactaaagcagtttggtggccttttcacattctccaatgttcaaacatattttccactttccattttctctttcacctcattttgcctctctatcccccatccctgcttatttcttaagcccattgatggcactcattaaattgtatttagggctaatgagtcattgttccttaatatcgttttcaatatgccacaatttaggacacatttaaaattttctaaaacaatatcctaatcaatattgactaatttgagccacattcccaactctaactcagcacacactgccagtcttccccaatatctgtctcctctcaattccccaccacaccttataaaattgtaatcaaagatatctcactctgtcattgttaatctaagaataaaaacactgactttaatacggttttactaagtttcaaccttctaattaggtaggcctctaggtattctgcagatcactgctggtcttgatagccattaatatatgtttgtattatgttatttttcaactaaatcgcagttggaaaaaaacatatttaatattatgcccttggatctgttactgcatcactagcacttgtgatgcaatagaacacttcgcctgtactgaaagggccaagagtaaatgccttgttttgtttttttgttttgttttgttttgctttttgttaaaacatgtctatagagttggcagttaatgctgaatttgtcaaataccccttccaaaattatacttgtatttaaaaaataaatggatctacctaatttctattgatttaa

SEQ ID NO: 439819 - DNA, 5145 bp, Homo sapiens
aagagtggtatcaacgcagagtcgccattacggccgggggaaggaaaaaaggaagtgtttggacgacagcgagcgggagaagcggggtcaaagggagcactatgtctgcggaagtccccgaggcagcctccgcggaggagcagaaggaaatggaagataaagtgactagtccagagaaagcagaagaagcaaaattaaaagcaagatatcctcatctgggacaaaagcctggaggttcagatttcttaaggaaacggttgcagaaagggcaaaaatattttgattctggggattacaacatggctaaagcaaaaatgaagaacaagcaacttcctactgcagctccggataagacggaggtcactggtgaccacattcccactccgcaagaccttcctcaacggaagccgtcccttgttgctagcaagctggctggctgattaagaggctgaactgcatgaatctgctaaatctcattatttctccttaatatgttacttatctactttttatttcctttcattcactagtcatttgagactgacagctttgcaggtagcagtagtgtgtgctgctattgtggaatatacgtgtgtagagtttttgattagtttaacagtgcactggtgaagaggacatgttagagcaacataagtaaactacttgaaaatagttgtatatattacctaacttctagtgtagtactggttctaacaagtaacaagcaagttttaaaattttaatgttttggctttcattacttcatcttaattatagctttgtatgttactcttatttaatataatctctattgtattgatttcttctgtatttaccttttggattttgtaaaacagaagtttaagaccacaagttagaagaaaggtcacatatttcaaacacaactagatggggctctgaaagatttgtatctctgtgcttgaacttgaatggccttaaacctgtttcagctttaacagtagaattttacttgggcaatatttgcccattctggtgtaacttatgtgactctagtgcttaacagctgccgttgaagctaatattcagttctgtagagttagaataccttttgttgttgaagatgtgaatgaagtatgcatgtgcattaactgttgaattcacttttgtgccatttttgtaaatacagtagttttgcacaacctctcacaaatgtctgtattaatttcacatacttaaaaagtagataatgtgccaaccagaagcacaagagttcctacacaaaactctgtaaatcattatagcttttgtataataagagtagtttacaatctcgggcttatagaataccaaactgaaatcttagttcaatctgccatagacttaagcttttcatttgttactaatatccatgacattcagtggccttgtgcaaatacgatatgttgcttaggcatatcttttgtcctatgcagaacctttcattttgatttttatgaaagttgcaattcatgtaatttatataaactttttaaatgtagaaactttttacttccacactcagttttggagaccctagaataaaaggcttcaatactctgcattccatgccctctgccacctgcttttttttcccctttgttctttgactcaaatggtattgagctgtttgttgtatatggaagcataggtgtctatatccttactcttttatataacacaataatggcgttttccttctaatttctcagttgttaacttctttctcttttttttttaggatagggccttgctctgtcacctgagctctagtgcagtagtgcaatcacagctcactgcaaccttactcctaggctcaagttaactattcttgatcctttattattactaatattctacaattgtttaaataaaaggaactttataatgaaacggttcggaatactggctcaagaacctatgtcaagatgagctgaattttggtaaattattttaggaattatgacaagctaattgaattaggcttgtgacaattagagtaatttacatgacaggtaaaactcctattaaaaatgtttagatgtttgcttctgtagatgtcactttagtaaaataccaatttagttttacttgtggcttatctagttagaacttagcagactttactgggacaagtttactgctcttgtaggagctcctctcacaagtagttgtaatgctgtagcatgatactcaggatcagtagcttgagatgttactatttttctcttcatctttgacttgcagagagcctcccgtttttggatccaggcatcttttctgaatcctggttccatcagtatacctgctctcctatgaccccaaatcatagtcaatggtgcctcaaacatagcaccttaagttaaaggctgcctagtgctctgaggaaagcttgctgattatcttcctgatctactcaccccaaaaggcagaaaagcaacacagtcactgctgtggtcatttgtaatgtaaagatcagttatatatatatatttgtaatgagagcaagtatatactcattatagaatcaatttaagaagtttaaaataacccagagtagaatttctatatctagtcttggtttttttcatgaatatttgcaagtaattaccattaaattcacacatgaaagattaatctgaaagatcagagaccatgttattcctgaccacgatagaactgctcctgtggtttgggacaagtaataaaacaactgcttgagttttgtttgtaaaatacataattaatatttgacctacctcaaaatgtattgaggatctgtgaaatgctaagtgcccaaaataaaatattgctgattgtctttttattaaaagtaaatttcctcattaagccaacctgccttctgtaagtcacagtgcttaaatctcaggatttttcattaggagagacctgtcgttaaggatttgtaggtataattgcttagcctccattattggtgcttgggatagagaggttttagatttttgttttttttttgttctgcctcaaagctcagtttattgaagacatttgtaagctattggatcatcacttgaatcaagattttgactagtgagcttaattgtccatttcttacaatttcaaagttacagtctcagaaatggttaattttaataactgtcctatcataaattaatgttggaataaattgaagttgttgataaatacttcatgaaaactaaagtctgaaataaattacttgttttatgtccaatagctactacatttgatagaacagttttgaggaacatttcattcttgaacgcagcatctgacatggttctcagcaagttggaatagtaaggattattggcttgtttcgatgagtggaagcggcatgtttgtagcatacaagttattcaataatcttgtgctgatgacctaaaaatatgtcttaactattcatcaaggaaagcctggtgaagcctttacttgttactacttcaacagttggaattagttgctctttttacttgatgaaacaaaactatacctctgaatatttatggatactttttactaaatcaggcttgtgttcttaatccaaattagtaaagttttatggaagctgaaatgtaatacagtagtctccccttatctgtaagagatacattccaagacccctagtggatgcctgaaacctcagatagtactgaaccctttatcaactatgttttttcagtctgacaaccaaggcggctactaagtgactaaggggcaggtagtatacagtgtggataagcaggacaaaggggtgattcacatcccaggcaggacagagcaggagatcatgagatttcatcactcaggatggcttgtgatttattttattttattcttttttttttttgagatggagtctcactcttgcccaggctggagtgcagtggtgcgatcttggctcactgcaacctctgcctcctgggttcaagcagttctcctgcctcagcctcccaagtagctgggattacaggcgtccgccaccatgcccagccaatttttgtacttttagtagagatggggtttcaccatgttggccaggctggtcttgaactcctgacctcaggtgatccactcgcctcggcctcccaaagtgctgggattataggcatgcgccaccatgcccggccggcttatgatttaaaacatgaattgtttatttctggaattttccacataatatttttggaccaaggttgcctcaggtaacaaactacagaaagtgaaattgcagataaaggggattactgctcctctgctctaaaattggtgtttgggtgatcagaagcaggtagccaatgggaagagcacttctgagtgataactaaagcagtttggtggccttttcacattctccaatgttcaaacatattttccactttccattttctctttcacctcattttgcctctctatcccccatccctgcttatttcttaagcccattgatggcactcattaaattgtatttagggctaatgagtcattgttccttaatatcgttttcaatatgccacaatttaggacacatttaaaattttctaaaacaatatcctaatcaatattgactaatttgagccacattcccaactctaactcagcacacactgccagtcttccccaatatctgtctcctctcaattccccaccacaccttataaaattgtaatcaaagatatctcactctgtcattgttaatctaagaataaaaacactgactttaatacggttttactaagtttcaaccttctaattaggtaggcctctaggtattctgcagatcactgctggtcttgatagccattaatatatgtttgtattatgttatttttcaactaaatcgcagttggaaaaaaacatatttaatattatgcccttggatctgttactgcatcactagcacttgtgatgcaatagaacacttcgcctgtactgaaagggccaagagtaaatgccttgttttgtttttttgttttgttttgttttgctttttgttaaaacatgtctatagagttggcagttaatgctgaatttgtcaaataccccttccaaaattatacttgtatttaaaaaataaatggatctacctaatttctattgatttaa

SEQ ID NO: 439820 - DNA, 5100 bp, Homo sapiens
acgcggcagccacaaacggatgtgaggtgaggcaggagcggcgacctttgaaggaaaaaaggaagtgtttggacgacagcgagcgggagaagcggggtcaagaaatggaagataaagtgactagtccagagaaagcagaagaagcaaaattaaaagcaagatatcctcatctgggacaaaagcctggaggttcagatttcttaaggaaacggttgcagaaagggcaaaaatattttgattctggggattacaacatggctaaagcaaaaatgaagaacaagcaacttcctactgcagctccggataagacggaggtcactggtgaccacattcccactccgcaagaccttcctcaacggaagccgtcccttgttgctagcaagctggctggctgattaagaggctgaactgcatgaatctgctaaatctcattatttctccttaatatgttacttatctactttttatttcctttcattcactagtcatttgagactgacagctttgcaggtagcagtagtgtgtgctgctattgtggaatatacgtgtgtagagtttttgattagtttaacagtgcactggtgaagaggacatgttagagcaacataagtaaactacttgaaaatagttgtatatattacctaacttctagtgtagtactggttctaacaagtaacaagcaagttttaaaattttaatgttttggctttcattacttcatcttaattatagctttgtatgttactcttatttaatataatctctattgtattgatttcttctgtatttaccttttggattttgtaaaacagaagtttaagaccacaagttagaagaaaggtcacatatttcaaacacaactagatggggctctgaaagatttgtatctctgtgcttgaacttgaatggccttaaacctgtttcagctttaacagtagaattttacttgggcaatatttgcccattctggtgtaacttatgtgactctagtgcttaacagctgccgttgaagctaatattcagttctgtagagttagaataccttttgttgttgaagatgtgaatgaagtatgcatgtgcattaactgttgaattcacttttgtgccatttttgtaaatacagtagttttgcacaacctctcacaaatgtctgtattaatttcacatacttaaaaagtagataatgtgccaaccagaagcacaagagttcctacacaaaactctgtaaatcattatagcttttgtataataagagtagtttacaatctcgggcttatagaataccaaactgaaatcttagttcaatctgccatagacttaagcttttcatttgttactaatatccatgacattcagtggccttgtgcaaatacgatatgttgcttaggcatatcttttgtcctatgcagaacctttcattttgatttttatgaaagttgcaattcatgtaatttatataaactttttaaatgtagaaactttttacttccacactcagttttggagaccctagaataaaaggcttcaatactctgcattccatgccctctgccacctgcttttttttcccctttgttctttgactcaaatggtattgagctgtttgttgtatatggaagcataggtgtctatatccttactcttttatataacacaataatggcgttttccttctaatttctcagttgttaacttctttctcttttttttttaggatagggccttgctctgtcacctgagctctagtgcagtagtgcaatcacagctcactgcaaccttactcctaggctcaagttaactattcttgatcctttattattactaatattctacaattgtttaaataaaaggaactttataatgaaacggttcggaatactggctcaagaacctatgtcaagatgagctgaattttggtaaattattttaggaattatgacaagctaattgaattaggcttgtgacaattagagtaatttacatgacaggtaaaactcctattaaaaatgtttagatgtttgcttctgtagatgtcactttagtaaaataccaatttagttttacttgtggcttatctagttagaacttagcagactttactgggacaagtttactgctcttgtaggagctcctctcacaagtagttgtaatgctgtagcatgatactcaggatcagtagcttgagatgttactatttttctcttcatctttgacttgcagagagcctcccgtttttggatccaggcatcttttctgaatcctggttccatcagtatacctgctctcctatgaccccaaatcatagtcaatggtgcctcaaacatagcaccttaagttaaaggctgcctagtgctctgaggaaagcttgctgattatcttcctgatctactcaccccaaaaggcagaaaagcaacacagtcactgctgtggtcatttgtaatgtaaagatcagttatatatatatatttgtaatgagagcaagtatatactcattatagaatcaatttaagaagtttaaaataacccagagtagaatttctatatctagtcttggtttttttcatgaatatttgcaagtaattaccattaaattcacacatgaaagattaatctgaaagatcagagaccatgttattcctgaccacgatagaactgctcctgtggtttgggacaagtaataaaacaactgcttgagttttgtttgtaaaatacataattaatatttgacctacctcaaaatgtattgaggatctgtgaaatgctaagtgcccaaaataaaatattgctgattgtctttttattaaaagtaaatttcctcattaagccaacctgccttctgtaagtcacagtgcttaaatctcaggatttttcattaggagagacctgtcgttaaggatttgtaggtataattgcttagcctccattattggtgcttgggatagagaggttttagatttttgttttttttttgttctgcctcaaagctcagtttattgaagacatttgtaagctattggatcatcacttgaatcaagattttgactagtgagcttaattgtccatttcttacaatttcaaagttacagtctcagaaatggttaattttaataactgtcctatcataaattaatgttggaataaattgaagttgttgataaatacttcatgaaaactaaagtctgaaataaattacttgttttatgtccaatagctactacatttgatagaacagttttgaggaacatttcattcttgaacgcagcatctgacatggttctcagcaagttggaatagtaaggattattggcttgtttcgatgagtggaagcggcatgtttgtagcatacaagttattcaataatcttgtgctgatgacctaaaaatatgtcttaactattcatcaaggaaagcctggtgaagcctttacttgttactacttcaacagttggaattagttgctctttttacttgatgaaacaaaactatacctctgaatatttatggatactttttactaaatcaggcttgtgttcttaatccaaattagtaaagttttatggaagctgaaatgtaatacagtagtctccccttatctgtaagagatacattccaagacccctagtggatgcctgaaacctcagatagtactgaaccctttatcaactatgttttttcagtctgacaaccaaggcggctactaagtgactaaggggcaggtagtatacagtgtggataagcaggacaaaggggtgattcacatcccaggcaggacagagcaggagatcatgagatttcatcactcaggatggcttgtgatttattttattttattcttttttttttttgagatggagtctcactcttgcccaggctggagtgcagtggtgcgatcttggctcactgcaacctctgcctcctgggttcaagcagttctcctgcctcagcctcccaagtagctgggattacaggcgtccgccaccatgcccagccaatttttgtacttttagtagagatggggtttcaccatgttggccaggctggtcttgaactcctgacctcaggtgatccactcgcctcggcctcccaaagtgctgggattataggcatgcgccaccatgcccggccggcttatgatttaaaacatgaattgtttatttctggaattttccacataatatttttggaccaaggttgcctcaggtaacaaactacagaaagtgaaattgcagataaaggggattactgctcctctgctctaaaattggtgtttgggtgatcagaagcaggtagccaatgggaagagcacttctgagtgataactaaagcagtttggtggccttttcacattctccaatgttcaaacatattttccactttccattttctctttcacctcattttgcctctctatcccccatccctgcttatttcttaagcccattgatggcactcattaaattgtatttagggctaatgagtcattgttccttaatatcgttttcaatatgccacaatttaggacacatttaaaattttctaaaacaatatcctaatcaatattgactaatttgagccacattcccaactctaactcagcacacactgccagtcttccccaatatctgtctcctctcaattccccaccacaccttataaaattgtaatcaaagatatctcactctgtcattgttaatctaagaataaaaacactgactttaatacggttttactaagtttcaaccttctaattaggtaggcctctaggtattctgcagatcactgctggtcttgatagccattaatatatgtttgtattatgttatttttcaactaaatcgcagttggaaaaaaacatatttaatattatgcccttggatctgttactgcatcactagcacttgtgatgcaatagaacacttcgcctgtactgaaagggccaagagtaaatgccttgttttgtttttttgttttgttttgttttgctttttgttaaaacatgtctatagagttggcagttaatgctgaatttgtcaaataccccttccaaaattatacttgtatttaaaaaataaatggatctacctaatttctattgatttaa

SEQ ID NO: 439821 - DNA, 5541 bp, Homo sapiens
gagccctgggccctgcccaaggccgggtctggcgggcggcctgctcccgccaggcggagggccgcgcccgagatgcggggccgaggcgcatgaggccgaggctcctgcgccccacctttggcttcccgccgtcgctggctggtgcgccgacgaattgggagttccaacgtgccccgcgtttactccgaatcgtgccttttgtaacacctccgtgggtcgcggtgttcctcagtcacttatatttacgcgagagcccaggacgcaggctttgggcgtagagcctaagtttttctgtaagcctcaatttggttaggaagttttattttttcctttgaagaactctccaactacttgtattgtgagcgtgcggttcactccaaaagcagtgcctcgtgtgcgggccgcgatgtgggccaggattggcatttcagggccaacccttgtaaccatggtcagtgagtaaagtccggcctttagtgtcttcacctgtaaaggccgaatactggtgcttgcctcccacggcggggtgaggcctagaggaggaaatggaagataaagtgactagtccagagaaagcagaagaagcaaaattaaaagcaagatatcctcatctgggacaaaagcctggaggttcagatttcttaaggaaacggttgcagaaagggcaaaaatattttgattctggggattacaacatggctaaagcaaaaatgaagaacaagcaacttcctactgcagctccggataagacggaggtcactggtgaccacattcccactccgcaagaccttcctcaacggaagccgtcccttgttgctagcaagctggctggctgattaagaggctgaactgcatgaatctgctaaatctcattatttctccttaatatgttacttatctactttttatttcctttcattcactagtcatttgagactgacagctttgcaggtagcagtagtgtgtgctgctattgtggaatatacgtgtgtagagtttttgattagtttaacagtgcactggtgaagaggacatgttagagcaacataagtaaactacttgaaaatagttgtatatattacctaacttctagtgtagtactggttctaacaagtaacaagcaagttttaaaattttaatgttttggctttcattacttcatcttaattatagctttgtatgttactcttatttaatataatctctattgtattgatttcttctgtatttaccttttggattttgtaaaacagaagtttaagaccacaagttagaagaaaggtcacatatttcaaacacaactagatggggctctgaaagatttgtatctctgtgcttgaacttgaatggccttaaacctgtttcagctttaacagtagaattttacttgggcaatatttgcccattctggtgtaacttatgtgactctagtgcttaacagctgccgttgaagctaatattcagttctgtagagttagaataccttttgttgttgaagatgtgaatgaagtatgcatgtgcattaactgttgaattcacttttgtgccatttttgtaaatacagtagttttgcacaacctctcacaaatgtctgtattaatttcacatacttaaaaagtagataatgtgccaaccagaagcacaagagttcctacacaaaactctgtaaatcattatagcttttgtataataagagtagtttacaatctcgggcttatagaataccaaactgaaatcttagttcaatctgccatagacttaagcttttcatttgttactaatatccatgacattcagtggccttgtgcaaatacgatatgttgcttaggcatatcttttgtcctatgcagaacctttcattttgatttttatgaaagttgcaattcatgtaatttatataaactttttaaatgtagaaactttttacttccacactcagttttggagaccctagaataaaaggcttcaatactctgcattccatgccctctgccacctgcttttttttcccctttgttctttgactcaaatggtattgagctgtttgttgtatatggaagcataggtgtctatatccttactcttttatataacacaataatggcgttttccttctaatttctcagttgttaacttctttctcttttttttttaggatagggccttgctctgtcacctgagctctagtgcagtagtgcaatcacagctcactgcaaccttactcctaggctcaagttaactattcttgatcctttattattactaatattctacaattgtttaaataaaaggaactttataatgaaacggttcggaatactggctcaagaacctatgtcaagatgagctgaattttggtaaattattttaggaattatgacaagctaattgaattaggcttgtgacaattagagtaatttacatgacaggtaaaactcctattaaaaatgtttagatgtttgcttctgtagatgtcactttagtaaaataccaatttagttttacttgtggcttatctagttagaacttagcagactttactgggacaagtttactgctcttgtaggagctcctctcacaagtagttgtaatgctgtagcatgatactcaggatcagtagcttgagatgttactatttttctcttcatctttgacttgcagagagcctcccgtttttggatccaggcatcttttctgaatcctggttccatcagtatacctgctctcctatgaccccaaatcatagtcaatggtgcctcaaacatagcaccttaagttaaaggctgcctagtgctctgaggaaagcttgctgattatcttcctgatctactcaccccaaaaggcagaaaagcaacacagtcactgctgtggtcatttgtaatgtaaagatcagttatatatatatatttgtaatgagagcaagtatatactcattatagaatcaatttaagaagtttaaaataacccagagtagaatttctatatctagtcttggtttttttcatgaatatttgcaagtaattaccattaaattcacacatgaaagattaatctgaaagatcagagaccatgttattcctgaccacgatagaactgctcctgtggtttgggacaagtaataaaacaactgcttgagttttgtttgtaaaatacataattaatatttgacctacctcaaaatgtattgaggatctgtgaaatgctaagtgcccaaaataaaatattgctgattgtctttttattaaaagtaaatttcctcattaagccaacctgccttctgtaagtcacagtgcttaaatctcaggatttttcattaggagagacctgtcgttaaggatttgtaggtataattgcttagcctccattattggtgcttgggatagagaggttttagatttttgttttttttttgttctgcctcaaagctcagtttattgaagacatttgtaagctattggatcatcacttgaatcaagattttgactagtgagcttaattgtccatttcttacaatttcaaagttacagtctcagaaatggttaattttaataactgtcctatcataaattaatgttggaataaattgaagttgttgataaatacttcatgaaaactaaagtctgaaataaattacttgttttatgtccaatagctactacatttgatagaacagttttgaggaacatttcattcttgaacgcagcatctgacatggttctcagcaagttggaatagtaaggattattggcttgtttcgatgagtggaagcggcatgtttgtagcatacaagttattcaataatcttgtgctgatgacctaaaaatatgtcttaactattcatcaaggaaagcctggtgaagcctttacttgttactacttcaacagttggaattagttgctctttttacttgatgaaacaaaactatacctctgaatatttatggatactttttactaaatcaggcttgtgttcttaatccaaattagtaaagttttatggaagctgaaatgtaatacagtagtctccccttatctgtaagagatacattccaagacccctagtggatgcctgaaacctcagatagtactgaaccctttatcaactatgttttttcagtctgacaaccaaggcggctactaagtgactaaggggcaggtagtatacagtgtggataagcaggacaaaggggtgattcacatcccaggcaggacagagcaggagatcatgagatttcatcactcaggatggcttgtgatttattttattttattcttttttttttttgagatggagtctcactcttgcccaggctggagtgcagtggtgcgatcttggctcactgcaacctctgcctcctgggttcaagcagttctcctgcctcagcctcccaagtagctgggattacaggcgtccgccaccatgcccagccaatttttgtacttttagtagagatggggtttcaccatgttggccaggctggtcttgaactcctgacctcaggtgatccactcgcctcggcctcccaaagtgctgggattataggcatgcgccaccatgcccggccggcttatgatttaaaacatgaattgtttatttctggaattttccacataatatttttggaccaaggttgcctcaggtaacaaactacagaaagtgaaattgcagataaaggggattactgctcctctgctctaaaattggtgtttgggtgatcagaagcaggtagccaatgggaagagcacttctgagtgataactaaagcagtttggtggccttttcacattctccaatgttcaaacatattttccactttccattttctctttcacctcattttgcctctctatcccccatccctgcttatttcttaagcccattgatggcactcattaaattgtatttagggctaatgagtcattgttccttaatatcgttttcaatatgccacaatttaggacacatttaaaattttctaaaacaatatcctaatcaatattgactaatttgagccacattcccaactctaactcagcacacactgccagtcttccccaatatctgtctcctctcaattccccaccacaccttataaaattgtaatcaaagatatctcactctgtcattgttaatctaagaataaaaacactgactttaatacggttttactaagtttcaaccttctaattaggtaggcctctaggtattctgcagatcactgctggtcttgatagccattaatatatgtttgtattatgttatttttcaactaaatcgcagttggaaaaaaacatatttaatattatgcccttggatctgttactgcatcactagcacttgtgatgcaatagaacacttcgcctgtactgaaagggccaagagtaaatgccttgttttgtttttttgttttgttttgttttgctttttgttaaaacatgtctatagagttggcagttaatgctgaatttgtcaaataccccttccaaaattatacttgtatttaaaaaataaatggatctacctaatttctattgatttaa

SEQ ID NO: 439822 - DNA, 5147 bp, Homo sapiens
aagagtggtatcaacgcagagtcgccattacggccgggggaaggaaaaaaggaagtgtttggacgacagcgagcgggagaagcggggtcaaagtgaacacaacatgctcccttggtctctgcaaccatcgattcctaacagcctagaggaaatggaagataaagtgactagtccagagaaagcagaagaagcaaaattaaaagcaagatatcctcatctgggacaaaagcctggaggttcagatttcttaaggaaacggttgcagaaagggcaaaaatattttgattctggggattacaacatggctaaagcaaaaatgaagaacaagcaacttcctactgcagctccggataagacggaggtcactggtgaccacattcccactccgcaagaccttcctcaacggaagccgtcccttgttgctagcaagctggctggctgattaagaggctgaactgcatgaatctgctaaatctcattatttctccttaatatgttacttatctactttttatttcctttcattcactagtcatttgagactgacagctttgcaggtagcagtagtgtgtgctgctattgtggaatatacgtgtgtagagtttttgattagtttaacagtgcactggtgaagaggacatgttagagcaacataagtaaactacttgaaaatagttgtatatattacctaacttctagtgtagtactggttctaacaagtaacaagcaagttttaaaattttaatgttttggctttcattacttcatcttaattatagctttgtatgttactcttatttaatataatctctattgtattgatttcttctgtatttaccttttggattttgtaaaacagaagtttaagaccacaagttagaagaaaggtcacatatttcaaacacaactagatggggctctgaaagatttgtatctctgtgcttgaacttgaatggccttaaacctgtttcagctttaacagtagaattttacttgggcaatatttgcccattctggtgtaacttatgtgactctagtgcttaacagctgccgttgaagctaatattcagttctgtagagttagaataccttttgttgttgaagatgtgaatgaagtatgcatgtgcattaactgttgaattcacttttgtgccatttttgtaaatacagtagttttgcacaacctctcacaaatgtctgtattaatttcacatacttaaaaagtagataatgtgccaaccagaagcacaagagttcctacacaaaactctgtaaatcattatagcttttgtataataagagtagtttacaatctcgggcttatagaataccaaactgaaatcttagttcaatctgccatagacttaagcttttcatttgttactaatatccatgacattcagtggccttgtgcaaatacgatatgttgcttaggcatatcttttgtcctatgcagaacctttcattttgatttttatgaaagttgcaattcatgtaatttatataaactttttaaatgtagaaactttttacttccacactcagttttggagaccctagaataaaaggcttcaatactctgcattccatgccctctgccacctgcttttttttcccctttgttctttgactcaaatggtattgagctgtttgttgtatatggaagcataggtgtctatatccttactcttttatataacacaataatggcgttttccttctaatttctcagttgttaacttctttctcttttttttttaggatagggccttgctctgtcacctgagctctagtgcagtagtgcaatcacagctcactgcaaccttactcctaggctcaagttaactattcttgatcctttattattactaatattctacaattgtttaaataaaaggaactttataatgaaacggttcggaatactggctcaagaacctatgtcaagatgagctgaattttggtaaattattttaggaattatgacaagctaattgaattaggcttgtgacaattagagtaatttacatgacaggtaaaactcctattaaaaatgtttagatgtttgcttctgtagatgtcactttagtaaaataccaatttagttttacttgtggcttatctagttagaacttagcagactttactgggacaagtttactgctcttgtaggagctcctctcacaagtagttgtaatgctgtagcatgatactcaggatcagtagcttgagatgttactatttttctcttcatctttgacttgcagagagcctcccgtttttggatccaggcatcttttctgaatcctggttccatcagtatacctgctctcctatgaccccaaatcatagtcaatggtgcctcaaacatagcaccttaagttaaaggctgcctagtgctctgaggaaagcttgctgattatcttcctgatctactcaccccaaaaggcagaaaagcaacacagtcactgctgtggtcatttgtaatgtaaagatcagttatatatatatatttgtaatgagagcaagtatatactcattatagaatcaatttaagaagtttaaaataacccagagtagaatttctatatctagtcttggtttttttcatgaatatttgcaagtaattaccattaaattcacacatgaaagattaatctgaaagatcagagaccatgttattcctgaccacgatagaactgctcctgtggtttgggacaagtaataaaacaactgcttgagttttgtttgtaaaatacataattaatatttgacctacctcaaaatgtattgaggatctgtgaaatgctaagtgcccaaaataaaatattgctgattgtctttttattaaaagtaaatttcctcattaagccaacctgccttctgtaagtcacagtgcttaaatctcaggatttttcattaggagagacctgtcgttaaggatttgtaggtataattgcttagcctccattattggtgcttgggatagagaggttttagatttttgttttttttttgttctgcctcaaagctcagtttattgaagacatttgtaagctattggatcatcacttgaatcaagattttgactagtgagcttaattgtccatttcttacaatttcaaagttacagtctcagaaatggttaattttaataactgtcctatcataaattaatgttggaataaattgaagttgttgataaatacttcatgaaaactaaagtctgaaataaattacttgttttatgtccaatagctactacatttgatagaacagttttgaggaacatttcattcttgaacgcagcatctgacatggttctcagcaagttggaatagtaaggattattggcttgtttcgatgagtggaagcggcatgtttgtagcatacaagttattcaataatcttgtgctgatgacctaaaaatatgtcttaactattcatcaaggaaagcctggtgaagcctttacttgttactacttcaacagttggaattagttgctctttttacttgatgaaacaaaactatacctctgaatatttatggatactttttactaaatcaggcttgtgttcttaatccaaattagtaaagttttatggaagctgaaatgtaatacagtagtctccccttatctgtaagagatacattccaagacccctagtggatgcctgaaacctcagatagtactgaaccctttatcaactatgttttttcagtctgacaaccaaggcggctactaagtgactaaggggcaggtagtatacagtgtggataagcaggacaaaggggtgattcacatcccaggcaggacagagcaggagatcatgagatttcatcactcaggatggcttgtgatttattttattttattcttttttttttttgagatggagtctcactcttgcccaggctggagtgcagtggtgcgatcttggctcactgcaacctctgcctcctgggttcaagcagttctcctgcctcagcctcccaagtagctgggattacaggcgtccgccaccatgcccagccaatttttgtacttttagtagagatggggtttcaccatgttggccaggctggtcttgaactcctgacctcaggtgatccactcgcctcggcctcccaaagtgctgggattataggcatgcgccaccatgcccggccggcttatgatttaaaacatgaattgtttatttctggaattttccacataatatttttggaccaaggttgcctcaggtaacaaactacagaaagtgaaattgcagataaaggggattactgctcctctgctctaaaattggtgtttgggtgatcagaagcaggtagccaatgggaagagcacttctgagtgataactaaagcagtttggtggccttttcacattctccaatgttcaaacatattttccactttccattttctctttcacctcattttgcctctctatcccccatccctgcttatttcttaagcccattgatggcactcattaaattgtatttagggctaatgagtcattgttccttaatatcgttttcaatatgccacaatttaggacacatttaaaattttctaaaacaatatcctaatcaatattgactaatttgagccacattcccaactctaactcagcacacactgccagtcttccccaatatctgtctcctctcaattccccaccacaccttataaaattgtaatcaaagatatctcactctgtcattgttaatctaagaataaaaacactgactttaatacggttttactaagtttcaaccttctaattaggtaggcctctaggtattctgcagatcactgctggtcttgatagccattaatatatgtttgtattatgttatttttcaactaaatcgcagttggaaaaaaacatatttaatattatgcccttggatctgttactgcatcactagcacttgtgatgcaatagaacacttcgcctgtactgaaagggccaagagtaaatgccttgttttgtttttttgttttgttttgttttgctttttgttaaaacatgtctatagagttggcagttaatgctgaatttgtcaaataccccttccaaaattatacttgtatttaaaaaataaatggatctacctaatttctattgatttaa

SEQ ID NO: 439823 - DNA, 5308 bp, Homo sapiens
aagagtggtatcaacgcagagtcgccattacggccgggggaaggaaaaaaggaagtgtttggacgacagcgagcgggagaagcggggtcaagtaggtaggggtgcggtgcgggaggggcaggcgggctccggcgtgcgagggccttggccagcggagcgtttcgcggctccgtgtcgtcataaggcggcggccattttcgcgggcggaggcggcccggcgggccctgggagagctgggacgggcggcggccgggtggcctcggccacccgctaattgcatcttttcccggcgtctcgtctgcagagggagcactatgtctgcggaagtccccgaggcagcctccgcggaggagcagaaggaaatggaagataaagtgactagtccagagaaagcagaagaagcaaaattaaaagcaagatatcctcatctgggacaaaagcctggaggttcagatttcttaaggaaacggttgcagaaagggcaaaaatattttgattctggggattacaacatggctaaagcaaaaatgaagaacaagcaacttcctactgcagctccggataagacggaggtcactggtgaccacattcccactccgcaagaccttcctcaacggaagccgtcccttgttgctagcaagctggctggctgattaagaggctgaactgcatgaatctgctaaatctcattatttctccttaatatgttacttatctactttttatttcctttcattcactagtcatttgagactgacagctttgcaggtagcagtagtgtgtgctgctattgtggaatatacgtgtgtagagtttttgattagtttaacagtgcactggtgaagaggacatgttagagcaacataagtaaactacttgaaaatagttgtatatattacctaacttctagtgtagtactggttctaacaagtaacaagcaagttttaaaattttaatgttttggctttcattacttcatcttaattatagctttgtatgttactcttatttaatataatctctattgtattgatttcttctgtatttaccttttggattttgtaaaacagaagtttaagaccacaagttagaagaaaggtcacatatttcaaacacaactagatggggctctgaaagatttgtatctctgtgcttgaacttgaatggccttaaacctgtttcagctttaacagtagaattttacttgggcaatatttgcccattctggtgtaacttatgtgactctagtgcttaacagctgccgttgaagctaatattcagttctgtagagttagaataccttttgttgttgaagatgtgaatgaagtatgcatgtgcattaactgttgaattcacttttgtgccatttttgtaaatacagtagttttgcacaacctctcacaaatgtctgtattaatttcacatacttaaaaagtagataatgtgccaaccagaagcacaagagttcctacacaaaactctgtaaatcattatagcttttgtataataagagtagtttacaatctcgggcttatagaataccaaactgaaatcttagttcaatctgccatagacttaagcttttcatttgttactaatatccatgacattcagtggccttgtgcaaatacgatatgttgcttaggcatatcttttgtcctatgcagaacctttcattttgatttttatgaaagttgcaattcatgtaatttatataaactttttaaatgtagaaactttttacttccacactcagttttggagaccctagaataaaaggcttcaatactctgcattccatgccctctgccacctgcttttttttcccctttgttctttgactcaaatggtattgagctgtttgttgtatatggaagcataggtgtctatatccttactcttttatataacacaataatggcgttttccttctaatttctcagttgttaacttctttctcttttttttttaggatagggccttgctctgtcacctgagctctagtgcagtagtgcaatcacagctcactgcaaccttactcctaggctcaagttaactattcttgatcctttattattactaatattctacaattgtttaaataaaaggaactttataatgaaacggttcggaatactggctcaagaacctatgtcaagatgagctgaattttggtaaattattttaggaattatgacaagctaattgaattaggcttgtgacaattagagtaatttacatgacaggtaaaactcctattaaaaatgtttagatgtttgcttctgtagatgtcactttagtaaaataccaatttagttttacttgtggcttatctagttagaacttagcagactttactgggacaagtttactgctcttgtaggagctcctctcacaagtagttgtaatgctgtagcatgatactcaggatcagtagcttgagatgttactatttttctcttcatctttgacttgcagagagcctcccgtttttggatccaggcatcttttctgaatcctggttccatcagtatacctgctctcctatgaccccaaatcatagtcaatggtgcctcaaacatagcaccttaagttaaaggctgcctagtgctctgaggaaagcttgctgattatcttcctgatctactcaccccaaaaggcagaaaagcaacacagtcactgctgtggtcatttgtaatgtaaagatcagttatatatatatatttgtaatgagagcaagtatatactcattatagaatcaatttaagaagtttaaaataacccagagtagaatttctatatctagtcttggtttttttcatgaatatttgcaagtaattaccattaaattcacacatgaaagattaatctgaaagatcagagaccatgttattcctgaccacgatagaactgctcctgtggtttgggacaagtaataaaacaactgcttgagttttgtttgtaaaatacataattaatatttgacctacctcaaaatgtattgaggatctgtgaaatgctaagtgcccaaaataaaatattgctgattgtctttttattaaaagtaaatttcctcattaagccaacctgccttctgtaagtcacagtgcttaaatctcaggatttttcattaggagagacctgtcgttaaggatttgtaggtataattgcttagcctccattattggtgcttgggatagagaggttttagatttttgttttttttttgttctgcctcaaagctcagtttattgaagacatttgtaagctattggatcatcacttgaatcaagattttgactagtgagcttaattgtccatttcttacaatttcaaagttacagtctcagaaatggttaattttaataactgtcctatcataaattaatgttggaataaattgaagttgttgataaatacttcatgaaaactaaagtctgaaataaattacttgttttatgtccaatagctactacatttgatagaacagttttgaggaacatttcattcttgaacgcagcatctgacatggttctcagcaagttggaatagtaaggattattggcttgtttcgatgagtggaagcggcatgtttgtagcatacaagttattcaataatcttgtgctgatgacctaaaaatatgtcttaactattcatcaaggaaagcctggtgaagcctttacttgttactacttcaacagttggaattagttgctctttttacttgatgaaacaaaactatacctctgaatatttatggatactttttactaaatcaggcttgtgttcttaatccaaattagtaaagttttatggaagctgaaatgtaatacagtagtctccccttatctgtaagagatacattccaagacccctagtggatgcctgaaacctcagatagtactgaaccctttatcaactatgttttttcagtctgacaaccaaggcggctactaagtgactaaggggcaggtagtatacagtgtggataagcaggacaaaggggtgattcacatcccaggcaggacagagcaggagatcatgagatttcatcactcaggatggcttgtgatttattttattttattcttttttttttttgagatggagtctcactcttgcccaggctggagtgcagtggtgcgatcttggctcactgcaacctctgcctcctgggttcaagcagttctcctgcctcagcctcccaagtagctgggattacaggcgtccgccaccatgcccagccaatttttgtacttttagtagagatggggtttcaccatgttggccaggctggtcttgaactcctgacctcaggtgatccactcgcctcggcctcccaaagtgctgggattataggcatgcgccaccatgcccggccggcttatgatttaaaacatgaattgtttatttctggaattttccacataatatttttggaccaaggttgcctcaggtaacaaactacagaaagtgaaattgcagataaaggggattactgctcctctgctctaaaattggtgtttgggtgatcagaagcaggtagccaatgggaagagcacttctgagtgataactaaagcagtttggtggccttttcacattctccaatgttcaaacatattttccactttccattttctctttcacctcattttgcctctctatcccccatccctgcttatttcttaagcccattgatggcactcattaaattgtatttagggctaatgagtcattgttccttaatatcgttttcaatatgccacaatttaggacacatttaaaattttctaaaacaatatcctaatcaatattgactaatttgagccacattcccaactctaactcagcacacactgccagtcttccccaatatctgtctcctctcaattccccaccacaccttataaaattgtaatcaaagatatctcactctgtcattgttaatctaagaataaaaacactgactttaatacggttttactaagtttcaaccttctaattaggtaggcctctaggtattctgcagatcactgctggtcttgatagccattaatatatgtttgtattatgttatttttcaactaaatcgcagttggaaaaaaacatatttaatattatgcccttggatctgttactgcatcactagcacttgtgatgcaatagaacacttcgcctgtactgaaagggccaagagtaaatgccttgttttgtttttttgttgtttgcttttgtaaacgctatgagtggcagtatgtgaattgcaataccttccaattttttgtttaaataatggtttccattc

SEQ ID NO: 439824 - DNA, 5321 bp, Homo sapiens
aagagtggtatcaacgcagagtcgccattacggccgggggaaggaaaaaaggaagtgtttggacgacagcgagcgggagaagcggggtcaagtaggtaggggtgcggtgcgggaggggcaggcgggctccggcgtgcgagggccttggccagcggagcgtttcgcggctccgtgtcgtcataaggcggcggccattttcgcgggcggaggcggcccggcgggccctgggagagctgggacgggcggcggccgggtggcctcggccacccgctaattgcatcttttcccggcgtctcgtctgcagagggagcactatgtctgcggaagtccccgaggcagcctccgcggaggagcagaaggaaatggaagataaagtgactagtccagagaaagcagaagaagcaaaattaaaagcaagatatcctcatctgggacaaaagcctggaggttcagatttcttaaggaaacggttgcagaaagggcaaaaatattttgattctggggattacaacatggctaaagcaaaaatgaagaacaagcaacttcctactgcagctccggataagacggaggtcactggtgaccacattcccactccgcaagaccttcctcaacggaagccgtcccttgttgctagcaagctggctggctgattaagaggctgaactgcatgaatctgctaaatctcattatttctccttaatatgttacttatctactttttatttcctttcattcactagtcatttgagactgacagctttgcaggtagcagtagtgtgtgctgctattgtggaatatacgtgtgtagagtttttgattagtttaacagtgcactggtgaagaggacatgttagagcaacataagtaaactacttgaaaatagttgtatatattacctaacttctagtgtagtactggttctaacaagtaacaagcaagttttaaaattttaatgttttggctttcattacttcatcttaattatagctttgtatgttactcttatttaatataatctctattgtattgatttcttctgtatttaccttttggattttgtaaaacagaagtttaagaccacaagttagaagaaaggtcacatatttcaaacacaactagatggggctctgaaagatttgtatctctgtgcttgaacttgaatggccttaaacctgtttcagctttaacagtagaattttacttgggcaatatttgcccattctggtgtaacttatgtgactctagtgcttaacagctgccgttgaagctaatattcagttctgtagagttagaataccttttgttgttgaagatgtgaatgaagtatgcatgtgcattaactgttgaattcacttttgtgccatttttgtaaatacagtagttttgcacaacctctcacaaatgtctgtattaatttcacatacttaaaaagtagataatgtgccaaccagaagcacaagagttcctacacaaaactctgtaaatcattatagcttttgtataataagagtagtttacaatctcgggcttatagaataccaaactgaaatcttagttcaatctgccatagacttaagcttttcatttgttactaatatccatgacattcagtggccttgtgcaaatacgatatgttgcttaggcatatcttttgtcctatgcagaacctttcattttgatttttatgaaagttgcaattcatgtaatttatataaactttttaaatgtagaaactttttacttccacactcagttttggagaccctagaataaaaggcttcaatactctgcattccatgccctctgccacctgcttttttttcccctttgttctttgactcaaatggtattgagctgtttgttgtatatggaagcataggtgtctatatccttactcttttatataacacaataatggcgttttccttctaatttctcagttgttaacttctttctcttttttttttaggatagggccttgctctgtcacctgagctctagtgcagtagtgcaatcacagctcactgcaaccttactcctaggctcaagttaactattcttgatcctttattattactaatattctacaattgtttaaataaaaggaactttataatgaaacggttcggaatactggctcaagaacctatgtcaagatgagctgaattttggtaaattattttaggaattatgacaagctaattgaattaggcttgtgacaattagagtaatttacatgacaggtaaaactcctattaaaaatgtttagatgtttgcttctgtagatgtcactttagtaaaataccaatttagttttacttgtggcttatctagttagaacttagcagactttactgggacaagtttactgctcttgtaggagctcctctcacaagtagttgtaatgctgtagcatgatactcaggatcagtagcttgagatgttactatttttctcttcatctttgacttgcagagagcctcccgtttttggatccaggcatcttttctgaatcctggttccatcagtatacctgctctcctatgaccccaaatcatagtcaatggtgcctcaaacatagcaccttaagttaaaggctgcctagtgctctgaggaaagcttgctgattatcttcctgatctactcaccccaaaaggcagaaaagcaacacagtcactgctgtggtcatttgtaatgtaaagatcagttatatatatatatttgtaatgagagcaagtatatactcattatagaatcaatttaagaagtttaaaataacccagagtagaatttctatatctagtcttggtttttttcatgaatatttgcaagtaattaccattaaattcacacatgaaagattaatctgaaagatcagagaccatgttattcctgaccacgatagaactgctcctgtggtttgggacaagtaataaaacaactgcttgagttttgtttgtaaaatacataattaatatttgacctacctcaaaatgtattgaggatctgtgaaatgctaagtgcccaaaataaaatattgctgattgtctttttattaaaagtaaatttcctcattaagccaacctgccttctgtaagtcacagtgcttaaatctcaggatttttcattaggagagacctgtcgttaaggatttgtaggtataattgcttagcctccattattggtgcttgggatagagaggttttagatttttgttttttttttgttctgcctcaaagctcagtttattgaagacatttgtaagctattggatcatcacttgaatcaagattttgactagtgagcttaattgtccatttcttacaatttcaaagttacagtctcagaaatggttaattttaataactgtcctatcataaattaatgttggaataaattgaagttgttgataaatacttcatgaaaactaaagtctgaaataaattacttgttttatgtccaatagctactacatttgatagaacagttttgaggaacatttcattcttgaacgcagcatctgacatggttctcagcaagttggaatagtaaggattattggcttgtttcgatgagtggaagcggcatgtttgtagcatacaagttattcaataatcttgtgctgatgacctaaaaatatgtcttaactattcatcaaggaaagcctggtgaagcctttacttgttactacttcaacagttggaattagttgctctttttacttgatgaaacaaaactatacctctgaatatttatggatactttttactaaatcaggcttgtgttcttaatccaaattagtaaagttttatggaagctgaaatgtaatacagtagtctccccttatctgtaagagatacattccaagacccctagtggatgcctgaaacctcagatagtactgaaccctttatcaactatgttttttcagtctgacaaccaaggcggctactaagtgactaaggggcaggtagtatacagtgtggataagcaggacaaaggggtgattcacatcccaggcaggacagagcaggagatcatgagatttcatcactcaggatggcttgtgatttattttattttattcttttttttttttgagatggagtctcactcttgcccaggctggagtgcagtggtgcgatcttggctcactgcaacctctgcctcctgggttcaagcagttctcctgcctcagcctcccaagtagctgggattacaggcgtccgccaccatgcccagccaatttttgtacttttagtagagatggggtttcaccatgttggccaggctggtcttgaactcctgacctcaggtgatccactcgcctcggcctcccaaagtgctgggattataggcatgcgccaccatgcccggccggcttatgatttaaaacatgaattgtttatttctggaattttccacataatatttttggaccaaggttgcctcaggtaacaaactacagaaagtgaaattgcagataaaggggattactgctcctctgctctaaaattggtgtttgggtgatcagaagcaggtagccaatgggaagagcacttctgagtgataactaaagcagtttggtggccttttcacattctccaatgttcaaacatattttccactttccattttctctttcacctcattttgcctctctatcccccatccctgcttatttcttaagcccattgatggcactcattaaattgtatttagggctaatgagtcattgttccttaatatcgttttcaatatgccacaatttaggacacatttaaaattttctaaaacaatatcctaatcaatattgactaatttgagccacattcccaactctaactcagcacacactgccagtcttccccaatatctgtctcctctcaattccccaccacaccttataaaattgtaatcaaagatatctcactctgtcattgttaatctaagaataaaaacactgactttaatacggttttactaagtttcaaccttctaattaggtaggcctctaggtattctgcagatcactgctggtcttgatagccattaatatatgtttgtattatgttatttttcaactaaatcgcagttggaaagatgcaatagaacacttcgcctgtactgaaagggccaagagtaaatgccttgttttgtttttttgttttgttttgttttgctttttgttaaaacatgtctatagagttggcagttaatgctgaatttgtcaaataccccttccaaatatcctcgattcaaacatacagacctaccaacttctatgaatcccccttccacacactcgggggcggccc

SEQ ID NO: 439825 - DNA, 1401 bp, Homo sapiens
aagagtggtatcaacgcagagtcgccattacggccgggggaaggaaaaaaggaagtgtttggacgacagcgagcgggagaagcggggtcaagtaggtaggggtgcggtgcgggaggggcaggcgggctccggcgtgcgagggccttggccagcggagcgtttcgcggctccgtgtcgtcataaggcggcggccattttcgcgggcggaggcggcccggcgggccctgggagagctgggacgggcggcggccgggtggcctcggccacccgctaattgcatcttttcccggcgtctcgtctgcagagggagcactatgtctgcggaagtccccgaggcagcctccgcggaggagcagaaggaaatggaagataaagtgactagtccagagaaagcagaagaagcaaaattaaaagcaagatatcctcatctgggacaaaagcctggaggttcagatttcttaaggaaacggttgcagaaagggcaaaaatattttgattctggggattacaacatggctaaagcaaaaatgaagaacaagcaacttcctactgcagctccggataagacggaggtcactggtgaccacattcccactccgcaagaccttcctcaacggaagccgtcccttgttgctagcaagctggctggctgattaagaggctgaactgcatgaatctgctaaatctcattatttctccttaatatgttacttatctactttttatttcctttcattcactagtcatttgagactgacagctttgcaggtagcagtagtgtgtgctgctattgtggaatatacgtgtgtagagtttttgattagtttaacagtgcactggtgaagaggacatgttagagcaacataagtaaactacttgaaaatagttgtatatattacctaacttctagtgtagtactggttctaacaagtaacaagcaagttttaaaattttaatgttttggctttcattacttcatcttaattatagctttgtatgttactcttatttaatataatctctattgtattgatttcttctgtatttaccttttggattttgtaaaacagaagtttaagaccacaagttagaagaaaggtcacatatttcaaacacaactagatggggctctgaaagatttgtatctctgtgcttgaacttgaatggccttaaacctgtttcagctttaacagtagaattttacttgggcaatatttgcccattctggtgtaacttatgtgactctagtgcttaacagctgccgttgaagctaatattcagttctgtagagttagaataccttttgttgttgaagatgtgaatgaagtatgcatgtgcattaactgttgaattcacttttgtgccatttttgtaaatacagtagttttgcacaacctctca

SEQ ID NO: 439826 - DNA, 570 bp, Homo sapiens
  misc_feature (19)..(19): n is a, c, g, or t
atctcgtgtccttcggagnttgcctgcgacgtttccaggcgcatcatccacatccagatcataggccagttctgcaaggaagcggagctgattcttcacttttatcattccattccagcgtagccaaccgtggactagtatatctcactctgtcattgttaatctaagaataaaaacactgactttaatacggttttactaagtttcaaccttctaattaggtaggcctctaggtattctgcagatcactgctggtcttgatagccattaatatatgtttgtattatgttatttttcaactaaatcgcagttggaaaaaaacatatttaatattatgcccttggatctgttactgcatcactagcacttgtgatgcaatagaacacttcgcctgtactgaaagggccaagagtaaatgccttgttttgtttttttgttttgttttgttttgctttttgttaaaacatgtctatagagttggcagttaatgctgaatttgtcaaataccccttccaaaattatacttgtatttaaaaaataaatggatctacctaatttctattgatttaa

SEQ ID NO: 439827 - DNA, 1164 bp, Homo sapiens
tggagtcctgttagagattcagtagatggagccaccttcatgttgcccctcactgagctgctctgctcacctctagatgctccccatggctgtttcatagccctctgtaccacatccccatgtactttttcatatcaacggtaagtacctcaaattaccgtatgtatttacttgttcataaggttgatgtctgtaactctttgaaggttgtattagtcgtttgctcctatattactaatgatgacaaagtcgcctgacagagtagatgttcaaatttatggacttaaactgactgacatcttgataatgcccatatccagaggtactccagatattatatcttcatgcagaaaactgaaagatacctttagctacatctaccccagaatgagtgtccaaagcaggtggcaccaccaaaaggcaccttcttttcccatgaaaagagggaagagagttgagaagcctcactcccatccctgctctgccactgacaagttgtgtggcatttggcacatcatgttctctctctacatgcgcctaaaatgacgggtagggtcagagacattggaggatctctcttttctcttccacctctaacacggtaagatcttagcaaagtaaaaaggacagtgataacagaaaaattgttcctctaagagtcccaagtcatcttttttctctccgtgtgtgttagcatttgtgtgtgtctgtgggtgtgtatgcatgtgtgtggaagctatacaaggaaagctgaatccatatgtagacttcatggagactagtactgctccaaatgtgcacaagccatgtgatatggtttgcctctgtgtccccacccaaatctcatgttgaaatgtaatccccaatgctggaggtgggacctggtgggaagattggatcatgggggagttttctcatgatttaacaacatccgccctttgttgtcatgatagtgagttcttgtgagatctggttgtttaaaaatatgtgacacctccccccaccttccttctgctctggccatgtaaagtgctcactccccctttgccttccaccatgattgtaagtttcctgaagcctccctagaagctgagcagatgccagcatcatgcttgctgtgcagcctgcagaactgtgagccaattaaacctctttatgaattat

SEQ ID NO: 439828 - DNA, 397 bp, Homo sapiens
actgttaacattgtgaaccacttgaccctagtgttgcatcttcacaaaaaagagcaatgtgccgtcttctgtctttggaaaatgggacaagcttgctcctgatactaggttttagaagcatacagacttggttttagtactggctttgttctttactaactctgaacaattaaatgagcagatggtctacagggcttagtacagtgcctgacacatagtaagcacttagaaatggtagcttctgactgttgtgctggagtcctgttagagattcagtagatggagccaccttcatgttgcccctcactgagctgctctgctcacctctagatgctccccatggctgtttcatagccctctgtaccacatccccatgtactttttcatatcaacggta

SEQ ID NO: 439829 - DNA, 1028 bp, Homo sapiens
atgggtgtctggggagggtcaagggctggggctgagctttaaaatggttccgacttgtccctctctcagccctccatggcctggcacgaggggatggggatgcttccgcctttccggggctgctggcctggcccttgagtggggcagcctccttgcctggaactcactcactctgggtgcctcctccccaggtggaggtgccaggaagctccctccctcactgtggggcatttcaccattcaaacaggtcgagctgtgctcgggtgctgccagctgctcccaatgtgccgatgtccgtgggcagaatgacttttattgagctcttgttccgtgccaggcattcaatcctcaggtctccaccaaggaggcaggattcttcccatggataggggagggggcggtaggggctgcagggacaaacatcgttggggggtgagtgtgaaaggtgctgatggccctcatctccagctaactgtggagaagcccctgggggctccctgattaatggaggcttagctttctggatggcatctagccagaggctggagacaggtgtgcccctggtggtcacaggctgtgccttggtttcctgagccacctttactctgctctatgccaggctgtgctagcaacacccaaaggtggcctgcggggagccatcacctaggactgactcggcagtgtgcagtggtgcatgcactgtctcagccaacccgctccactacccggcagggtacacattcgcacccctacttcacagaggaagaaacctggaaccagagggggcgtgcctgccaagctcacacagcaggaactgagccagaaacgcagattgggctggctctgaagccaagcctcttcttacttcacccggctgggctcctcatttttacgggtaacagtgaggctgggaaggggaacacagaccaggaagctcggtgagtgatggcagaacgatgcctgcaggcatggaacttttttccgttatcacccaggcctgattcactggccttggcggagatgcttct

SEQ ID NO: 439830 - DNA, 2475 bp, Homo sapiens
gggccctacagagggtccgccatgttccccggcggcgccgccgcttggctctggtagccgccgcccccgcccccaaccccgcccggcccagagcctagccgagccccgggcccagcatggccgccccggagccggcccgggctgcaccgcccccacccccgcccccgccgccccctcccggggctgaccgcgtcgtcaaagctgtccctttccccccaacacatcgcttgacatctgaagaagtatttgatttggatgggatacccagggttgatgttctgaagaaccacttggtgaaagaaggtcgagtagatgaagaaattgcgcttagaattatcaatgagggtgctgccatccttcggagagagaaaaccatgatagaagtagaagctccaatcacagtgtgtggtgacatccatggccaattttttgatctgatgaaactttttgaagtaggaggatcacctgctaatacacgatacctttttcttggcgattatgtggacagaggttattttagtatagagcatgttctaggcactgaagacatatcgattaatcctcacaataatattaatgagtgtgtcttatatttatgggttctgaagattctatacccaagcacattatttcttctgagaggcaaccatgaatgcagacaccttactgaatattttacctttaagcaggaatgtaaaattaagtattcggaaagagtctatgaagcttgtatggaagcttttgatagtttgcctcttgctgcacttttaaaccaacagtttctttgtgttcatggtggactttcaccagaaatacacacactggatgatattaggagattagatagattcaaagagccacctgcatttggaccaatgtgtgacttgttatggtccgatccttctgaagattttggaaatgaaaaatcacaggaacattttagtcacaatacagttcgaggatgttcttatttttataactatccagcagtgtgtgaatttttgcaaaacaataatttgttatcgattattagagctcatgaagctcaagatgcaggctatagaatgtacagaaaaagtcaaactacagggttcccttcattaataacaattttttcggcacctaattacttagatgtctacaataataaagctgctgtattaaagtatgaaaataatgtgatgaatattcgacagtttaactgttctccacatccttactggttgcctaattttatggatgtcttcacgtggtctttaccgtttgttggagaaaaagtgacagaaatgttggtaaatgttctgagtatttgctctgatgatgaactaatgactgaaggtgaagaccagtttgatgtaggttcagctgcagcccggaaagaaatcataagaaacaaaattcgagcaattggcaagatggcaagagtcttctctgttctcagggaggagagtgaaagtgtgctgacactcaagggcctgactcccacagggatgttgcctagtggagtgttagctggaggacggcagaccctgcaaagtggtaatgatgttatgcaacttgctgtgcctcagatggactggggcacacctcactcttttgctaacaattcacataatgcatgcagggaattccttctgttttttagttcctgtctcagcagctgacctagacagggtactgtattagctagtgtctcattaatacctgatcagggcagaaaactgatagaatgggtattcctttcaattgaaaataatggtcagttcctcagcttttcatgaaatgatatgggagcagctcatatcataatgtctgaaatatttatttattcatctgtctaattcacccttttcttttaaaagccccagtttcagaatgtgaatcagggatattcctgttactaaaatggaaatgtaattccaagtttcttttttaattttttaaatttatgtcattgtattggactatgcttatatttaaaactacttaatttagagttaactacctgcttaggccccagaacattacttatgcccttcagttaccaaaagatttgtgcaaggttttgtaccctggtaaatgatgccaaagtttgttttctgtggtgtttgtcaaatgttctatgtataattaactgtctgtaacatgctgtttccttcctctgcagatgtagctgctttcctaaatctgtctgtctttctttaggttagctgtatgtctgtaaaagtatgttcaattaaattactccatcagacacttgtctgtcttgcaatgtagaagcagctttgtagcaccttgttttgaggtttgctgcatttgttgctgcactttgtgcattctgaacatgaatgtaacattagatattaagtcattgttataaggggttgaatttaaatcctgtaagtcaaaattgaaagggtgttattaagtgtgcctttattttgcatgaaaataaaaagaattatacgtaaagca

SEQ ID NO: 439831 - DNA, 1396 bp, Homo sapiens
tcaacatattgaaacattagatacctgcatttgagatgaaaatgttatctctggattgtttggttataatattctcttttggtgttttagtaggattttttttctaaacaaagtaaaatatttctttgtagtaattttgtctgattttccatattaaatgaaacaaatacattcatacatttataagtaaaatgttccaaatgggtgggatttttttgtttgctttattaccattcagctatccttttcaggttgcctgaagctagaaagatcttaaattctcaatttgtttgaactttaaaaacctagaaaattgctcattgccattctgtgtttcctctaaaaactgagttttcacaattttggatttagtaaaaatgtatgttcatcattggattataaagtaaaacaaacattctggaaagaatctggaaatttcattagtaatgtgaagacctgactatagttatagttctacataacagtgttaaaaacaaaacctatgttattattaaaaattagttccttcctccctctaccagccctgattccactcacccccgatctcccttcctcttaatatttttctgcttttatgtattttatatttttaaggctaatgacaaatagttacttatctattaagttattgatgttcaacttatcttgcagctgctgtattaaagtatgaaaataatgtgatgaatattcgacagtttaactgttctccacatccttactggttgcctaattttatggatgtcttcacgtggtctttaccgtttgttggagaaaaaggtataatttttatttttaaaaaaaatttgttttattactgttacatttactccagtttactatcataggcacatacttgctaaaggaaaccaaagtctagtttcactgtggttacagctctccttgtgtcagtgggtgtggacataagagtctcaaagatattttagttagctgtttacagcccccatgtgaggctgtctgggggactgggagaagatttataaatagcccaatgtcttcagctgttggattttctttttttttttttctttagcttaaatcttttatgaaggggtggagagattgctttgcttgaaatgggcccttctgcatatcttaacaccatttttgggcattccaccgaaattcttggggaaatttagtagccttcattttagcaatattagtcattttaatagctgttctatactttaagagaaatcataaagagaaattcagattgtaacccaatattccttctcttatataaaaaatatgtataaaattttagtagtgatgcctttctaatttagaggaacacttgttagtacataataggctttttgagagaaaataaatgctatttaagaaattctgt

SEQ ID NO: 439832 - DNA, 330 bp, Homo sapiens
accactgccaagttaaatctctatctttttatttgtcccaaccaccttttctccatcattcacttccttttttctggactctccatctgaagaacggctcatatatggcaataaaaaaggtacagaccagacagagtaacattgttttgaaatatgacttcataagttatcttcatgtccatgtaagttagcacattcattgagtaatgtctatgcagagtcctcttgggccttgtgcaaatttagcttaagttttatctgtgttagtgtttggtatttttagaagtcatattccaagatatctgtctttctgtgcatggaaatattttc

SEQ ID NO: 439833 - DNA, 324 bp, Homo sapiens
atttattgtacttcatttaaggtaaagaatatctaatactataatacaatattttgagagttctgcctaaaaatgttttggcttaaacaaaaaagttttggttatcctgaaagaacttaattttgtgagacaactcatttctctaataattctcaacaaagaacatgttagtataaatagctttaaaagtggtataatttgcttactatttagaaaaacacttctacccaataaatgaagaagaaagaaaaatccctgctttacagtttttagtcttatctagatccaattattagtttttaagttaatgtatttttggtgact

SEQ ID NO: 439834 - DNA, 3131 bp, Homo sapiens
gggccctacagagggtccgccatgttccccggcggcgccgccgcttggctctggtagccgccgcccccgcccccaaccccgcccggcccagagcctagccgagccccgggcccagcatggccgccccggagccggcccgggctgcaccgcccccacccccgcccccgccgccccctcccggggctgaccgcgtcgtcaaagctgtccctttccccccaacacatcgcttgacatctgaagaagtatttgatttggatgggatacccagggttgatgttctgaagaaccacttggtgaaagaaggtcgagtagatgaagaaattgcgcttagaattatcaatgagggtgctgccatccttcggagagagaaaaccatgatagaagtagaagctccaatcacagtgtgtggtgacatccatggccaattttttgatctgatgaaactttttgaagtaggaggatcacctgctaatacacgatacctttttcttggcgattatgtggacagaggttattttagtatagagtgtgtcttatatttatgggttctgaagattctatacccaagcacattatttcttctgagaggcaaccatgaatgcagacaccttactgaatattttacctttaagcaggaatgtaaaattaagtattcggaaagagtctatgaagcttgtatggaagcttttgatagtttgcctcttgctgcacttttaaaccaacagtttctttgtgttcatggtggactttcaccagaaatacacacactggatgatattaggagattagatagattcaaagagccacctgcatttggaccaatgtgtgacttgttatggtccgatccttctgaagattttggaaatgaaaaatcacaggaacattttagtcacaatacagttcgaggatgttcttatttttataactatccagcagtgtgtgaatttttgcaaaacaataatttgttatcgattattagagctcatgaagctcaagatgcaggctatagaatgtacagaaaaagtcaaactacagggttcccttcattaataacaattttttcggcacctaattacttagatgtctacaataataaagctgctgtattaaagtatgaaaataatgtgatgaatattcgacagtttaactgttctccacatccttactggttgcctaattttatggatgtcttcacgtggtctttaccgtttgttggagaaaaagtgacagaaatgttggtaaatgttctgagtatttgctctgatgatgaactaatgactgaaggtgaagaccagtttgatgtaggttcagctgcagcccggaaagaaatcataagaaacaaaattcgagcaattggcaagatggcaagagtcttctctgttctcagggaggagagtgaaagtgtgctgacactcaagggcctgactcccacagggatgttgcctagtggagtgttagctggaggacggcagaccctgcaaagtgccacagttgaggctattgaggctgaaaaagcaatacgaggattctctccaccacatagaatctgcagttttgaagaggcaaagggtttggataggatcaatgagagaatgccacctcggaaagatgctgtacagcaagatggtttcaattctctgaacaccgcacatgccactgagaaccacgggacgggcaaccatactgcccagtgacccactacttcccagggactctcacatctcgggccccaaatggacagatcacccgaggagctggaggggtcggccaagctgactgtaaatttcacagtctctctgaagaaaccattgtgcttctgagaccctagcccccttcctggatggaggcttgagggccctgggacatgtgctatctgataagattgggtcatcgctgccaaggtggagagcagtgagcaaggggcttggggcaatttccagtggagggcatccacacctccattttatgcttgtggttcacacatttaagtttacaaatcagatttcttttccccttcagtagaattagattttgtttttcaatcatgatttcaaatgcaatcctaagagctaatgtggacttttctttttccatgaaatgtctttaaaggatgaattagcatggtcttaaaatacatttctgaggttactagctgtattttgaattgtgagcaaaatgccgagaaacccagttggcatttatacaaaatgttgacctcaggtctatagttcttaaatgtggctaattctgtaacatagtcttggtattttttaattatgaatgcatatcctatttccaggcaggctctcttacttgaacacaaatccaaaaactaatttagagtcttttttgcccagatcttttaagacttacaccccagagatttaagaagaaaacctctaaatttcaaaattatgaagaattacagaattactcatttaaggtactttaaaagaagtttgtacattgtcaaagtaaattttaattcaaatcatgtctgtaaaacttgacgtattttgtgtatgcatgttttcattttgcaaatatttaatatatagacctatgatgtacaggtacgacatgtataggttacctagatgttatgagaaattttagtttattgtgagtactcaagttgcttagagagccaccagggtgatttgctgctggctttctatcatttttatgttttaatgcaaaggaaattttaaaatgttctggaagtgtttttgattaagcaatgcagcctagaagcaatggttctgttcaatcattcagatgttagtggaagcataaaagtcaagactgcatgttgaaacctttcttttgatagttactgaactgcttggttaaactaaatggaaccatgtgctaatttttcacaattattgacctgtattgattgccactgtagtttggtatttccctttactttggtggcctgcttccctcatgccctggaatacaactcagagctccaggcagcggaaccatctattgttttgtttgccagaaagtgcaccctgtatggtctcctgtctaagttggaaatattatgcatgtgcaggactattcgagtattttataaacagtagcacacaataaattccatgcatgggccgctgctccta

SEQ ID NO: 439835 - DNA, 3511 bp, Homo sapiens
gggccctacagagggtccgccatgttccccggcggcgccgccgcttggctctggtagccgccgcccccgcccccaaccccgcccggcccagagcctagccgagccccgggcccagcatggccgccccggagccggcccgggctgcaccgcccccacccccgcccccgccgccccctcccggggctgaccgcgtcgtcaaagctgtccctttccccccaacacatcgcttgacatctgaagaagtatttgatttggatgggatacccagggttgatgttctgaagaaccacttggtgaaagaaggtcgagtagatgaagaaattgcgcttagaattatcaatgagggtgctgccatccttcggagagagaaaaccatgatagaagtagaagctccaatcacagtgtgtggtgacatccatggccaattttttgatctgatgaaactttttgaagtaggaggatcacctgctaatacacgatacctttttcttggcgattatgtggacagaggttattttagtatagagtgtgtcttatatttatgggttctgaagattctatacccaagcacattatttcttctgagaggcaaccatgaatgcagacaccttactgaatattttacctttaagcaggaatgtaaaattaagtattcggaaagagtctatgaagcttgtatggaagcttttgatagtttgcctcttgctgcacttttaaaccaacagtttctttgtgttcatggtggactttcaccagaaatacacacactggatgatattaggagattagatagattcaaagagccacctgcatttggaccaatgtgtgacttgttatggtccgatccttctgaagattttggaaatgaaaaatcacaggaacattttagtcacaatacagttcgaggatgttcttatttttataactatccagcagtgtgtgaatttttgcaaaacaataatttgttatcgattattagagctcatgaagctcaagatgcaggctatagaatgtacagaaaaagtcaaactacagggttcccttcattaataacaattttttcggcacctaattacttagatgtctacaataataaagctgctgtattaaagtatgaaaataatgtgatgaatattcgacagtttaactgttctccacatccttactggttgcctaattttatggatgtcttcacgtggtctttaccgtttgttggagaaaaagtgacagaaatgttggtaaatgttctgagtatttgctctgatgatgaactaatgactgaaggtgaagaccagtttgatgtaggttcagctgcagcccggaaagaaatcataagaaacaaaattcgagcaattggcaagatggcaagagtcttctctgttctcagggaggagagtgaaagtgtgctgacactcaagggcctgactcccacagggatgttgcctagtggagtgttagctggaggacggcagaccctgcaaagtgccacagttgaggctattgaggctgaaaaagcaatacgaggattctctccaccacatagaatctgcagttttgaagaggcaaagggtttggataggatcaatgagagaatgccacctcggaaagatgctgtacagcaagatggtttcaattctctgaacaccgcacatgccactgagaaccacgggacgggcaaccatactgcccagtgacccactacttcccagggactctcacatctcgggccccaaatggacagatcacccgaggagctggaggggtcggccaagctgactgtaaatttcacagtctctctgaagaaaccattgtgcttctgagaccctagcccccttcctggatggaggcttgagggccctgggacatgtgctatctgataagattgggtcatcgctgccaaggtggagagcagtgagcaaggggcttggggcaatttccagtggagggcatccacacctccattttatgcttgtggttcacacatttaagtttacaaatcagatttcttttccccttcagtagaattagattttgtttttcaatcatgatttcaaatgcaatcctaagagctaatgtggacttttctttttccatgaaatgtctttaaaggatgaattagcatggtcttaaaatacatttctgaggttactagctgtattttgaattgtgagcaaaatgccgagaaacccagttggcatttatacaaaatgttgacctcaggtctatagttcttaaatgtggctaattctgtaacatagtcttggtattttttaattatgaatgcatatcctatttccaggcaggctctcttacttgaacacaaatccaaaaactaatttagagtcttttttgcccagatcttttaagacttacaccccagagatttaagaagaaaacctctaaatttcaaaattatgaagaattacagaattactcatttaaggtactttaaaagaagtttgtacattgtcaaagtaaattttaattcaaatcatgtctgtaaaacttgacgtattttgtgtatgcatgttttcattttgcaaatatttaatatatagacctatgatgtacaggtacgacatgtataggttacctagatgttatgagaaattttagtttattgtgagtactcaagttgcttagagagccaccagggtgatttgctgctggctttctatcatttttatgttttaatgcaaaggaaattttaaaatgttctggaagtgtttttgattaagcaatgcagcctagaagcaatggttctgttcaatcattcagatgttagtggaagcataaaagtcaagactgcatgttgaaacctttcttttgatagttactgaactgcttggttaaactaaatggaaccatgtgctaatttttcacaattattgacctgtattgattgccactgtagtttggtatttccctttactttggtggcctgcttccctcatgccctggaatacaactcagagctccaggcagcggaaccatctattgttttgtttgccagaaagtgcaccctgtatggtctcctgtctaagttggaaatattatgcatgtgcaggactattcgagtattttataaacagtagcacacaataaattccatgcatgggccgctgctcctatctctgtgttgggttttatttggaagatgcaatctgatttgtccttttgatgcaaatcagaaaatcctgttactagagctgggatgtcctccggagattatctcgtggatagttcatggtaatttgattaattaaattctttataaattttgccttaaaaaaaacttttgttatatacttgttttacatgagcattagtaactgagcactagaggactttgaatgcctactgtaggcctcctaagtctaatatttaagatcactgtttattgtcttttaattgaaagaaaatatgttattgtctagaattttgttatagtggtattgggaatttactgggtgttctaacaataagaaaaatattagtgataattgcattt

SEQ ID NO: 439836 - DNA, 2290 bp, Homo sapiens
tgctgaggtcgctctagagtatcccggctatcacattatccattttagtcacaatacagttcgaggatgttcttatttttataactatccagcagtgtgtgaatttttgcaaaacaataatttgttatcgattattagagctcatgaagctcaagatgcaggctatagaatgtacagaaaaagtcaaactacagggttcccttcattaataacaattttttcggcacctaattacttagatgtctacaataataaagctgctgtattaaagtatgaaaataatgtgatgaatattcgacagtttaactgttctccacatccttactggttgcctaattttatggatgtcttcacgtggtctttaccgtttgttggagaaaaagtgacagaaatgttggtaaatgttctgagtatttgctctgatgatgaactaatgactgaaggtgaagaccagtttgatgtaggttcagctgcagcccggaaagaaatcataagaaacaaaattcgagcaattggcaagatggcaagagtcttctctgttctcagggaggagagtgaaagtgtgctgacactcaagggcctgactcccacagggatgttgcctagtggagtgttagctggaggacggcagaccctgcaaagtgccacagttgaggctattgaggctgaaaaagcaatacgaggattctctccaccacatagaatctgcagttttgaagaggcaaagggtttggataggatcaatgagagaatgccacctcggaaagatgctgtacagcaagatggtttcaattctctgaacaccgcacatgccactgagaaccacgggacgggcaaccatactgcccagtgacccactacttcccagggactctcacatctcgggccccaaatggacagatcacccgaggagctggaggggtcggccaagctgactgtaaatttcacagtctctctgaagaaaccattgtgcttctgagaccctagcccccttcctggatggaggcttgagggccctgggacatgtgctatctgataagattgggtcatcgctgccaaggtggagagcagtgagcaaggggcttggggcaatttccagtggagggcatccacacctccattttatgcttgtggttcacacatttaagtttacaaatcagatttcttttccccttcagtagaattagattttgtttttcaatcatgatttcaaatgcaatcctaagagctaatgtggacttttctttttccatgaaatgtctttaaaggatgaattagcatggtcttaaaatacatttctgaggttactagctgtattttgaattgtgagcaaaatgccgagaaacccagttggcatttatacaaaatgttgacctcaggtctatagttcttaaatgtggctaattctgtaacatagtcttggtattttttaattatgaatgcatatcctatttccaggcaggctctcttacttgaacacaaatccaaaaactaatttagagtcttttttgcccagatcttttaagacttacaccccagagatttaagaagaaaacctctaaatttcaaaattatgaagaattacagaattactcatttaaggtactttaaaagaagtttgtacattgtcaaagtaaattttaattcaaatcatgtctgtaaaacttgacgtattttgtgtatgcatgttttcattttgcaaatatttaatatatagacctatgatgtacaggtacgacatgtataggttacctagatgttatgagaaattttagtttattgtgagtactcaagttgcttagagagccaccagggtgatttgctgctggctttctatcatttttatgttttaatgcaaaggaaattttaaaatgttctggaagtgtttttgattaagcaatgcagcctagaagcaatggttctgttcaatcattcagatgttagtggaagcataaaagtcaagactgcatgttgaaacctttcttttgatagttactgaactgcttggttaaactaaatggaaccatgtgctaatttttcacaattattgacctgtattgattgccactgtagtttggtatttccctttactttggtggcctgcttccctcatgccctggaatacaactcagagctccaggcagcggaaccatctattgttttgtttgccagaaagtgcaccctgtatggtctcctgtctaagttggaaatattatgcatgtgcaggactattcgagtattttataaacagtagcacacaataaattccatgcatgggccgctgctccta

SEQ ID NO: 439837 - DNA, 2705 bp, Homo sapiens
tcaacatattgaaacattagatacctgcatttgagatgaaaatgttatctctggattgtttggttataatattctcttttggtgttttagtaggattttttttctaaacaaagtaaaatatttctttgtagtaattttgtctgattttccatattaaatgaaacaaatacattcatacatttataagtaaaatgttccaaatgggtgggatttttttgtttgctttattaccattcagctatccttttcaggttgcctgaagctagaaagatcttaaattctcaatttgtttgaactttaaaaacctagaaaattgctcattgccattctgtgtttcctctaaaaactgagttttcacaattttggatttagtaaaaatgtatgttcatcattggattataaagtaaaacaaacattctggaaagaatctggaaatttcattagtaatgtgaagacctgactatagttatagttctacataacagtgttaaaaacaaaacctatgttattattaaaaattagttccttcctccctctaccagccctgattccactcacccccgatctcccttcctcttaatatttttctgcttttatgtattttatatttttaaggctaatgacaaatagttacttatctattaagttattgatgttcaacttatcttgcagctgctgtattaaagtatgaaaataatgtgatgaatattcgacagtttaactgttctccacatccttactggttgcctaattttatggatgtcttcacgtggtctttaccgtttgttggagaaaaagtgacagaaatgttggtaaatgttctgagtatttgctctgatgatgaactaatgactgaaggtgaagaccagtttgatgtaggttcagctgcagcccggaaagaaatcataagaaacaaaattcgagcaattggcaagatggcaagagtcttctctgttctcagggaggagagtgaaagtgtgctgacactcaagggcctgactcccacagggatgttgcctagtggagtgttagctggaggacggcagaccctgcaaagtgccacagttgaggctattgaggctgaaaaagcaatacgaggattctctccaccacatagaatctgcagttttgaagaggcaaagggtttggataggatcaatgagagaatgccacctcggaaagatgctgtacagcaagatggtttcaattctctgaacaccgcacatgccactgagaaccacgggacgggcaaccatactgcccagtgacccactacttcccagggactctcacatctcgggccccaaatggacagatcacccgaggagctggaggggtcggccaagctgactgtaaatttcacagtctctctgaagaaaccattgtgcttctgagaccctagcccccttcctggatggaggcttgagggccctgggacatgtgctatctgataagattgggtcatcgctgccaaggtggagagcagtgagcaaggggcttggggcaatttccagtggagggcatccacacctccattttatgcttgtggttcacacatttaagtttacaaatcagatttcttttccccttcagtagaattagattttgtttttcaatcatgatttcaaatgcaatcctaagagctaatgtggacttttctttttccatgaaatgtctttaaaggatgaattagcatggtcttaaaatacatttctgaggttactagctgtattttgaattgtgagcaaaatgccgagaaacccagttggcatttatacaaaatgttgacctcaggtctatagttcttaaatgtggctaattctgtaacatagtcttggtattttttaattatgaatgcatatcctatttccaggcaggctctcttacttgaacacaaatccaaaaactaatttagagtcttttttgcccagatcttttaagacttacaccccagagatttaagaagaaaacctctaaatttcaaaattatgaagaattacagaattactcatttaaggtactttaaaagaagtttgtacattgtcaaagtaaattttaattcaaatcatgtctgtaaaacttgacgtattttgtgtatgcatgttttcattttgcaaatatttaatatatagacctatgatgtacaggtacgacatgtataggttacctagatgttatgagaaattttagtttattgtgagtactcaagttgcttagagagccaccagggtgatttgctgctggctttctatcatttttatgttttaatgcaaaggaaattttaaaatgttctggaagtgtttttgattaagcaatgcagcctagaagcaatggttctgttcaatcattcagatgttagtggaagcataaaagtcaagactgcatgttgaaacctttcttttgatagttactgaactgcttggttaaactaaatggaaccatgtgctaatttttcacaattattgacctgtattgattgccactgtagtttggtatttccctttactttggtggcctgcttccctcatgccctggaatacaactcagagctccaggcagcggaaccatctattgttttgtttgccagaaagtgcaccctgtatggtctcctgtctaagttggaaatattatgcatgtgcaggactattcgagtattttataaacagtagcacacaataaattccatgcatgggccgctgctccta

SEQ ID NO: 439838 - DNA, 2146 bp, Homo sapiens
gatgggctgaccttgacctccaagatagttctgatctactgtattttaacctttctttaactctttctcctcccaagctcttggtacagatttgtatattgaggattaaccttgtttagcctcctcacttgcccctactctcattgctgccttactgtgatagtcactggtgatcttagggactgatgtaggagataattggtatagtagaagtcagactgagaccctgagaccattgcctggaggttgattttgggggcaggagagggttaacattttttttgtatttttattttttggaaggctttgctaacacttgtcacctataaagctatgatgtttatatttaggtttaaacatttcacattttaaggaaagactgaaatgaggataggattcagttaaagtaagatttatgtgttgctacttacagctactaatttctttcttcttaaaaatcattaattatgtttttgaaatctcagaaatgtttttcaattactgacttatcaaatttgcattttattaagcaatacgaggattctctccaccacatagaatctgcagttttgaagaggcaaagggtttggataggatcaatgagagaatgccacctcggaaagatgctgtacagcaagatggtttcaattctctgaacaccgcacatgccactgagaaccacgggacgggcaaccatactgcccagtgacccactacttcccagggactctcacatctcgggccccaaatggacagatcacccgaggagctggaggggtcggccaagctgactgtaaatttcacagtctctctgaagaaaccattgtgcttctgagaccctagcccccttcctggatggaggcttgagggccctgggacatgtgctatctgataagattgggtcatcgctgccaaggtggagagcagtgagcaaggggcttggggcaatttccagtggagggcatccacacctccattttatgcttgtggttcacacatttaagtttacaaatcagatttcttttccccttcagtagaattagattttgtttttcaatcatgatttcaaatgcaatcctaagagctaatgtggacttttctttttccatgaaatgtctttaaaggatgaattagcatggtcttaaaatacatttctgaggttactagctgtattttgaattgtgagcaaaatgccgagaaacccagttggcatttatacaaaatgttgacctcaggtctatagttcttaaatgtggctaattctgtaacatagtcttggtattttttaattatgaatgcatatcctatttccaggcaggctctcttacttgaacacaaatccaaaaactaatttagagtcttttttgcccagatcttttaagacttacaccccagagatttaagaagaaaacctctaaatttcaaaattatgaagaattacagaattactcatttaaggtactttaaaagaagtttgtacattgtcaaagtaaattttaattcaaatcatgtctgtaaaacttgacgtattttgtgtatgcatgttttcattttgcaaatatttaatatatagacctatgatgtacaggtacgacatgtataggttacctagatgttatgagaaattttagtttattgtgagtactcaagttgcttagagagccaccagggtgatttgctgctggctttctatcatttttatgttttaatgcaaaggaaattttaaaatgttctggaagtgtttttgattaagcaatgcagcctagaagcaatggttctgttcaatcattcagatgttagtggaagcataaaagtcaagactgcatgttgaaacctttcttttgatagttactgaactgcttggttaaactaaatggaaccatgtgctaatttttcacaattattgacctgtattgattgccactgtagtttggtatttccctttactttggtggcctgcttccctcatgccctggaatacaactcagagctccaggcagcggaaccatctattgttttgtttgccagaaagtgcaccctgtatggtctcctgtctaagttggaaatattatgcatgtgcaggactattcgagtattttataaacagtagcacacaataaattccatgcatgggccgctgctccta

SEQ ID NO: 439839 - DNA, 1197 bp, Homo sapiens
  misc_feature (7)..(7): n is a, c, g, or t
ctcgtcnaattcggcagagaacctccattttatgcttgtggttcacacatttaagtttacaaatcagatttcttttccccttcagtagaattagattttgtttttcaatcatgatttcaaatgcaatcctaagagctaatgtggacttttctttttccatgaaatgtctttaaaggatgaattagcatggtcttaaaatacatttctgaggttactagctgtattttgaattgtgagcaaaatgccgagaaacccagttggcatttatacaaaatgttgacctcaggtctatagttcttaaatgtggctaattctgtaacatagtcttggtattttttaattatgaatgcatatcctatttccaggcaggctctcttacttgaacacaaatccaaaaactaatttagagtcttttttgcccagatcttttaagacttacaccccagagatttaagaagaaaacctctaaatttcaaaattatgaagaattacagaattactcatttaaggtactttaaaagaagtttgtacattgtcaaagtaaattttaattcaaatcatgtctgtaaaacttgacgtattttgtgtatgcatgttttcattttgcaaatatttaatatatagacctatgatgtacaggtacgacatgtataggttacctagatgttatgagaaattttagtttattgtgagtactcaagttgcttagagagccaccagggtgatttgctgctggctttctatcatttttatgttttaatgcaaaggaaattttaaaatgttctggaagtgtttttgattaagcaatgcagcctagaagcaatggttctgttcaatcattcagatgttagtggaagcataaaagtcaagactgcatgttgaaacctttcttttgatagttactgaactgcttggttaaactaaatggaaccatgtgctaatttttcacaattattgacctgtattgattgccactgtagtttggtatttccctttactttggtggcctgcttccctcatgccctggaatacaactcagagctccaggcagcggaaccatctattgttttgtttgccagaaagtgcaccctgtatggtctcctgtctaagttggaaatattatgcatgtgcaggactattcgagtattttataaacagtagcacacaataaattccatgcatgggccgctgctccta

SEQ ID NO: 439840 - DNA, 1822 bp, Homo sapiens
gggccctacagagggtccgccatgttccccggcggcgccgccgcttggctctggtagccgccgcccccgcccccaaccccgcccggcccagagcctagccgagccccgggcccagcatggccgccccggagccggcccgggctgcaccgcccccacccccgcccccgccgccccctcccggggctgaccgcgtcgtcaaagctgtccctttccccccaacacatcgcttgacatctgaagaagtatttgatttggatgggatacccagggttgatgttctgaagaaccacttggtgaaagaaggtcgagtagatgaagaaattgcgcttagaattatcaatgagggtgctgccatccttcggagagagaaaaccatgatagaagtagaagctccaatcacagtgtgtggtgacatccatggccaattttttgatctgatgaaactttttgaagtaggaggatcacctgctaatacacgatacctttttcttggcgattatgtggacagaggttattttagtatagagtgtgtcttatatttatgggttctgaagattctatacccaagcacattatttcttctgagaggcaaccatgaatgcagacaccttactgaatattttacctttaagcaggaatgtaaaattaagtattcggaaagagtctatgaagcttgtatggaagcttttgatagtttgcctcttgctgcacttttaaaccaacagtttctttgtgttcatggtggactttcaccagaaatacacacactggatgatattaggagattagatagattcaaagagccacctgcatttggaccaatgtgtgacttgttatggtccgatccttctgaagattttggaaatgaaaaatcacaggaacattttagtcacaatacagttcgaggatgttcttatttttataactatccagcagtgtgtgaatttttgcaaaacaataatttgttatcgattattagagctcatgaagctcaagatgcaggctatagaatgtacagaaaaagtcaaactacagggttcccttcattaataacaattttttcggcacctaattacttagatgtctacaataataaagctgctgtattaaagtatgaaaataatgtgatgaatattcgacagtttaactgttctccacatccttactggttgcctaattttatggatgtcttcacgtggtctttaccgtttgttggagaaaaaggtataatttttatttttaaaaaaaatttgttttattactgttacatttactccagtttactatcataggcacatacttgctaaaggaaaccaaagtctagtttcactgtggttacagctctccttgtgtcagtgggtgtggacataagagtctcaaagatattttagttagctgtttacagcccccatgtgaggctgtctgggggactgggagaagatttataaatagcccaatgtcttcagctgttggattttctttttttttttttctttagcttaaatcttttatgaaggggtggagagattgctttgcttgaaatgggcccttctgcatatcttaacaccatttttgggcattccaccgaaattcttggggaaatttagtagccttcattttagcaatattagtcattttaatagctgttctatactttaagagaaatcataaagagaaattcagattgtaacccaatattccttctcttatataaaaaatatgtataaaattttagtagtgatgcctttctaatttagaggaacacttgttagtacataataggctttttgagagaaaataaatgctatttaagaaattctgt

SEQ ID NO: 439841 - DNA, 1946 bp, Homo sapiens
gggccctacagagggtccgccatgttccccggcggcgccgccgcttggctctggtagccgccgcccccgcccccaaccccgcccggcccagagcctagccgagccccgggcccagcatggccgccccggagccggcccgggctgcaccgcccccacccccgcccccgccgccccctcccggggctgaccgcgtcgtcaaagctgtccctttccccccaacacatcgcttgacatctgaagaagtatttgatttggatgggatacccagggttgatgttctgaagaaccacttggtgaaagaaggtcgagtagatgaagaaattgcgcttagaattatcaatgagggtgctgccatccttcggagagagaaaaccatgatagaagtagaagctccaatcacagtgtgtggtgacatccatggccaattttttgatctgatgaaactttttgaagtaggaggatcacctgctaatacacgatacctttttcttggcgattatgtggacagaggttattttagtatagagtgtgtcttatatttatgggttctgaagattctatacccaagcacattatttcttctgagaggcaaccatgaatgcagacaccttactgaatattttacctttaagcaggaatgtaaaattaagtattcggaaagagtctatgaagcttgtatggaagcttttgatagtttgcctcttgctgcacttttaaaccaacagtttctttgtgttcatggtggactttcaccagaaatacacacactggatgatattaggagattagatagattcaaagagccacctgcatttggaccaatgtgtgacttgttatggtccgatccttctgaagattttggaaatgaaaaatcacaggaacattttagtcacaatacagttcgaggatgttcttatttttataactatccagcagtgtgtgaatttttgcaaaacaataatttgttatcgattattagagctcatgaagctcaagatgcaggctatagaatgtacagaaaaagtcaaactacagggttcccttcattaataacaattttttcggcacctaattacttagatgtctacaataataaagctgctgtattaaagtatgaaaataatgtgatgaatattcgacagtttaactgttctccacatccttactggttgcctaattttatggatgtcttcacgtggtctttaccgtttgttggagaaaaagtgacagaaatgttggtaaatgttctgagtatttgctctgatgatgaactaatgactgaaggtgaagaccagtttgatggtatgattattcatcttactatttttttttttactgtgaaatggtatttctttactgcctagcctcagtacacactattttgcaaaaaatagtcattgctttcagagactatgctatttgataagtaacaagttactttttttggatattaagatttgaaaataatttcagtgatttcatttttttattgtaatatggggaagaagatgaactttgggaaaggagaaatttggaagaaagaagataaggaaaggaaaattgaagtgttaaaaggatgtagttcttggcaaatatggacactggttagagaaaagaggataaaaatactatttgttttattagaacaatattcttagtgcatcagaagcatacctgaactcccaattttgcttttcctgccttttagacactaaaatagactgcttctaaattagtgtgattgtgttctaaaagaccacttgctaatttagtttcagattctgaaagcatttttttccacagaaacaaagttatacatggttgttgttacgtaagccaacaagcctatgtacctaatgcatgtttatagtaaaaagtaatactatagaaacaattcattttattttgttttgaaatttttatttaaaactttattatttaaatgt

SEQ ID NO: 439842 - DNA, 546 bp, Homo sapiens
caacaaagaacatgttagtataaatagctttaaaagtggtataatttgcttactatttagaaaaacacttctacccaataaatgaagaagaaagaaaaatccctgctttacagtttttagtcttatctagatccaattattagtttttaagttaatgtatttttggtgacttatcttttattaattaaaaacatttgcagctgtccctttccccccaacacatcgcttgacatctgaagaagtatttgatttggatgggatacccagggttgatgttctgaagaaccacttggtgaaagaaggtcgagtagatgaagaaattgcgcttagaattatcaatgagggtgctgccatccttcggagagagaaaaccatgatagaagtagaagctccaatcacaggtaagcttattcatgttttgggtattatttttattatgtcattatttagttgcctggatttacaacttactgttttcaatgatactgtatgctaaatcaatattacttggacattatcttgaatttcaaattattttccatactt

SEQ ID NO: 439843 - DNA, 3516 bp, Homo sapiens
gggccctacagagggtccgccatgttccccggcggcgccgccgcttggctctggtagccgccgcccccgcccccaaccccgcccggcccagagcctagccgagccccgggcccagcatggccgccccggagccggcccgggctgcaccgcccccacccccgcccccgccgccccctcccggggctgaccgcgtcgtcaaagctgtccctttccccccaacacatcgcttgacatctgaagaagtatttgatttggatgggatacccagggttgatgttctgaagaaccacttggtgaaagaaggtcgagtagatgaagaaattgcgcttagaattatcaatgagggtgctgccatccttcggagagagaaaaccatgatagaagtagaagctccaatcacagtgtgtggtgacatccatggccaattttttgatctgatgaaactttttgaagtaggaggatcacctgctaatacacgatacctttttcttggcgattatgtggacagaggttattttagtatagagtgtgtcttatatttatgggttctgaagattctatacccaagcacattatttcttctgagaggcaaccatgaatgcagacaccttactgaatattttacctttaagcaggaatgtaaaattaagtattcggaaagagtctatgaagcttgtatggaagcttttgatagtttgcctcttgctgcacttttaaaccaacagtttctttgtgttcatggtggactttcaccagaaatacacacactggatgatattaggagattagatagattcaaagagccacctgcatttggaccaatgtgtgacttgttatggtccgatccttctgaagattttggaaatgaaaaatcacaggaacattttagtcacaatacagttcgaggatgttcttatttttataactatccagcagtgtgtgaatttttgcaaaacaataatttgttatcgattattagagctcatgaagctcaagatgcaggctatagaatgtacagaaaaagtcaaactacagggttcccttcattaataacaattttttcggcacctaattacttagatgtctacaataataaagctgctgtattaaagtatgaaaataatgtgatgaatattcgacagtttaactgttctccacatccttactggttgcctaattttatggatgtcttcacgtggtctttaccgtttgttggagaaaaagtgacagaaatgttggtaaatgttctgagtatttgctctgatgatgaactaatgactgaaggtgaagaccagtttgatgtaggttcagctgcagcccggaaagaaatcataagaaacaaaattcgagcaattggcaagatggcaagagtcttctctgttctcagggaggagagtgaaagtgtgctgacactcaagggcctgactcccacagggatgttgcctagtggagtgttagctggaggacggcagaccctgcaaagtgccacagttgaggctattgaggctgaaaaagcaatacgaggattctctccaccacatagaatctgcagttttgaagaggcaaagggtttggataggatcaatgagagaatgccacctcggaaagatgctgtacagcaagatggtttcaattctctgaacaccgcacatgccactgagaaccacgggacgggcaaccatactgcccagtgacccactacttcccagggactctcacatctcgggccccaaatggacagatcacccgaggagctggaggggtcggccaagctgactgtaaatttcacagtctctctgaagaaaccattgtgcttctgagaccctagcccccttcctggatggaggcttgagggccctgggacatgtgctatctgataagattgggtcatcgctgccaaggtggagagcagtgagcaaggggcttggggcaatttccagtggagggcatccacacctccattttatgcttgtggttcacacatttaagtttacaaatcagatttcttttccccttcagtagaattagattttgtttttcaatcatgatttcaaatgcaatcctaagagctaatgtggacttttctttttccatgaaatgtctttaaaggatgaattagcatggtcttaaaatacatttctgaggttactagctgtattttgaattgtgagcaaaatgccgagaaacccagttggcatttatacaaaatgttgacctcaggtctatagttcttaaatgtggctaattctgtaacatagtcttggtattttttaattatgaatgcatatcctatttccaggcaggctctcttacttgaacacaaatccaaaaactaatttagagtcttttttgcccagatcttttaagacttacaccccagagatttaagaagaaaacctctaaatttcaaaattatgaagaattacagaattactcatttaaggtactttaaaagaagtttgtacattgtcaaagtaaattttaattcaaatcatgtctgtaaaacttgacgtattttgtgtatgcatgttttcattttgcaaatatttaatatatagacctatgatgtacaggtacgacatgtataggttacctagatgttatgagaaattttagtttattgtgagtactcaagttgcttagagagccaccagggtgatttgctgctggctttctatcatttttatgttttaatgcaaaggaaattttaaaatgttctggaagtgtttttgattaagcaatgcagcctagaagcaatggttctgttcaatcattcagatgttagtggaagcataaaagtcaagactgcatgttgaaacctttcttttgatagttactgaactgcttggttaaactaaatggaaccatgtgctaatttttcacaattattgacctgtattgattgccactgtagtttggtatttccctttactttggtggcctgcttccctcatgccctggaatacaactcagagctccaggcagcggaaccatctattgttttgtttgccagaaagtgcaccctgtatggtctcctgtctaagttggaaatattatgcatgtgcaggactattcgagtattttataaacagtagcacacaataaattccatgcatgggccgctgctcctaaaaaaaaaaaaaaaaaaaaaaaaaaaaaaaaaaaaaacaaacaaaaaaaaaaaaaaaaaaaacaaaaaaaaaaaaaagggggggcggccaagagaacaaccaaccagggggagacaccacatgaggagaacgacgaaggcatgatggaacaaaagaggggcccaaaagatgaggagagactagacagaccaagcgccgacggacggtacaaacgaacgcagacaggaggaaaccagcatgattacacatcgagaggagaaaccacactacagggggggagaataagaagagaaagagaagaaggaaaagagcccgagacaaaaaagaaggaggtaaggggacaaccagaacagatgcggagaagagacaggagtgatgagaataa

SEQ ID NO: 439844 - DNA, 3158 bp, Homo sapiens
gggccctacagagggtccgccatgttccccggcggcgccgccgcttggctctggtagccgccgcccccgcccccaaccccgcccggcccagagcctagccgagccccgggcccagcatggccgccccggagccggcccgggctgcaccgcccccacccccgcccccgccgccccctcccggggctgaccgcgtcgtcaaagctgtccctttccccccaacacatcgcttgacatctgaagaagtatttgatttggatgggatacccagggttgatgttctgaagaaccacttggtgaaagaaggtcgagtagatgaagaaattgcgcttagaattatcaatgagggtgctgccatccttcggagagagaaaaccatgatagaagtagaagctccaatcacagtgtgtggtgacatccatggccaattttttgatctgatgaaactttttgaagtaggaggatcacctgctaatacacgatacctttttcttggcgattatgtggacagaggttattttagtatagagtgtgtcttatatttatgggttctgaagattctatacccaagcacattatttcttctgagaggcaaccatgaatgcagacaccttactgaatattttacctttaagcaggaatgtaaaattaagtattcggaaagagtctatgaagcttgtatggaagcttttgatagtttgcctcttgctgcacttttaaaccaacagtttctttgtgttcatggtggactttcaccagaaatacacacactggatgatattaggagattagatagattcaaagagccacctgcatttggaccaatgtgtgacttgttatggtccgatccttctgaagattttggaaatgaaaaatcacaggaacattttagtcacaatacagttcgaggatgttcttatttttataactatccagcagtgtgtgaatttttgcaaaacaataatttgttatcgattattagagctcatgaagctcaagatgcaggctatagaatgtacagaaaaagtcaaactacagggttcccttcattaataacaattttttcggcacctaattacttagatgtctacaataataaagctgctgtattaaagtatgaaaataatgtgatgaatattcgacagtttaactgttctccacatccttactggttgcctaattttatggatgtcttcacgtggtctttaccgtttgttggagaaaaagtgacagaaatgttggtaaatgttctgagtatttgctctgatgatgaactaatgactgaaggtgaagaccagtttgatgaacggctcatatatggcaataaaaaagtaggttcagctgcagcccggaaagaaatcataagaaacaaaattcgagcaattggcaagatggcaagagtcttctctgttctcagggaggagagtgaaagtgtgctgacactcaagggcctgactcccacagggatgttgcctagtggagtgttagctggaggacggcagaccctgcaaagtgccacagttgaggctattgaggctgaaaaagcaatacgaggattctctccaccacatagaatctgcagttttgaagaggcaaagggtttggataggatcaatgagagaatgccacctcggaaagatgctgtacagcaagatggtttcaattctctgaacaccgcacatgccactgagaaccacgggacgggcaaccatactgcccagtgacccactacttcccagggactctcacatctcgggccccaaatggacagatcacccgaggagctggaggggtcggccaagctgactgtaaatttcacagtctctctgaagaaaccattgtgcttctgagaccctagcccccttcctggatggaggcttgagggccctgggacatgtgctatctgataagattgggtcatcgctgccaaggtggagagcagtgagcaaggggcttggggcaatttccagtggagggcatccacacctccattttatgcttgtggttcacacatttaagtttacaaatcagatttcttttccccttcagtagaattagattttgtttttcaatcatgatttcaaatgcaatcctaagagctaatgtggacttttctttttccatgaaatgtctttaaaggatgaattagcatggtcttaaaatacatttctgaggttactagctgtattttgaattgtgagcaaaatgccgagaaacccagttggcatttatacaaaatgttgacctcaggtctatagttcttaaatgtggctaattctgtaacatagtcttggtattttttaattatgaatgcatatcctatttccaggcaggctctcttacttgaacacaaatccaaaaactaatttagagtcttttttgcccagatcttttaagacttacaccccagagatttaagaagaaaacctctaaatttcaaaattatgaagaattacagaattactcatttaaggtactttaaaagaagtttgtacattgtcaaagtaaattttaattcaaatcatgtctgtaaaacttgacgtattttgtgtatgcatgttttcattttgcaaatatttaatatatagacctatgatgtacaggtacgacatgtataggttacctagatgttatgagaaattttagtttattgtgagtactcaagttgcttagagagccaccagggtgatttgctgctggctttctatcatttttatgttttaatgcaaaggaaattttaaaatgttctggaagtgtttttgattaagcaatgcagcctagaagcaatggttctgttcaatcattcagatgttagtggaagcataaaagtcaagactgcatgttgaaacctttcttttgatagttactgaactgcttggttaaactaaatggaaccatgtgctaatttttcacaattattgacctgtattgattgccactgtagtttggtatttccctttactttggtggcctgcttccctcatgccctggaatacaactcagagctccaggcagcggaaccatctattgttttgtttgccagaaagtgcaccctgtatggtctcctgtctaagttggaaatattatgcatgtgcaggactattcgagtattttataaacagtagcacacaataaattccatgcatgggccgctgctccta

SEQ ID NO: 439845 - DNA, 2525 bp, Homo sapiens
gggccctacagagggtccgccatgttccccggcggcgccgccgcttggctctggtagccgccgcccccgcccccaaccccgcccggcccagagcctagccgagccccgggcccagcatggccgccccggagccggcccgggctgcaccgcccccacccccgcccccgccgccccctcccggggctgaccgcgtcgtcaaagctgtccctttccccccaacacatcgcttgacatctgaagaagtatttgatttggatgggatacccagggttgatgttctgaagaaccacttggtgaaagaaggtcgagtagatgaagaaattgcgcttagaattatcaatgagggtgctgccatccttcggagagagaaaaccatgatagaagtagaagctccaatcacagtgtgtggtgacatccatggccaattttttgatctgatgaaactttttgaagtaggaggatcacctgctaatacacgatacctttttcttggcgattatgtggacagaggttattttagtatagagtgtgtcttatatttatgggttctgaagattctatacccaagcacattatttcttctgagaggcaaccatgaatgcagacaccttactgaatattttacctttaagcaggaatgtaaaattaagtattcggaaagagtctatgaagcttgtatggaagcttttgatagtttgcctcttgctgcacttttaaaccaacagtttctttgtgttcatggtggactttcaccagaaatacacacactggatgatattaggagattagatagattcaaagagccacctgcatttggaccaatgtgtgacttgttatggtccgatccttctgaagattttggaaatgaaaaatcacaggaacattttagtcacaatacagttcgaggatgttcttatttttataactatccagcagtgtgtgaatttttgcaaaacaataatttgttatcgattattagagctcatgaagctcaagatgcaggctatagaatgtacagaaaaagtcaaactacagggttcccttcattaataacaattttttcggcacctaattacttagatgtctacaataataaagctgctgtattaaagtatgaaaataatgtgatgaatattcgacagtttaactgttctccacatccttactggttgcctaattttatggatgtcttcacgtggtctttaccgtttgttggagaaaaagtgacagaaatgttggtaaatgttctgagtatttgctctgatgatgaactaatgactgaaggtgaagaccagtttgatgtaggttcagctgcagcccggaaagaaatcataagaaacaaaattcgagcaattggcaagatggcaagagtcttctctgttctcagggaggagagtgaaagtgtgctgacactcaagggcctgactcccacagggatgttgcctagtggagtgttagctggaggacggcagaccctgcaaagtggtaatgatgttatgcaacttgctgtgcctcagatggactggggcacacctcactcttttgctaacaattcacataatgcatgcagggaattccttctgttttttagttcctgtctcagcagctgacctagacagggtactgtattagctagtgtctcattaatacctgatcagggcagaaaactgatagaatgggtattcctttcaattgaaaataatggtcagttcctcagcttttcatgaaatgatatgggagcagctcatatcataatgtctgaaatatttatttattcatctgtctaattcacccttttcttttaaaagccccagtttcagaatgtgaatcagggatattcctgttactaaaatggaaatgtaattccaagtttcttttttaattttttaaatttatgtcattgtattggactatgcttatatttaaaactacttaatttagagttaactacctgcttaggccccagaacattacttatgcccttcagttaccaaaagatttgtgcaaggttttgtaccctggtaaatgatgccaaagtttgttttctgtggtgtttgtcaaatgttctatgtataattaactgtctgtaacatgctgtttccttcctctgcagatgtagctgctttcctaaatctgtctgtctttctttaggttagctgtatgtctgtaaaagtatgttcaattaaattactccatcagacacttgtctgtcttgcaatgtagaagcagctttgtagcaccttgttttgaggtttgctgcatttgttgctgcactttgtgcattctgaacatgaatgtaacattagatattaagtcattgttataaggggttgaatttaaatcctgtaagtcaaaattgaaagggtgttattaagtgtgcctttattttgcatgaaaataaaaagaattatacgtaaagcattcctgtaatctggctcattgaatattttatacttaaaaaactttttttggcgtaaatatttgtgtaaatactgggttaactttttaaaagcccattacagatt

SEQ ID NO: 439846 - DNA, 1240 bp, Homo sapiens
gggccctacagagggtccgccatgttccccggcggcgccgccgcttggctctggtagccgccgcccccgcccccaaccccgcccggcccagagcctagccgagccccgggcccagcatggccgccccggagccggcccgggctgcaccgcccccacccccgcccccgccgccccctcccggggctgaccgcgtcgtcaaagctgtccctttccccccaacacatcgcttgacatctgaagaagtatttgatttggatgggatacccagggttgatgttctgaagaaccacttggtgaaagaaggtcgagtagatgaagaaattgcgcttagaattatcaatgagggtgctgccatccttcggagagagaaaaccatgatagaagtagaagctccaatcacagtgtgtggtgacatccatggccaattttttgatctgatgaaactttttgaagtaggaggatcacctgctaatacacgatacctttttcttggcgattatgtggacagaggttattttagtatagagtgtgtcttatatttatgggttctgaagattctatacccaagcacattatttcttctgagaggcaaccatgaatgcagacaccttactgaatattttacctttaagcaggaatgtaaaattaagtattcggaaagagtctatgaagcttgtatggaagcttttgatagtttgcctcttgctgcacttttaaaccaacagtttctttgtgttcatggtggactttcaccagaaatacacacactggatgatattaggagattagatagattcaaagagccacctgcatttggaccaatgtgtgacttgttatggtccgatccttctgaagattttggaaatgaaaaatcacaggaacattttagtcacaatacagttcgaggatgttcttatttttataattgataatcaacaaaaagcaacaacttagcagtttatttgccaaacaaagaaataaggtacttctttagaaacaaaacacaaaaaaggggggcgctaaagtattctggagggccaagtacccgtccagcttttggcaaggggcccaaggggcgatataagagagcggggggtaacacgcgggggacgtgctgggctggagccctcgcgcgggctatggcacccaccggttagccgaaacatagggtaggacacgcctcgggatgcggtaaccatctagtctaaaagatacacgatagaacccctactacacatcg

SEQ ID NO: 439847 - DNA, 1205 bp, Homo sapiens
  misc_feature (19)..(19): n is a, c, g, or t
  misc_feature (59)..(59): n is a, c, g, or t
  misc_feature (66)..(66): n is a, c, g, or t
  misc_feature (1205)..(1205): n is a, c, g, or t
tccgggggtcccccccccnactcaaccacacaaaaaaaaaaaaaaaaaaaacttagganggaactnagtggttttcccgctgtatctttcagagaacaatgactgatgttgcagattgcttgaaagttttcatgactggtactaaaaatatagcaatgtgggtgggctccaaggactgttccttcagacctcaaatccacatgcttatagaagaccacataggagcactcaacaaatggtacaagtacaatcatgatttgccagcacggataattgtgtaccgtgctggtgtaggggatggtcagctgaaaacacttattgaatatgaagtcccacagctgctgagcagtgtggcagaatccagctcaaataccagctcaagactgtcggtgattgtggtcaggaagaagtgcatgccacgattctttaccgaaatgaaccgcactgtacagaaccccccacttggcactgttgtggattcagaagcaacacgtaacgaatggtatgacttttatctgatcagccaggtggcctgccggggaactgttagtcctacctactataatgtcatctatgatgacaacggcttgaagcccgaccatatgcagagacttacattcaaattgtgccacctgtactacaactggccgggcatagtcagtgtcccagcaccatgtcagtatgctcacaagctgacctttctggtggcacaaagcattcataaagaacccagtctggaattagccaaccatctcttctacctgtgatggcatgaactactggcatcactagatggacaatccaagaagaaattggtatactttgtgcaaatctgccataagctcaaggctgtgactggggaaaaagattgagcttagttttcatgtctaggaaaaaaagcaaaacaacttaatctgaaacagttttaaaaaatgtgtgttattttgttttaaagagttgtatgcttggggtaaattttcattgtcatatgtggaatttaaatataccatcatctacaaagaattccacagagttaaatatcttaagttaaacacttaaaataagtgtttgcgtgatattttgatgatagataaacagagtctaattcccaccccaaattttgctgaggttttcttaatgttgtagagcattttgtagagtggtttaaatagttgaaaataaagttcagaacatcaaaaaaaaan

SEQ ID NO: 439848 - DNA, 1109 bp, Homo sapiens
  misc_feature (1109)..(1109): n is a, c, g, or t
tcacaataatttataatactgtatcataattttaaagacacaaaaaaacaacacagtggttttcccgctgtatctttcagagaacaatgactgatgttgcagattgcttgaaagttttcatgactggagcactcaacaaatggtacaagtacaatcatgatttgccagcacggataattgtgtaccgtgctggtgtaggggatggtcagctgaaaacacttattgaatatgaagtcccacagctgctgagcagtgtggcagaatccagctcaaataccagctcaagactgtcggtgattgtggtcaggaagaagtgcatgccacgattctttaccgaaatgaaccgcactgtacagaaccccccacttggcactgttgtggattcagaagcaacacgtaacgaatggtatgacttttatctgatcagccaggtggcctgccggggaactgttagtcctacctactataatgtcatctatgatgacaacggcttgaagcccgaccatatgcagagacttacattcaaattgtgccacctgtactacaactggccgggcatagtcagtgtcccagcaccatgtcagtatgctcacaagctgacctttctggtggcacaaagcattcataaagaacccagtctggaattagccaaccatctcttctacctgtgatggcatgaactactggcatcactagatggacaatccaagaagaaattggtatactttgtgcaaatctgccataagctcaaggctgtgactggggaaaaagattgagcttagttttcatgtctaggaaaaaaagcaaaacaacttaatctgaaacagttttaaaaaatgtgtgttattttgttttaaagagttgtatgcttggggtaaattttcattgtcatatgtggaatttaaatataccatcatctacaaagaattccacagagttaaatatcttaagttaaacacttaaaataagtgtttgcgtgatattttgatgatagataaacagagtctaattcccaccccaaattttgctgaggttttcttaatgttgtagagcattttgtagagtggtttaaatagttgaaaataaagttcagaacatcaaaaaaaaan

SEQ ID NO: 439849 - DNA, 296 bp, Homo sapiens
cgaaatgaaccgcactgtacagaaccccccacttggcactgttgtggattcagaagcaacacgtaacgaatggcaagtgccgctggaaaatcaatttttaacaaaacattcattgcgtccagtttatgtttgaccttattctgtttgccttctttcctacattcattccattttccccctcaggtatgacttttatctgatcagccaggtggcctgccggggaactgttagtcctacctactataatgtcatctatgatgacaacggcttgaagcccgaccatatgcagagactta

SEQ ID NO: 439850 - DNA, 1105 bp, Homo sapiens
  misc_feature (38)..(39): n is a, c, g, or t
  misc_feature (42)..(42): n is a, c, g, or t
  misc_feature (1105)..(1105): n is a, c, g, or t
ccacttgtactcagttattttcaatcaacacaaaaacnnaantaactttgagtggttttcccgctgtatctttcagagaacaatgactgatgttgcagattgcttgaaagttttcatgactggagcactcaacaaatggtacaagtacaatcatgatttgccagcacggataattgtgtaccgtgctggtgtaggggatggtcagctgaaaacacttattgaatatgaagtcccacagctgctgagcagtgtggcagaatccagctcaaataccagctcaagactgtcggtgattgtggtcaggaagaagtgcatgccacgattctttaccgaaatgaaccgcactgtacagaaccccccacttggcactgttgtggattcagaagcaacacgtaacgaatggtatgacttttatctgatcagccaggtggcctgccggggaactgttagtcctacctactataatgtcatctatgatgacaacggcttgaagcccgaccatatgcagagacttacattcaaattgtgccacctgtactacaactggccgggcatagtcagtgtcccagcaccatgtcagtatgctcacaagctgacctttctggtggcacaaagcattcataaagaacccagtctggaattagccaaccatctcttctacctgtgatggcatgaactactggcatcactagatggacaatccaagaagaaattggtatactttgtgcaaatctgccataagctcaaggctgtgactggggaaaaagattgagcttagttttcatgtctaggaaaaaaagcaaaacaacttaatctgaaacagttttaaaaaatgtgtgttattttgttttaaagagttgtatgcttggggtaaattttcattgtcatatgtggaatttaaatataccatcatctacaaagaattccacagagttaaatatcttaagttaaacacttaaaataagtgtttgcgtgatattttgatgatagataaacagagtctaattcccaccccaaattttgctgaggttttcttaatgttgtagagcattttgtagagtggtttaaatagttgaaaataaagttcagaacatcaaaaaaaaan

SEQ ID NO: 439851 - DNA, 1104 bp, Homo sapiens
  misc_feature (55)..(55): n is a, c, g, or t
  misc_feature (70)..(70): n is a, c, g, or t
  misc_feature (1104)..(1104): n is a, c, g, or t
ctaatatacaacatgatatcgtcgtacagtcaaagaacacaaagccaaagcttangtggaactccgctgntctttcagagacacgactgatgttgcagattgcttgaaagtttttttactggagcactcaacaaatggtacaagtacaatcatgatttgccagcacggataattgtgtaccgtgctggtgtaggggatggtcagctgaaaacacttattgaatatgaagtcccacagctgctgagcagtgtggcagaatccagctcaaataccagctcaagactgtcggtgattgtggtcaggaagaagtgcatgccacgattctttaccgaaatgaaccgcactgtacagaaccccccacttggcactgttgtggattcagaagcaacacgtaacgaatggtatgacttttatctgatcagccaggtggcctgccggggaactgttagtcctacctactataatgtcatctatgatgacaacggcttgaagcccgaccatatgcagagacttacattcaaattgtgccacctgtactacaactggccgggcatagtcagtgtcccagcaccatgtcagtatgctcacaagctgacctttctggtggcacaaagcattcataaagaacccagtctggaattagccaaccatctcttctacctgtgatggcatgaactactggcatcactagatggacaatccaagaagaaattggtatactttgtgcaaatctgccataagctcaaggctgtgactggggaaaaagattgagcttagttttcatgtctaggaaaaaaagcaaaacaacttaatctgaaacagttttaaaaaatgtgtgttattttgttttaaagagttgtatgcttggggtaaattttcattgtcatatgtggaatttaaatataccatcatctacaaagaattccacagagttaaatatcttaagttaaacacttaaaataagtgtttgcgtgatattttgatgatagataaacagagtctaattcccaccccaaattttgctgaggttttcttaatgttgtagagcattttgtagagtggtttaaatagttgaaaataaagttcagaacatcaaaaaaaaan

SEQ ID NO: 439852 - DNA, 1194 bp, Homo sapiens
  misc_feature (50)..(50): n is a, c, g, or t
  misc_feature (1194)..(1194): n is a, c, g, or t
ttatagcagataatctctacgaataaaaccacaaaacaacaagcttgagnggaaacgtggttttcccgctgtatctttcagagaacaatgactgatgttgcagattgcttgaaagttttcatgactggtactaaaaatatagcaatgtgggtgggctccaaggactgttccttcagacctcaaatccacatgcttatagaagaccacataggagcactcaacaaatggtacaagtacaatcatgatttgccagcacggataattgtgtaccgtgctggtgtaggggatggtcagctgaaaacacttattgaatatgaagtcccacagctgctgagcagtgtggcagaatccagctcaaataccagctcaagactgtcggtgattgtggtcaggaagaagtgcatgccacgattctttaccgaaatgaaccgcactgtacagaaccccccacttggcactgttgtggattcagaagcaacacgtaacgaatggtatgacttttatctgatcagccaggtggcctgccggggaactgttagtcctacctactataatgtcatctatgatgacaacggcttgaagcccgaccatatgcagagacttacattcaaattgtgccacctgtactacaactggccgggcatagtcagtgtcccagcaccatgtcagtatgctcacaagctgacctttctggtggcacaaagcattcataaagaacccagtctggaattagccaaccatctcttctacctgtgatggcatgaactactggcatcactagatggacaatccaagaagaaattggtatactttgtgcaaatctgccataagctcaaggctgtgactggggaaaaagattgagcttagttttcatgtctaggaaaaaaagcaaaacaacttaatctgaaacagttttaaaaaatgtgtgttattttgttttaaagagttgtatgcttggggtaaattttcattgtcatatgtggaatttaaatataccatcatctacaaagaattccacagagttaaatatcttaagttaaacacttaaaataagtgtttgcgtgatattttgatgatagataaacagagtctaattcccaccccaaattttgctgaggttttcttaatgttgtagagcattttgtagagtggtttaaatagttgaaaataaagttcagaacatcaaaaaaaaan

SEQ ID NO: 439853 - DNA, 319 bp, Homo sapiens
cattttaaagtatatgtaggaacttaagggttcaccctagttggatagtgaaaacagaaaacagggaatcaattttaagttgttcaactttgcttattgtgagtaaagatatatataatctagcaaagttatgcaaagttagaatatacccattgccctatattctcgatgatagttacccctgccaccattccccacaccctcttagtaagcccatgcagacatcattaatcaagtaggtaggtcattctccgctaatcctagctgaaaaatcaaagtcttaaaattagccacaacatcagagatgacacaggagtta

SEQ ID NO: 439854 - DNA, 560 bp, Homo sapiens
tgtttgttttgagacagggtctcactctgtcacccagactgaagtgcaatggtgcaattatagctcattgcagcctcaaactccaggactcaggtggttctcctacctcagcctcccgagtagctaggactataggcatgtgccaccacaccaggctggtaacttctattagatatcctcttggagctattgagttttaagttgtatgaatgcattgcattacatttcaaatttaaaatacaattttaaaaataagaatgttaactagataattatgtaacaacttaaaaactttgcttaccagaattttattaaaatgttatttggctttcgatcatttaaaaaattcttcatttcttaaagatttatctaatttctctaccaagcatacacagtaataatagcaacaagaaaattaccatcagggagacataaaagcagtataatgaagctagtatagcaagaaggggtgcaaataagaaacgaatactcagaggatctcagctttttatttataaaaattgcaagattttgaacatgcatattagattttattaatt

SEQ ID NO: 439855 - DNA, 1225 bp, Homo sapiens
cagtaacttactccctataacttggaatgtgggtggaggggttcatagttctccctgagtgagacttgcctgctgctctggcccctggtcctgtcctgttctccagcatggtgtgtctgaggctccctggaggctcctgcatggcagttctgacagtgacactgatggtgctgagctccccactggctttggctggggacaccagaccacgtttcttggagtactctacgtctgagtgtcatttcttcaatgggacggagcgggtgcggttcctggacagatacttccataaccaggaggagtacgtgcgcttcgacagcgacgtgggggagttccgggcggtgacggagctggggcggcctgatgccgagtactggaacagccagaaggacctcctggaagcagagcggggccgcggtggacacctactgcagacacaactacggggttgtggagagcttcacagtgcagcggcgagtccatcctaaggtgactgtgtatccttcaaagacccagcccctgcagcaccacaacctcctggtctgttctgtgagtggtttctatccaggcagcattgaagtcaggtggttccggaatggccaggaagagaagactggggtggtgtccacaggcctgatccacaatggagactggaccttccagaccctggtgatgctggaaacagttcctcggagtggagaggtttacacctgccaagtggagcacccaagcgtgacaagccctctcacagtggaatggagagcacggtctgaatctgcacagagcaagatgctgagtggagtcgggggctttgtgctgggcctgctcttccttggggccgggctgttcatctacttcaggaatcagaaaggacactctggacttcagccaagaggattcctgagctgaagtgcagatgacacattcaaagaagaactttctgccccagctttgcaggatgaaaagctttccctcctggctgttattcttccacaagagagggctttctcaggacctggttgctactggttcagcaactgcagaaaatgtcctcccttgtggcttcctcagctcctgcccttggcctgaagcccacagcattgatggcagcgcctcatcttcaacttttgtgctcccctttgcctaaaccctatggcctcctgtgcatctgtactcaccctgtaccacaaacacattacattattaaatgtttctcaaagatgga

SEQ ID NO: 439856 - DNA, 720 bp, Homo sapiens
cagtaacttactccctataacttggaatgtgggtggaggggttcatagttctccctgagtgagacttgcctgctgctctggcccctggtcctgtcctgttctccagcatggtgtgtctgaggctccctggaggctcctgcatggcagttctgacagtgacactgatggtgctgagctccccactggctttggctggggacaccagaccacgtttcttggagtactctacgtctgagtgtcatttcttcaatgggacggagcgggtgcggttcctggacagatacttccataaccaggaggagtacgtgcgcttcgacagcgacgtgggggagtttcccggggcctgggtggaacgggacgccttggggggccgggcccttgaattggcccggaagttaaccttgggggaaaacacagggccccaggcaccacgtggaaccaattccccttggcgcaacacgggaacgaaaggccgggtgtcccccgtcctcgcgattgtggggaaacccaagccccgttaaactttggggtgccaggggaaacccaaacccaaaaaagccttttaaaacgcaggagaggggactattctaggacgtggcgggcaatgcgacagggcccttttttcgcaacaccccagagaggtagtgcgtcgggaccccaagagaggcccgagagggcaccgcgcgcacaaggtctttctcgcccgccaagattttctcc

SEQ ID NO: 439857 - DNA, 710 bp, Homo sapiens
  misc_feature (10)..(10): n is a, c, g, or t
  misc_feature (13)..(15): n is a, c, g, or t
  misc_feature (25)..(25): n is a, c, g, or t
  misc_feature (27)..(29): n is a, c, g, or t
  misc_feature (32)..(32): n is a, c, g, or t
  misc_feature (710)..(710): n is a, c, g, or t
tctatagganacnnncggtgggtcntnnncanctacttcaggaatcagaaaggacactctggacttcagccaacaggattcctgagctgaagtgcagatgacaatttaaggaagaatcttcttccccagctttgcaggatgaaaagctttcccgcctggctgttattcttccacgagagagggctttctcaggacctagttgctactggttcagcaactgcagaaaatgtcctcccttgtggcttcctcagttcctgcccttggcctgaagtcccagcattgatggcagcgcctcatcttcaacttttgtgctcccctttgcctaaaccctatggcctcctgtgcatctgtactcaccctgtaccacaaacacattacattattaaatgtttctcaaagatggagttaaatatcatctggtccatttggctccaaagacaaaaaatgaaaagaaaagaaaagaaaaagggaagattatttcctaacaaaaaaaaaataaaacaactaaaacttaaaatatttaaaattaaactaccatataattttataaccattccaattctttcttccgggtttaatctgggcaacttttacattccccccattataggcctattgggcgatttcccctaaggggggcgaattaacatctatgggccctgttttacaccttggccctgggaaatcctggcgtgtcccaactttaagcn

SEQ ID NO: 439858 - DNA, 692 bp, Homo sapiens
  misc_feature (10)..(10): n is a, c, g, or t
  misc_feature (13)..(15): n is a, c, g, or t
  misc_feature (25)..(25): n is a, c, g, or t
  misc_feature (27)..(29): n is a, c, g, or t
  misc_feature (32)..(32): n is a, c, g, or t
  misc_feature (480)..(480): n is a, c, g, or t
  misc_feature (482)..(482): n is a, c, g, or t
  misc_feature (519)..(519): n is a, c, g, or t
tctatagganacnnncggtgggtcntnnncanctacttcaggaatcagaaaggacactctggacttcagccaacaggattcctgagctgaagtgcagatgacaatttaaggaagaatcttcttccccagctttgcaggatgaaaagctttcccgcctggctgttattcttccacgagagagggctttctcaggacctagttgctactggttcagcaactgcagaaaatgtcctcccttgtggcttcctcagttcctgcccttggcctgaagtcccagcattgatggcagcgcctcatcttcaacttttgtgctcccctttgcctaaaccctatggcctcctgtgcatctgtactcaccctgtaccacaaacacattacattattaaatgtttctcaaagaaaaaaaaaaaaaaaaaaaaaaaaaaaaaaaaaaaaaaaaaaaaaaaaaaaaaaaaaaaaaaaaaaaaaaaaaaaaaaaananaaaaaaaaaaaaaccttgcggcccccttggcccaagngatttttaaactggggcaggttttagcatgggcccgaatttggggttaattgggcaaattcgccctatggggggccatttaaaatcaatggcccgggtttaacaacgtcggaactggaaaaccctgggtgtccccaattaaatgccttggatccccttttcccagttggcgcg

SEQ ID NO: 439859 - DNA, 348 bp, Homo sapiens
  misc_feature (269)..(269): n is a, c, g, or t
  misc_feature (303)..(303): n is a, c, g, or t
aaggatacacaagtgcaccgtagtttgatactctccgctgcactggtgaacgcatctcaccaaccccgtacttgtgtctgcagtacgtgtccaccccggcacagcctccgcgccaggaggtccttcttgcctgctgctctggcccctggtcctgtcctgttctccagcatggtgtgtctgaggctccctggaggctcctgcatggcagttctgacagtgacactgatggtgctgagctccccactggctttggctggggacaccagacnacgtttcttggaggaggttaagtttgagtgtatntcttcaacgggtagaacggggatactctagagtacctcagcataa

SEQ ID NO: 439860 - DNA, 2601 bp, Homo sapiens
cagtaacttactccctataacttggaatgtgggtggaggggttcatagttctccctgagtgagacttgcctgctgctctggcccctggtcctgtcctgttctccagcatggtgtgtctgaggctccctggaggctcctgcatggcagttctgacagtgacactgatggtgctgagctccccactggctttggctggggacaccagaccacgtttcttggagtactctacgtctgagtgtcatttcttcaatgggacggagcgggtgcggttcctggacagatacttccataaccaggaggagtacgtgcgcttcgacagcgacgtgggggagttccgggcggtgacggagctggggcggcctgatgccgagtactggaacagccagaaggacctcctggaagcagagcggggccgcggtggacacctactgcagacacaactacggggttgtggagagcttcacagtgcagcggcgagtccatcctaaggtgactgtgtatccttcaaagacccagcccctgcagcaccacaacctcctggtctgttctgtgagtggtttctatccaggcagcattgaagtcaggtggttccggaatggccaggaagagaagactggggtggtgtccacaggcctgatccacaatggagactggaccttccagaccctggtgatgctggaaacagttcctcggagtggagaggtttacacctgccaagtggagcacccaagcgtgacaagccctctcacagtggaatggagagcacggtctgaatctgcacagagcaagatgctgagtggagtcgggggctttgtgctgggcctgctcttccttggggccgggctgttcatctacttcaggaatcagaaaggacactctggacttcagccaagaggattcctgagctgaagtgcagatgacacattcaaagaagaactttctgccccagctttgcaggatgaaaagctttccctcctggctgttattcttccacaagagagggctttctcaggacctggttgctactggttcagcaactgcagaaaatgtcctcccttgtggcttcctcagctcctgcccttggcctgaagcccacagcattgatggcagcgcctcatcttcaacttttgtgctcccctttgcctaaaccctatggcctcctgtgcatctgtactcaccctgtaccacaaacacattacattattaaatgtttctcaaagatggagttaaatatcatctggtccatttggctccaaagacaaaaaatgaaaagaaaagaaaaagggaaggaagattatttcccaatagaataatgattttcatgtatatgtcatgagtatgtgaggtaatgcatatgtaaaataacttgatttagacattccacactataggcatatatcaaaacttcattctgtacaatataaatacactatacaatttttacttgtcaatcaaaaaagtaatcctaatgtttaaaaaggcaatgcataaaaaactgagaacagactataacaactgaaacaaacttgggcaaccatgagatgagaaaccagctagcaagtcaatcagaactttttttcaccccgtctacaatattttgtatttataactgtaaattagtgtatagtgtttcactccagagacttcaataatatagtgttatcaaaggacttgtacagatttcagagaaagacaaatttagaagacggaggattctctattatgtgctatctgagagtcagtatgaaatgtcaaatccaaaagtacataatttagaggtctatttcaaagtaatcatttgagcatagtttctccactgtcagagacgactgttattttattttcaatcaaattaaaacttgtttttatgcatatcttatttttagttatatgttacttgtacataagtagcagcacaatacgtacatataaaccctatgagtataaatcctatagaaatatattaagttgataattatgtctgttctgtttgatcacagagttgcaacaaagaggcctcatttcctaagttgaggaaatgattttctcattttatatgagactcgtggtgtggaattacaaggtagaaccaaaatgtgtggaatgagtatttcagtgaagatgtgttctgctgctaataacaggaaattacatctagtggctttatttttctttaacccattatctcacatagccgatagatccaaggctgggcatctccagggttgctcaactcagcaggccagtggcatcaccagcgaccctggaacttcatagctcatctctctatcacacacagtatgtcagctttcctgagatggtagggtgacccctgcagcagctttaggtttgttattcattcacaacaactcccaaaggcaggaaaaggatactcctttctcctgtgtgcctttataaggagcaactaaactgtttccagagtgttcccagtacccactttctcacacattggaatgaccgtgggatcacacgggctcagacaagccaggattcaacctttgcagagtgggcctgaggcacatgggaagaaaaggagcaaaatcatgtattttaaaaaataaagaaatggtggatggagta

SEQ ID NO: 439861 - DNA, 1517 bp, Homo sapiens
  misc_feature (1305)..(1305): n is a, c, g, or t
  misc_feature (1307)..(1307): n is a, c, g, or t
  misc_feature (1344)..(1344): n is a, c, g, or t
cagtaacttactccctataacttggaatgtgggtggaggggttcatagttctccctgagtgagacttgcctgctgctctggcccctggtcctgtcctgttctccagcatggtgtgtctgaggctccctggaggctcctgcatggcagttctgacagtgacactgatggtgctgagctccccactggctttggctggggacaccagaccacgtttcttggagtactctacgtctgagtgtcatttcttcaatgggacggagcgggtgcggttcctggacagatacttccataaccaggaggagtacgtgcgcttcgacagcgacgtgggggagttccgggcggtgacggagctggggcggcctgatgccgagtactggaacagccagaaggacctcctggaagcagagcggggccgcggtggacacctactgcagacacaactacggggttgtggagagcttcacagtgcagcggcgagtccatcctaaggtgactgtgtatccttcaaagacccagcccctgcagcaccacaacctcctggtctgttctgtgagtggtttctatccaggcagcattgaagtcaggtggttccggaatggccaggaagagaagactggggtggtgtccacaggcctgatccacaatggagactggaccttccagaccctggtgatgctggaaacagttcctcggagtggagaggtttacacctgccaagtggagcacccaagcgtgacaagccctctcacagtggaatggagagcacggtctgaatctgcacagagcaagatgctgagtggagtcgggggctttgtgctgggcctgctcttccttggggccgggctgttcatctacttcaggaatcagaaaggacactctggacttcagccaagaggattcctgagctgaagtgcagatgacacattcaaagaagaactttctgccccagctttgcaggatgaaaagctttccctcctggctgttattcttccacaagagagggctttctcaggacctggttgctactggttcagcaactgcagaaaatgtcctcccttgtggcttcctcagctcctgcccttggcctgaagcccacagcattgatggcagcgcctcatcttcaacttttgtgctcccctttgcctaaaccctatggcctcctgtgcatctgtactcaccctgtaccacaaacacattacattattaaatgtttctcaaagatggaaaaaaaaaaaaaaaaaaaaaaaaaaaaaaaaaaaaaaaaaaaaaaaaaaaaaaaaaaaaaaaaaaaaaaaaaaaaaaaananaaaaaaaaaaaaaccttgcggcccccttggcccaagngatttttaaactggggcaggttttagcatgggcccgaatttggggttaattgggcaaattcgccctatggggggccatttaaaatcaatggcccgggtttaacaacgtcggaactggaaaaccctgggtgtccccaattaaatgccttggatccccttttcccagttggcgcg

SEQ ID NO: 439862 - DNA, 2601 bp, Homo sapiens
cagtaacttactccctataacttggaatgtgggtggaggggttcatagttctccctgagtgagacttgcctgctgctctggcccctggtcctgtcctgttctccagcatggtgtgtctgaggctccctggaggctcctgcatggcagttctgacagtgacactgatggtgctgagctccccactggctttggctggggacaccagaccacgtttcttggagtactctacgtctgagtgtcatttcttcaatgggacggagcgggtgcggttcctggacagatacttccataaccaggaggagtacgtgcgcttcgacagcgacgtgggggagttccgggcggtgacggagctggggcggcctgatgccgagtactggaacagccagaaggacctcctggaagcagagcggggccgcggtggacacctactgcagacacaactacggggttgtggagagcttcacagtgcagcggcgagtccatcctaaggtgactgtgtatccttcaaagacccagcccctgcagcaccacaacctcctggtctgttctgtgagtggtttctatccaggcagcattgaagtcaggtggttccggaatggccaggaagagaagactggggtggtgtccacaggcctgatccacaatggagactggaccttccagaccctggtgatgctggaaacagttcctcggagtggagaggtttacacctgccaagtggagcacccaagcgtgacaagccctctcacagtggaatggagagcacggtctgaatctgcacagagcaagatgctgagtggagtcgggggctttgtgctgggcctgctcttccttggggccgggctgttcatctacttcaggaatcagaaagaacactctcctctgtcttttgcaggattcctgagctgaagtgcagatgacacattcaaagaagaactttctgccccagctttgcaggatgaaaagctttccctcctggctgttattcttccacaagagagggctttctcaggacctggttgctactggttcagcaactgcagaaaatgtcctcccttgtggcttcctcagctcctgcccttggcctgaagcccacagcattgatggcagcgcctcatcttcaacttttgtgctcccctttgcctaaaccctatggcctcctgtgcatctgtactcaccctgtaccacaaacacattacattattaaatgtttctcaaagatggagttaaatatcatctggtccatttggctccaaagacaaaaaatgaaaagaaaagaaaaagggaaggaagattatttcccaatagaataatgattttcatgtatatgtcatgagtatgtgaggtaatgcatatgtaaaataacttgatttagacattccacactataggcatatatcaaaacttcattctgtacaatataaatacactatacaatttttacttgtcaatcaaaaaagtaatcctaatgtttaaaaaggcaatgcataaaaaactgagaacagactataacaactgaaacaaacttgggcaaccatgagatgagaaaccagctagcaagtcaatcagaactttttttcaccccgtctacaatattttgtatttataactgtaaattagtgtatagtgtttcactccagagacttcaataatatagtgttatcaaaggacttgtacagatttcagagaaagacaaatttagaagacggaggattctctattatgtgctatctgagagtcagtatgaaatgtcaaatccaaaagtacataatttagaggtctatttcaaagtaatcatttgagcatagtttctccactgtcagagacgactgttattttattttcaatcaaattaaaacttgtttttatgcatatcttatttttagttatatgttacttgtacataagtagcagcacaatacgtacatataaaccctatgagtataaatcctatagaaatatattaagttgataattatgtctgttctgtttgatcacagagttgcaacaaagaggcctcatttcctaagttgaggaaatgattttctcattttatatgagactcgtggtgtggaattacaaggtagaaccaaaatgtgtggaatgagtatttcagtgaagatgtgttctgctgctaataacaggaaattacatctagtggctttatttttctttaacccattatctcacatagccgatagatccaaggctgggcatctccagggttgctcaactcagcaggccagtggcatcaccagcgaccctggaacttcatagctcatctctctatcacacacagtatgtcagctttcctgagatggtagggtgacccctgcagcagctttaggtttgttattcattcacaacaactcccaaaggcaggaaaaggatactcctttctcctgtgtgcctttataaggagcaactaaactgtttccagagtgttcccagtacccactttctcacacattggaatgaccgtgggatcacacgggctcagacaagccaggattcaacctttgcagagtgggcctgaggcacatgggaagaaaaggagcaaaatcatgtattttaaaaaataaagaaatggtggatggagta

SEQ ID NO: 439863 - DNA, 1529 bp, Homo sapiens
  misc_feature (1529)..(1529): n is a, c, g, or t
cagtaacttactccctataacttggaatgtgggtggaggggttcatagttctccctgagtgagacttgcctgctgctctggcccctggtcctgtcctgttctccagcatggtgtgtctgaggctccctggaggctcctgcatggcagttctgacagtgacactgatggtgctgagctccccactggctttggctggggacaccagaccacgtttcttggagtactctacgtctgagtgtcatttcttcaatgggacggagcgggtgcggttcctggacagatacttccataaccaggaggagtacgtgcgcttcgacagcgacgtgggggagttccgggcggtgacggagctggggcggcctgatgccgagtactggaacagccagaaggacctcctggaagcagagcggggccgcggtggacacctactgcagacacaactacggggttgtggagagcttcacagtgcagcggcgagtccatcctaaggtgactgtgtatccttcaaagacccagcccctgcagcaccacaacctcctggtctgttctgtgagtggtttctatccaggcagcattgaagtcaggtggttccggaatggccaggaagagaagactggggtggtgtccacaggcctgatccacaatggagactggaccttccagaccctggtgatgctggaaacagttcctcggagtggagaggtttacacctgccaagtggagcacccaagcgtgacaagccctctcacagtggaatggagagcacggtctgaatctgcacagagcaagatgctgagtggagtcgggggctttgtgctgggcctgctcttccttggggccgggctgttcatctacttcaggaatcagaaaggacactctggacttcagccaacaggattcctgagctgaagtgcagatgacaatttaaggaagaatcttcttccccagctttgcaggatgaaaagctttcccgcctggctgttattcttccacgagagagggctttctcaggacctagttgctactggttcagcaactgcagaaaatgtcctcccttgtggcttcctcagttcctgcccttggcctgaagtcccagcattgatggcagcgcctcatcttcaacttttgtgctcccctttgcctaaaccctatggcctcctgtgcatctgtactcaccctgtaccacaaacacattacattattaaatgtttctcaaagatggagttaaatatcatctggtccatttggctccaaagacaaaaaatgaaaagaaaagaaaagaaaaagggaagattatttcctaacaaaaaaaaaataaaacaactaaaacttaaaatatttaaaattaaactaccatataattttataaccattccaattctttcttccgggtttaatctgggcaacttttacattccccccattataggcctattgggcgatttcccctaaggggggcgaattaacatctatgggccctgttttacaccttggccctgggaaatcctggcgtgtcccaactttaagcn

SEQ ID NO: 439864 - DNA, 1473 bp, Homo sapiens
  misc_feature (1473)..(1473): n is a, c, g, or t
cagtaacttactccctataacttggaatgtgggtggaggggttcatagttctccctgagtgagacttgcctgctgctctggcccctggtcctgtcctgttctccagcatggtgtgtctgaggctccctggaggctcctgcatggcagttctgacagtgacactgatggtgctgagctccccactggctttggctggggacaccagaccacgtttcttggagtactctacgtctgagtgtcatttcttcaatgggacggagcgggtgcggttcctggacagatacttccataaccaggaggagtacgtgcgcttcgacagcgacgtgggggagttccgggcggtgacggagctggggcggcctgatgccgagtactggaacagccagaaggacctcctggaagcagagcggggccgcggtggacacctactgcagacacaactacggggttgtggagagcttcacagtgcagcggcgagtccatcctaaggtgactgtgtatccttcaaagacccagcccctgcagcaccacaacctcctggtctgttctgtgagtggtttctatccaggcagcattgaagtcaggtggttccggaatggccaggaagagaagactggggtggtgtccacaggcctgatccacaatggagactggaccttccagaccctggtgatgctggaaacagttcctcggagtggagaggtttacacctgccaagtggagcacccaagcgtgacaagccctctcacagtggaatggagagcacggtctgaatctgcacagagcaagatgctgagtggagtcgggggctttgtgctgggcctgctcttccttggggccgggctgttcatctacttcaggaatcagaaaggacactctggacttcagccaagaggattcctgagctgaagtgcagatgacaatttaaggaagaatcttcttccccagctttgcaggatgaaaagctttcccgcctggctgttattcttccacgagagagggctttctcaggacctagttgctactggttcagctcccagcattgatggcagcgcctcatcttcaacttttgtgctcccctttgcctaaaccctatggcctcctgtgcatctgtactcaccctgtaccacaaacacattacattattaaatgtttctcaaagatggagttaaatatcatctggtccatttggctccaaagacaaaaaatgaaaagaaaagaaaagaaaaagggaagattatttcctaacaaaaaaaaaataaaacaactaaaacttaaaatatttaaaattaaactaccatataattttataaccattccaattctttcttccgggtttaatctgggcaacttttacattccccccattataggcctattgggcgatttcccctaaggggggcgaattaacatctatgggccctgttttacaccttggccctgggaaatcctggcgtgtcccaactttaagcn

SEQ ID NO: 439865 - DNA, 1255 bp, Homo sapiens
gacccacgcgtccgcggacgcgtgggtcgacccacgcgtgcggacccacgcgtcccttgcctgctgctctggcccctggtcctgtcctgttctccagcatggtgtgtctgaggctccctggaggctcctgcatggcagttctgacagtgacactgatggtgctgagctccccactggctttggctggggacaccagacgaggccgcctgtgtgactggatcgttcgtgtccccacagcacgtttcttggagtactctacgtctgagtgtcatttcttcaatgggacggagcgggtgcggttcctggacagatacttccataaccaggaggagtacgtgcgcttcgacagcgacgtgggggagttccgggcggtgacggagctggggcggcctgatgccgagtactggaacagccagaaggacctcctggaagcagagcggggccgcggtggacacctactgcagacacaactacggggttgtggagagcttcacagtgcagcggcgagtccatcctaaggtgactgtgtatccttcaaagacccagcccctgcagcaccacaacctcctggtctgttctgtgagtggtttctatccaggcagcattgaagtcaggtggttccggaatggccaggaagagaagactggggtggtgtccacaggcctgatccacaatggagactggaccttccagaccctggtgatgctggaaacagttcctcggagtggagaggtttacacctgccaagtggagcacccaagcgtgacaagccctctcacagtggaatggagagcacggtctgaatctgcacagagcaagatgctgagtggagtcgggggctttgtgctgggcctgctcttccttggggccgggctgttcatctacttcaggaatcagaaaggacactctggacttcagccaagaggattcctgagctgaagtgcagatgacacattcaaagaagaactttctgccccagctttgcaggatgaaaagctttccctcctggctgttattcttccacaagagagggctttctcaggacctggttgctactggttcagcaactgcagaaaatgtcctcccttgtggcttcctcagctcctgcccttggcctgaagcccacagcattgatggcagcgcctcatcttcaacttttgtgctcccctttgcctaaaccctatggcctcctgtgcatctgtactcaccctgtaccacaaacacattacattattaaatgtttctcaaagatgga

SEQ ID NO: 439866 - DNA, 2490 bp, Homo sapiens
cagtaacttactccctataacttggaatgtgggtggaggggttcatagttctccctgagtgagacttgcctgctgctctggcccctggtcctgtcctgttctccagcatggtgtgtctgaggctccctggaggctcctgcatggcagttctgacagtgacactgatggtgctgagctccccactggctttggctggggacaccagaccacgtttcttggagtactctacgtctgagtgtcatttcttcaatgggacggagcgggtgcggttcctggacagatacttccataaccaggaggagtacgtgcgcttcgacagcgacgtgggggagttccgggcggtgacggagctggggcggcctgatgccgagtactggaacagccagaaggacctcctggaagcagagcggggccgcggtggacacctactgcagacacaactacggggttgtggagagcttcacagtgcagcggcgagtccatcctaaggtgactgtgtatccttcaaagacccagcccctgcagcaccacaacctcctggtctgttctgtgagtggtttctatccaggcagcattgaagtcaggtggttccggaatggccaggaagagaagactggggtggtgtccacaggcctgatccacaatggagactggaccttccagaccctggtgatgctggaaacagttcctcggagtggagaggtttacacctgccaagtggagcacccaagcgtgacaagccctctcacagtggaatggagacactctggacttcagccaagaggattcctgagctgaagtgcagatgacacattcaaagaagaactttctgccccagctttgcaggatgaaaagctttccctcctggctgttattcttccacaagagagggctttctcaggacctggttgctactggttcagcaactgcagaaaatgtcctcccttgtggcttcctcagctcctgcccttggcctgaagcccacagcattgatggcagcgcctcatcttcaacttttgtgctcccctttgcctaaaccctatggcctcctgtgcatctgtactcaccctgtaccacaaacacattacattattaaatgtttctcaaagatggagttaaatatcatctggtccatttggctccaaagacaaaaaatgaaaagaaaagaaaaagggaaggaagattatttcccaatagaataatgattttcatgtatatgtcatgagtatgtgaggtaatgcatatgtaaaataacttgatttagacattccacactataggcatatatcaaaacttcattctgtacaatataaatacactatacaatttttacttgtcaatcaaaaaagtaatcctaatgtttaaaaaggcaatgcataaaaaactgagaacagactataacaactgaaacaaacttgggcaaccatgagatgagaaaccagctagcaagtcaatcagaactttttttcaccccgtctacaatattttgtatttataactgtaaattagtgtatagtgtttcactccagagacttcaataatatagtgttatcaaaggacttgtacagatttcagagaaagacaaatttagaagacggaggattctctattatgtgctatctgagagtcagtatgaaatgtcaaatccaaaagtacataatttagaggtctatttcaaagtaatcatttgagcatagtttctccactgtcagagacgactgttattttattttcaatcaaattaaaacttgtttttatgcatatcttatttttagttatatgttacttgtacataagtagcagcacaatacgtacatataaaccctatgagtataaatcctatagaaatatattaagttgataattatgtctgttctgtttgatcacagagttgcaacaaagaggcctcatttcctaagttgaggaaatgattttctcattttatatgagactcgtggtgtggaattacaaggtagaaccaaaatgtgtggaatgagtatttcagtgaagatgtgttctgctgctaataacaggaaattacatctagtggctttatttttctttaacccattatctcacatagccgatagatccaaggctgggcatctccagggttgctcaactcagcaggccagtggcatcaccagcgaccctggaacttcatagctcatctctctatcacacacagtatgtcagctttcctgagatggtagggtgacccctgcagcagctttaggtttgttattcattcacaacaactcccaaaggcaggaaaaggatactcctttctcctgtgtgcctttataaggagcaactaaactgtttccagagtgttcccagtacccactttctcacacattggaatgaccgtgggatcacacgggctcagacaagccaggattcaacctttgcagagtgggcctgaggcacatgggaagaaaaggagcaaaatcatgtattttaaaaaataaagaaatggtggatggagta

SEQ ID NO: 439867 - DNA, 1247 bp, Homo sapiens
cagtaacttactccctataacttggaatgtgggtggaggggttcatagttctccctgagtgagacttgcctgctgctctggcccctggtcctgtcctgttctccagcatggtgtgtctgaggctccctggaggctcctgcatggcagttctgacagtgacactgatggtgctgagctccccactggctttggctggggacaccagaccacgtttcttggagtactctacgtctgagtgtcatttcttcaatgggacggagcgggtgcggttcctggacagatacttccataaccaggaggagtacgtgcgcttcgacagcgacgtgggggagttccgggcggtgacggagctggggcggcctgatgccgagtactggaacagccagaaggacctcctggccagaaggacatcctggaagacaagcagagcggggccgcggtggacacctactgcagacacaactacggggttgtggagagcttcacagtgcagcggcgagtccatcctaaggtgactgtgtatccttcaaagacccagcccctgcagcaccacaacctcctggtctgttctgtgagtggtttctatccaggcagcattgaagtcaggtggttccggaatggccaggaagagaagactggggtggtgtccacaggcctgatccacaatggagactggaccttccagaccctggtgatgctggaaacagttcctcggagtggagaggtttacacctgccaagtggagcacccaagcgtgacaagccctctcacagtggaatggagagcacggtctgaatctgcacagagcaagatgctgagtggagtcgggggctttgtgctgggcctgctcttccttggggccgggctgttcatctacttcaggaatcagaaaggacactctggacttcagccaagaggattcctgagctgaagtgcagatgacacattcaaagaagaactttctgccccagctttgcaggatgaaaagctttccctcctggctgttattcttccacaagagagggctttctcaggacctggttgctactggttcagcaactgcagaaaatgtcctcccttgtggcttcctcagctcctgcccttggcctgaagcccacagcattgatggcagcgcctcatcttcaacttttgtgctcccctttgcctaaaccctatggcctcctgtgcatctgtactcaccctgtaccacaaacacattacattattaaatgtttctcaaagatgga

SEQ ID NO: 439868 - DNA, 1333 bp, Homo sapiens
  misc_feature (1333)..(1333): n is a, c, g, or t
cagtaacttactccctataacttggaatgtgggtggaggggttcatagttctccctgagtgagacttgcctgctgctctggcccctggtcctgtcctgttctccagcatggtgtgtctgaggctccctggaggctcctgcatggcagttctgacagtgacactgatggtgctgagctccccactggctttggctggggacaccagaccacgtttcttggagtactctacgtctgagtgtcatttcttcaatgggacggagcgggtgcggttcctggacagatacttccataaccaggaggagtacgtgcgcttcgacagcgacgtgggggagttccgggcggtgacggagctggggcggcctgatgccgagtactggaacagccagaaggacctcctggaagcagagcggggccgcggtggacacctactgcagacacaactacggggttgtggagagcttcacagtgcagcggcgagtccatcctaaggtgactgtgtatccttcaaagacccagcccctgcagcaccacaacctcctggtctgttctgtgagtggtttctatccaggcagcattgaagtcaggtggttccggaatggccaggaagagaagactggggtggtgtccacaggcctgatccacaatggagactggaccttccagaccctggtgatgctggaaacagttcctcggagtggagaggtttacacctgccaagtggagcacccaagcgtgacaagccctctcacagtggaatggagatgaaaagctttcccgcctggctgttattcttccacgagagagggctttctcaggacctagttgctactggttcagcaactgcagaaaatgtcctcccttgtggcttcctcagttcctgcccttggcctgaagtcccagcattgatggcagcgcctcatcttcaacttttgtgctcccctttgcctaaaccctatggcctcctgtgcatctgtactcaccctgtaccacaaacacattacattattaaatgtttctcaaagatggagttaaatatcatctggtccatttggctccaaagacaaaaaatgaaaagaaaagaaaagaaaaagggaagattatttcctaacaaaaaaaaaataaaacaactaaaacttaaaatatttaaaattaaactaccatataattttataaccattccaattctttcttccgggtttaatctgggcaacttttacattccccccattataggcctattgggcgatttcccctaaggggggcgaattaacatctatgggccctgttttacaccttggccctgggaaatcctggcgtgtcccaactttaagcn

SEQ ID NO: 439869 - DNA, 913 bp, Homo sapiens
aattgtgtcatccttgttcatacagagagtcgggttgaaggagtgggatacgggtgagagtgggcgctgtggagctggaaaggcaaaggacttctggaagggagaggggcgaggtgacactattgagacacatacgggttgtggagagttcacagtgcagcgggagtccatcctaaggtgactgtgtatccttcaaagacccagcccctgcagcaccacaacctcctggtctgttctgtgagtggtttctatccaggcagcattgaagtcaggtggttccggaatggccaggaagagaagactggggtggtgtccacaggcctgatccacaatggagactggaccttccagaccctggtgatgctggaaacagttcctcggagtggagaggtttacacctgccaagtggagcacccaagcgtgacaagccctctcacagtggaatggagagcacggtctgaatctgcacagagcaagatgctgagtggagtcgggggctttgtgctgggcctgctcttccttggggccgggctgttcatctacttcaggaatcagaaaggacactctggacttcagccaagaggattcctgagctgaagtgcagatgacacattcaaagaagaactttctgccccagctttgcaggatgaaaagctttccctcctggctgttattcttccacaagagagggctttctcaggacctggttgctactggttcagcaactgcagaaaatgtcctcccttgtggcttcctcagctcctgcccttggcctgaagcccacagcattgatggcagcgcctcatcttcaacttttgtgctcccctttgcctaaaccctatggcctcctgtgcatctgtactcaccctgtaccacaaacacattacattattaaatgtttctcaaagatgga

SEQ ID NO: 439870 - DNA, 1131 bp, Homo sapiens
cagtaacttactccctataacttggaatgtgggtggaggggttcatagttctccctgagtgagacttgcctgctgctctggcccctggtcctgtcctgttctccagcatggtgtgtctgaggctccctggaggctcctgcatggcagttctgacagtgacactgatggtgctgagctccccactggctttggctggggacaccagaccacgtttcttggagtactctacgtctgagtgtcatttcttcaatgggacggagcgggtgcggttcctggacagatacttccataaccaggaggagtacgtgcgcttcgacagcgacgtgggggagttccgggcggtgacggagctggggcggcctgatgccgagtactggaacagccagaaggacctcctggaagcagagcggggccgcggtggacacctactgcagacacaactcctggtctgttctgtgagtggtttctatccaggcagcattgaagtcaggtggttccggaatggccaggaagagaagactggggtggtgtccacaggcctgatccacaatggagactggaccttccagaccctggtgatgctggaaacagttcctcggagtggagaggtttacacctgccaagtggagcacccaagcgtgacaagccctctcacagtggaatggagagcacggtctgaatctgcacagagcaagatgctgagtggagtcgggggctttgtgctgggcctgctcttccttggggccgggctgttcatctacttcaggaatcagaaaggacactctggacttcagccaagaggattcctgagctgaagtgcagatgacacattcaaagaagaactttctgccccagctttgcaggatgaaaagctttccctcctggctgttattcttccacaagagagggctttctcaggacctggttgctactggttcagcaactgcagaaaatgtcctcccttgtggcttcctcagctcctgcccttggcctgaagcccacagcattgatggcagcgcctcatcttcaacttttgtgctcccctttgcctaaaccctatggcctcctgtgcatctgtactcaccctgtaccacaaacacattacattattaaatgtttctcaaagatgga

SEQ ID NO: 439871 - DNA, 609 bp, Homo sapiens
cacgaggtttaactccatctttgagaaacatttaataatgtaatgtgtttgtggtacagggtgagtacagatgcacaggaggccataggtacacctgccaagtggagcacccaagcgtgacaagccctctcacagtggaatggagagcacggtctgaatctgcacagagcaagatgctgagtggagtcgggggctttgtgctgggcctgctcttccttggggccgggctgttcatctacttcaggaatcagaaaggacactctggacttcagccaagaggattcctgagctgaagtgcagatgacacattcaaagaagaactttctgccccagctttgcaggatgaaaagctttccctcctggctgttattcttccacaagagagggctttctcaggacctggttgctactggttcagcaactgcagaaaatgtcctcccttgtggcttcctcagctcctgcccttggcctgaagcccacagcattgatggcagcgcctcatcttcaacttttgtgctcccctttgcctaaaccctatggcctcctgtgcatctgtactcaccctgtaccacaaacacattacattattaaatgtttctcaaagatgga

SEQ ID NO: 439872 - DNA, 1559 bp, Homo sapiens
  misc_feature (1559)..(1559): n is a, c, g, or t
gacccacgcgtccgcggacgcgtgggtcgacccacgcgtgcggacccacgcgtcccttgcctgctgctctggcccctggtcctgtcctgttctccagcatggtgtgtctgaggctccctggaggctcctgcatggcagttctgacagtgacactgatggtgctgagctccccactggctttggctggggacaccagacgaggccgcctgtgtgactggatcgttcgtgtccccacagcacgtttcttggagtactctacgtctgagtgtcatttcttcaatgggacggagcgggtgcggttcctggacagatacttccataaccaggaggagtacgtgcgcttcgacagcgacgtgggggagttccgggcggtgacggagctggggcggcctgatgccgagtactggaacagccagaaggacctcctggaagcagagcggggccgcggtggacacctactgcagacacaactacggggttgtggagagcttcacagtgcagcggcgagtccatcctaaggtgactgtgtatccttcaaagacccagcccctgcagcaccacaacctcctggtctgttctgtgagtggtttctatccaggcagcattgaagtcaggtggttccggaatggccaggaagagaagactggggtggtgtccacaggcctgatccacaatggagactggaccttccagaccctggtgatgctggaaacagttcctcggagtggagaggtttacacctgccaagtggagcacccaagcgtgacaagccctctcacagtggaatggagagcacggtctgaatctgcacagagcaagatgctgagtggagtcgggggctttgtgctgggcctgctcttccttggggccgggctgttcatctacttcaggaatcagaaaggacactctggacttcagccaagaggattcctgagctgaagtgcagatgacaatttaaggaagaatcttcttccccagctttgcaggatgaaaagctttcccgcctggctgttattcttccacgagagagggctttctcaggacctagttgctactggttcagcaactgcagaaaatgtcctcccttgtggcttcctcagttcctgcccttggcctgaagtcccagcattgatggcagcgcctcatcttcaacttttgtgctcccctttgcctaaaccctatggcctcctgtgcatctgtactcaccctgtaccacaaacacattacattattaaatgtttctcaaagatggagttaaatatcatctggtccatttggctccaaagacaaaaaatgaaaagaaaagaaaagaaaaagggaagattatttcctaacaaaaaaaaaataaaacaactaaaacttaaaatatttaaaattaaactaccatataattttataaccattccaattctttcttccgggtttaatctgggcaacttttacattccccccattataggcctattgggcgatttcccctaaggggggcgaattaacatctatgggccctgttttacaccttggccctgggaaatcctggcgtgtcccaactttaagcn

SEQ ID NO: 439873 - DNA, 1217 bp, Homo sapiens
  misc_feature (1217)..(1217): n is a, c, g, or t
cagtaacttactccctataacttggaatgtgggtggaggggttcatagttctccctgagtgagacttgcctgctgctctggcccctggtcctgtcctgttctccagcatggtgtgtctgaggctccctggaggctcctgcatggcagttctgacagtgacactgatggtgctgagctccccactggctttggctggggacaccagaccacgtttcttggagtactctacgtctgagtgtcatttcttcaatgggacggagcgggtgcggttcctggacagatacttccataaccaggaggagtacgtgcgcttcgacagcgacgtgggggagttccgggcggtgacggagctggggcggcctgatgccgagtactggaacagccagaaggacctcctggaagcagagcggggccgcggtggacacctactgcagacacaactacggggttgtggagagcttcacagtgcagcggcgagtccatcctcaggtgactgtgtatcctgcaaagacccagcccctgcagcaccacaacctcctggtctgctctgtgagtggtttctatccaggcagcattgaagtcaggtggttccggaacggccaggaagagaaggctggggtggtgtccacgggcctgatccagaatggagactggaccttccagaccctggtgatgctagaaacagttcctcggagtggagaggtttacacctgccaagtggagcacccaagcgtaacgagccctctcacagtggaatggagtgagcagctttctgatttcccagcattgatggcagcgcctcatcttcaacttttgtgctcccctttgcctaaaccctatggcctcctgtgcatctgtactcaccctgtaccacaaacacattacattattaaatgtttctcaaagatggagttaaatatcatctggtccatttggctccaaagacaaaaaatgaaaagaaaagaaaagaaaaagggaagattatttcctaacaaaaaaaaaataaaacaactaaaacttaaaatatttaaaattaaactaccatataattttataaccattccaattctttcttccgggtttaatctgggcaacttttacattccccccattataggcctattgggcgatttcccctaaggggggcgaattaacatctatgggccctgttttacaccttggccctgggaaatcctggcgtgtcccaactttaagcn

SEQ ID NO: 439874 - DNA, 1386 bp, Homo sapiens
  misc_feature (1386)..(1386): n is a, c, g, or t
agcatggtgtgtctgaagctccctggaggctccagcttggcagcgttgacagtgacactgatggtgctgagctcccgactggctttcgctggggacacccgaccacgtttcttggagctgcgtaagtctgagtgtcatttcttcaatgggacggagcgggtgcggtacctggacagatacttccataaccaggaggagttcctgcgcttcgacagcgacgtgggggagtaccgggcggtgacggagctggggcggcctgtcgccgagtcctggaacagccagaaggacctcctggagcagaagcggggccaggtggacaattactgcagacacaactacggggttgtgtgagagcttcacagtgcagcggcgagtccatcctcaggtgactgtgtatcctgcaaagacccagcccctgcagcaccacaacctcctggtctgctctgtgagtggtttctatccaggcagcattgaagtcaggtggttccggaacggccagaatggagactggaccttccagaccctggtgatgctagaaacagttcctcggagtggagaggtttacacctgccaagtggagcacccaagcgtaacgagccctctcacagtggaatggagagcacggtctgaatctgcacagagcaagatgctgagtggagtcgggggctttgtgctgggcctgctcttccttggggccgggctgttcatctacttcaggaatcagaaaggacactctggacttcagccaacaggattcctgagctgaagtgcagatgacaatttaaggaagaatcttcttccccagctttgcaggatgaaaagctttcccgcctggctgttattcttccacgagagagggctttctcaggacctagttgctactggttcagcaactgcagaaaatgtcctcccttgtggcttcctcagttcctgcccttggcctgaagtcccagcattgatggcagcgcctcatcttcaacttttgtgctcccctttgcctaaaccctatggcctcctgtgcatctgtactcaccctgtaccacaaacacattacattattaaatgtttctcaaagatggagttaaatatcatctggtccatttggctccaaagacaaaaaatgaaaagaaaagaaaagaaaaagggaagattatttcctaacaaaaaaaaaataaaacaactaaaacttaaaatatttaaaattaaactaccatataattttataaccattccaattctttcttccgggtttaatctgggcaacttttacattccccccattataggcctattgggcgatttcccctaaggggggcgaattaacatctatgggccctgttttacaccttggccctgggaaatcctggcgtgtcccaactttaagcn

SEQ ID NO: 439875 - DNA, 417 bp, Homo sapiens
cagtaacttactccctataacttggaatgtgggtggaggggttcatagttctccctgagtgagacttgcctgctgctctggcccctggtcctgtcctgttctccagcatggtgtgtctgaggctccctggaggctcctgcatggcagttctgacagtgacactgatggtgctgagctccccactggctttggctggggacaccagaccacgtttcttggagtactctacgtctgagtgtcatttcttcaatgggacggagcgggtgcggttcctggacagatacttccataaccaggaggagtacgtgcgcttcaacttttgtgctcccctttgcctaaaccctatggcctcctgtgcatctgtactcaccctgtaccacaaacacattacattattaaatgtttctcaaagatgga

SEQ ID NO: 439876 - DNA, 1143 bp, Homo sapiens
  misc_feature (1143)..(1143): n is a, c, g, or t
agcatggtgtgtctgaagctccctggaggctccagcttggcagcgttgacagtgacactgatggtgctgagctcccgactggctttcgctggggacacccgaccacgtttcttggagctgcgtaagtctgagtgtcatttcttcaatgggacggagcgggtgcggtacctggacagatacttccataaccaggaggagttcctgcgcttcgacagcgacgtgggggagtaccgggcggtgacggagctggggcggcctgtcgccgagtcctggaacagccagaaggacctcctggagcagaagcggggccaggtggacaattactgcagacacaactacggggttgtgtgagagcttcacagtgcagcggcgaggagcacggtctgaatctgcacagagcaagatgctgagtggagtcgggggctttgtgctgggcctgctcttccttggggccgggctgttcatctacttcaggaatcagaaaggacactctggacttcagccaacaggattcctgagctgaagtgcagatgacaatttaaggaagaatcttcttccccagctttgcaggatgaaaagctttcccgcctggctgttattcttccacgagagagggctttctcaggacctagttgctactggttcagcaactgcagaaaatgtcctcccttgtggcttcctcagttcctgcccttggcctgaagtcccagcattgatggcagcgcctcatcttcaacttttgtgctcccctttgcctaaaccctatggcctcctgtgcatctgtactcaccctgtaccacaaacacattacattattaaatgtttctcaaagatggagttaaatatcatctggtccatttggctccaaagacaaaaaatgaaaagaaaagaaaagaaaaagggaagattatttcctaacaaaaaaaaaataaaacaactaaaacttaaaatatttaaaattaaactaccatataattttataaccattccaattctttcttccgggtttaatctgggcaacttttacattccccccattataggcctattgggcgatttcccctaaggggggcgaattaacatctatgggccctgttttacaccttggccctgggaaatcctggcgtgtcccaactttaagcn

SEQ ID NO: 439877 - DNA, 678 bp, Homo sapiens
  misc_feature (678)..(678): n is a, c, g, or t
cgggtcgcctaaaactactaaattcgcggccgcgtcgactgaccgattcctgagctgaagtgcagatgacaatttaaggaagaatcttcttccccagctttgcaggatgaaaagctttcccgcctggctgttattcttccacgagagagggctttctcaggacctagttgctactggttcagcaactgcagaaaatgtcctcccttgtggcttcctcagttcctgcccttggcctgaagtcccagcattgatggcagcgcctcatcttcaacttttgtgctcccctttgcctaaaccctatggcctcctgtgcatctgtactcaccctgtaccacaaacacattacattattaaatgtttctcaaagatggagttaaatatcatctggtccatttggctccaaagacaaaaaatgaaaagaaaagaaaagaaaaagggaagattatttcctaacaaaaaaaaaataaaacaactaaaacttaaaatatttaaaattaaactaccatataattttataaccattccaattctttcttccgggtttaatctgggcaacttttacattccccccattataggcctattgggcgatttcccctaaggggggcgaattaacatctatgggccctgttttacaccttggccctgggaaatcctggcgtgtcccaactttaagcn

SEQ ID NO: 439878 - DNA, 915 bp, Homo sapiens
  misc_feature (915)..(915): n is a, c, g, or t
ccaatcaagggaagaaggaggaatgctgtgactggaaggcccctggatgcagaatggcaagaagggtgacagcttcctttccctgtgtgtactctgtccaagtcctgtagataaaatggatgcccagaggacttccaacccttgctttgggtcaagaaacagccagcaagattttatgggccttagggcacttgggctgttgttccattgaagccgactcctggccctggcccttacttgcttctctagctctctaggcctctcccatttgcacctgtccccaccctccactcagctgtcctgcagcaaacactccaccccttcaccgtccattttgacccggtacattcaagttgctgcctggctgttattcttccacgagagagggctttctcaggacctagttgctactggttcagcaactgcagaaaatgtcctcccttgtggcttcctcagttcctgcccttggcctgaagtcccagcattgatggcagcgcctcatcttcaacttttgtgctcccctttgcctaaaccctatggcctcctgtgcatctgtactcaccctgtaccacaaacacattacattattaaatgtttctcaaagatggagttaaatatcatctggtccatttggctccaaagacaaaaaatgaaaagaaaagaaaagaaaaagggaagattatttcctaacaaaaaaaaaataaaacaactaaaacttaaaatatttaaaattaaactaccatataattttataaccattccaattctttcttccgggtttaatctgggcaacttttacattccccccattataggcctattgggcgatttcccctaaggggggcgaattaacatctatgggccctgttttacaccttggccctgggaaatcctggcgtgtcccaactttaagcn

SEQ ID NO: 439879 - DNA, 387 bp, Homo sapiens
gataaataggtgccaagtggagcacccaagtgtgatgagccccctcacagtggaatggagtgtgaagctttatgacctcataaattgaaggttatcttcaggcattgttttatatattttacatgcattaatcctcatataatcccaagaggtaaattagtataattatccttcattataggtgacaaagttgagacacagaagaatcaaactcttaaggcagaccttggatttgaaccaggcaacctggctcagatatcagttttaattactacactctgtactttcaaagatttgtaaacactttgacaatgcatgacaatttcaagctatgaagaaacaaacacaatttttcacaatatctctcaaatctaataggtcctcact

SEQ ID NO: 439880 - DNA, 400 bp, Homo sapiens
ttctcatgtacccaactctgtccctttgtctatgtacattgctttaaatcatatttttctgtcacggtgtacaaggatgataaataggtgccaagtggagcacccaagtgtgatgagcccccttacggtggaatggagtgagaagctttctgatctcataaattgaaggctatcttcagtcattatgtattttacataaattaatcctcatataaccccaagaggtaaattagtataattatccttcattgggggtgacaaagttgagacacagaagaatcaactcttccaggatcaaccagtaaaaggcagaccttggatttgaaccatgcaacctggctcaggtatcagttttaattactacactctgtactttcaaaaatttgtaaacactttgaca

SEQ ID NO: 439881 - DNA, 921 bp, Homo sapiens
ggagtcgggggctttgtgctgggcctgctcttccttggggccgggctgttcatctacttcaggaatcagaaaggtgaggagcctttggtagctggctctctccataggcttttctggaggaggaactatggctttgctgaggttagttctcagtatatgagtggccctgaataaagcctttctttccccaaacggctctaatgtcctgctaatccagaaatcatcagtgcatggttactatgtgaaagcataatagcttgtggcctgcagagacaagaggaaggttaacaagtaggggtcctttggtttgagatcttggagcagattaaggaagagccactaagactaatggaattacactggatcctgtgacagacactttacccttcatgggtcacatggtctgtttctgctcctctctgccctggctggtgtgggttgtagtgacagagaactctccggtgggagatctggggctgggacattgtgttggaagacagatttgcttccataaattttaagtgtatatattttcctctttttcccaggacactctggacttcagccaagaggtaataccttttaatcctcttttagaaacagatacggtttccctagtgagaggtgaagccagctggacttctgggtcgggtagggacttgcagaactttcctgtcttaggagaggtttctaaatgcaccaatcagtgctctgtaaaaacacaccaattggcactctgtggctagatagatgtttgtaaaatggactaatcagcactctgtaaaatggagcaatccacactctgtaaaatggaccaatcaatgctctttaaaatggaccaatcagcaggacatgggcggggacaaataagggaatacaagctggccaccccagccagcagcagcaacccgctcaggtcgc

SEQ ID NO: 439882 - DNA, 437 bp, Homo sapiens
  misc_feature (386)..(387): n is a, c, g, or t
tgtttatcgatgccacctcgaagcagagcggggccgcggtggacacctactgcagacacaactacggggttgtggagagcttcacagtgcagcggcgagtccatcctaaggtgactgtgtatccttcaaagacccagcccctgcagcaccacaacctcctggtctgttctgtgagtggtttctatccaggcagcattgaagtcaggtggttccggaatggccaggaagagaagactggggtggtgtccacaggcctgatccacaatggagactggaccttccagaccctggtgatgctggaaacagttcctcggagtggagaggtttacacctgccaagtggagcacccaagcgtgacaagccctctcacagtggaatggaagcgnntgaatctgcacagagcaagatgctgagggcatcgaaacaccggacggcga

SEQ ID NO: 439883 - DNA, 1216 bp, Homo sapiens
gacccacgcgtccgcggacgcgtgggtcgacccacgcgtgcggacccacgcgtcccttgcctgctgctctggcccctggtcctgtcctgttctccagcatggtgtgtctgaggctccctggaggctcctgcatggcagttctgacagtgacactgatggtgctgagctccccactggctttggctggggacaccagaccacgtttcttggagtactctacgtctgagtgtcatttcttcaatgggacggagcgggtgcggttcctggacagatacttccataaccaggaggagtacgtgcgcttcgacagcgacgtgggggagttccgggcggtgacggagctggggcggcctgatgccgagtactggaacagccagaaggacctcctggaagcagagcggggccgcggtggacacctactgcagacacaactacggggttgtggagagcttcacagtgcagcggcgagtccatcctaaggtgactgtgtatccttcaaagacccagcccctgcagcaccacaacctcctggtctgttctgtgagtggtttctatccaggcagcattgaagtcaggtggttccggaatggccaggaagagaagactggggtggtgtccacaggcctgatccacaatggagactggaccttccagaccctggtgatgctggaaacagttcctcggagtggagaggtttacacctgccaagtggagcacccaagcgtgacaagccctctcacagtggaatggagagcacggtctgaatctgcacagagcaagatgctgagtggagtcgggggctttgtgctgggcctgctcttccttggggccgggctgttcatctacttcaggaatcagaaaggacactctggacttcagccaagaggattcctgagctgaagtgcagatgacacattcaaagaagaactttctgccccagctttgcaggatgaaaagctttccctcctggctgttattcttccacaagagagggctttctcaggacctggttgctactggttcagcaactgcagaaaatgtcctcccttgtggcttcctcagctcctgcccttggcctgaagcccacagcattgatggcagcgcctcatcttcaacttttgtgctcccctttgcctaaaccctatggcctcctgtgcatctgtactcaccctgtaccacaaacacattacattattaaatgtttctcaaagatgga

SEQ ID NO: 439884 - DNA, 1505 bp, Homo sapiens
  misc_feature (1505)..(1505): n is a, c, g, or t
cagtaacttactccctataacttggaatgtgggtggaggggttcatagttctccctgagtgagacttgcctgctgctctggcccctggtcctgtcctgttctccagcatggtgtgtctgaggctccctggaggctcctgcatggcagttctgacagtgacactgatggtgctgagctccccactggctttggctggggacaccagaccacgtttcttggagtactctacgtctgagtgtcatttcttcaatgggacggagcgggtgcggttcctggacagatacttccataaccaggaggagtacgtgcgcttcgacagcgacgtgggggagttccgggcggtgacggagctggggcggcctgatgccgagtactggaacagccagaaggacctcctggaagcagagcggggccgcggtggacacctactgcagacacaactacggggttgtggagagcttcacagtgcagcggcgagtccatcctaaggtgactgtgtatccttcaaagacccagcccctgcagcaccacaacctcctggtctgttctgtgagtggtttctatccaggcagcattgaagtcaggtggttccggaatggccaggaagagaagactggggtggtgtccacaggcctgatccacaatggagactggaccttccagaccctggtgatgctggaaacagttcctcggagtggagaggtttacacctgccaagtggagcacccaagcgtgacaagccctctcacagtggaatggagagcacggtctgaatctgcacagagcaagatgctgagtggagtcgggggctttgtgctgggcctgctcttccttggggccgggctgttcatctacttcaggaatcagaaaggattcctgagctgaagtgcagatgacaatttaaggaagaatcttcttccccagctttgcaggatgaaaagctttcccgcctggctgttattcttccacgagagagggctttctcaggacctagttgctactggttcagcaactgcagaaaatgtcctcccttgtggcttcctcagttcctgcccttggcctgaagtcccagcattgatggcagcgcctcatcttcaacttttgtgctcccctttgcctaaaccctatggcctcctgtgcatctgtactcaccctgtaccacaaacacattacattattaaatgtttctcaaagatggagttaaatatcatctggtccatttggctccaaagacaaaaaatgaaaagaaaagaaaagaaaaagggaagattatttcctaacaaaaaaaaaataaaacaactaaaacttaaaatatttaaaattaaactaccatataattttataaccattccaattctttcttccgggtttaatctgggcaacttttacattccccccattataggcctattgggcgatttcccctaaggggggcgaattaacatctatgggccctgttttacaccttggccctgggaaatcctggcgtgtcccaactttaagcn

SEQ ID NO: 439885 - DNA, 1394 bp, Homo sapiens
  misc_feature (1394)..(1394): n is a, c, g, or t
cagtaacttactccctataacttggaatgtgggtggaggggttcatagttctccctgagtgagacttgcctgctgctctggcccctggtcctgtcctgttctccagcatggtgtgtctgaggctccctggaggctcctgcatggcagttctgacagtgacactgatggtgctgagctccccactggctttggctggggacaccagaccacgtttcttggagtactctacgtctgagtgtcatttcttcaatgggacggagcgggtgcggttcctggacagatacttccataaccaggaggagtacgtgcgcttcgacagcgacgtgggggagttccgggcggtgacggagctggggcggcctgatgccgagtactggaacagccagaaggacctcctggaagcagagcggggccgcggtggacacctactgcagacacaactacggggttgtggagagcttcacagtgcagcggcgagtccatcctaaggtgactgtgtatccttcaaagacccagcccctgcagcaccacaacctcctggtctgttctgtgagtggtttctatccaggcagcattgaagtcaggtggttccggaatggccaggaagagaagactggggtggtgtccacaggcctgatccacaatggagactggaccttccagaccctggtgatgctggaaacagttcctcggagtggagaggtttacacctgccaagtggagcacccaagcgtgacaagccctctcacagtggaatggagattcctgagctgaagtgcagatgacaatttaaggaagaatcttcttccccagctttgcaggatgaaaagctttcccgcctggctgttattcttccacgagagagggctttctcaggacctagttgctactggttcagcaactgcagaaaatgtcctcccttgtggcttcctcagttcctgcccttggcctgaagtcccagcattgatggcagcgcctcatcttcaacttttgtgctcccctttgcctaaaccctatggcctcctgtgcatctgtactcaccctgtaccacaaacacattacattattaaatgtttctcaaagatggagttaaatatcatctggtccatttggctccaaagacaaaaaatgaaaagaaaagaaaagaaaaagggaagattatttcctaacaaaaaaaaaataaaacaactaaaacttaaaatatttaaaattaaactaccatataattttataaccattccaattctttcttccgggtttaatctgggcaacttttacattccccccattataggcctattgggcgatttcccctaaggggggcgaattaacatctatgggccctgttttacaccttggccctgggaaatcctggcgtgtcccaactttaagcn

SEQ ID NO: 439886 - DNA, 1060 bp, Homo sapiens
cagtaacttactccctataacttggaatgtgggtggaggggttcatagttctccctgagtgagacttgcctgctgctctggcccctggtcctgtcctgttctccagcatggtgtgtctgaggctccctggaggctcctgcatggcagttctgacagtgacactgatggtgctgagctccccactggctttggctggggacaccagaccacgtttcttggagtactctacgtctgagtgtcatttcttcaatgggacggagcgggtgcggttcctggacagatacttccataaccaggaggagtacgtgcgcttcgacagcgacgtgggggagttccgggcggtgacggagctggggcggcctgatgccgagtactggaacagccagaaggacctcctggaagcagagcggggccgcggtggacacctactgcagacacaactacggggttgtggagagcttcacagtgcagcggcgagtccatcctaaggtgactgtgtatccttcaaagacccagcccctgcagcaccacaacctcctggtctgttctgtgagtggtttctatccaggcagcattgaagtcaggtggttccggaatggccaggaagagaagactggggtggtgtccacaggcctgatccacaatggagactggaccttccagaccctggtgatgctggaaacagttcctcggagtggagaggtttacacctgccaagtggagcacccaagcgtgacaagccctctcacagtggaatggagtgagcagctttctgacttcataaatttctcacccaccaagaaggggactgtgctcatccctgagtgtcaggtttctcctctccgacatcctattttcatttgctccatgttctcatctccatcagcacaggtcactgggggtagccctgtaggtgtttctagaaacacctgtacctcctggagaagcagtctcgcctgccaggcaggagaggctgtccctcttttgaacctccccatgatgtcacaggtcagggtcacccaccctccccgggctccaggcactgcctctgggtctgaga

SEQ ID NO: 439887 - DNA, 1164 bp, Homo sapiens
  misc_feature (1164)..(1164): n is a, c, g, or t
cagtaacttactccctataacttggaatgtgggtggaggggttcatagttctccctgagtgagacttgcctgctgctctggcccctggtcctgtcctgttctccagcatggtgtgtctgaggctccctggaggctcctgcatggcagttctgacagtgacactgatggtgctgagctccccactggctttggctggggacaccagaccacgtttcttggagtactctacgtctgagtgtcatttcttcaatgggacggagcgggtgcggttcctggacagatacttccataaccaggaggagtacgtgcgcttcgacagcgacgtgggggagttccgggcggtgacggagctggggcggcctgatgccgagtactggaacagccagaaggacctcctggaagcagagcggggccgcggtggacacctactgcagacacaactacggggttgtggagagcttcacagtgcagcggcgagtccatcctaaggtgactgtgtatccttcaaagacccagcccctgcagcaccacaacctcctggtctgttctgtgagtggtttctatccaggcagcattgaagtcaggtggttccggaatggccaggaagagaagactggggtggtgtccacaggcctgatccacaatggagactggaccttccagaccctgaactgcagaaaatgtcctcccttgtggcttcctcagttcctgcccttggcctgaagtcccagcattgatggcagcgcctcatcttcaacttttgtgctcccctttgcctaaaccctatggcctcctgtgcatctgtactcaccctgtaccacaaacacattacattattaaatgtttctcaaagatggagttaaatatcatctggtccatttggctccaaagacaaaaaatgaaaagaaaagaaaagaaaaagggaagattatttcctaacaaaaaaaaaataaaacaactaaaacttaaaatatttaaaattaaactaccatataattttataaccattccaattctttcttccgggtttaatctgggcaacttttacattccccccattataggcctattgggcgatttcccctaaggggggcgaattaacatctatgggccctgttttacaccttggccctgggaaatcctggcgtgtcccaactttaagcn

SEQ ID NO: 439888 - DNA, 1529 bp, Homo sapiens
  misc_feature (1529)..(1529): n is a, c, g, or t
cagtaacttactccctataacttggaatgtgggtggaggggttcatagttctccctgagtgagacttgcctgctgctctggcccctggtcctgtcctgttctccagcatggtgtgtctgaggctccctggaggctcctgcatggcagttctgacagtgacactgatggtgctgagctccccactggctttggctggggacaccagaccacgtttcttggagtactctacgtctgagtgtcatttcttcaatgggacggagcgggtgcggttcctggacagatacttccataaccaggaggagtacgtgcgcttcgacagcgacgtgggggagttccgggcggtgacggagctggggcggcctgatgccgagtactggaacagccagaaggacctcctggaagcagagcggggccgcggtggacacctactgcagacacaactacggggttgtggagagcttcacagtgcagcggcgagtccatcctcaggtgactgtgtatcctgcaaagacccagcccctgcagcaccacaacctcctggtctgctctgtgagtggtttctatccaggcagcattgaagtcaggtggttccggaacggccaggaagagaaggctggggtggtgtccacgggcctgatccagaatggagactggaccttccagaccctggtgatgctagaaacagttcctcggagtggagaggtttacacctgccaagtggagcacccaagcgtaacgagccctctcacagtggaatggagagcacggtctgaatctgcacagagcaagatgctgagtggagtcgggggctttgtgctgggcctgctcttccttggggccgggctgttcatctacttcaggaatcagaaaggacactctggacttcagccaacaggattcctgagctgaagtgcagatgacaatttaaggaagaatcttcttccccagctttgcaggatgaaaagctttcccgcctggctgttattcttccacgagagagggctttctcaggacctagttgctactggttcagcaactgcagaaaatgtcctcccttgtggcttcctcagttcctgcccttggcctgaagtcccagcattgatggcagcgcctcatcttcaacttttgtgctcccctttgcctaaaccctatggcctcctgtgcatctgtactcaccctgtaccacaaacacattacattattaaatgtttctcaaagatggagttaaatatcatctggtccatttggctccaaagacaaaaaatgaaaagaaaagaaaagaaaaagggaagattatttcctaacaaaaaaaaaataaaacaactaaaacttaaaatatttaaaattaaactaccatataattttataaccattccaattctttcttccgggtttaatctgggcaacttttacattccccccattataggcctattgggcgatttcccctaaggggggcgaattaacatctatgggccctgttttacaccttggccctgggaaatcctggcgtgtcccaactttaagcn

SEQ ID NO: 439889 - DNA, 1694 bp, Homo sapiens
  misc_feature (1694)..(1694): n is a, c, g, or t
agcatggtgtgtctgaagctccctggaggctccagcttggcagcgttgacagtgacactgatggtgctgagctcccgactggctttcgctggggacacccgaccacgtttcttggagctgcgtaagtctgagtgtcatttcttcaatgggacggagcgggtgcggtacctggacagatacttccataaccaggaggagttcctgcgcttcgacagcgacgtgggggagtaccgggcggtgacggagctggggcggcctgtcgccgagtcctggaacagccagaaggacctcctggagcagaagcggggccaggtggacaattactgcagacacaactacggggttgtgtgagagcttcacagtgcagcggcgaggatgataaataggtgccaagtggagcacccaagtgtgatgagcccccttacggtggaatggagtgagaagctttctgatctcataaattgaaggctatcttcagtcattatgtattttacataaattaatcctcatataaccccaagaggtaaattagtataattatccttcattgggggtgacaaagttgagacacagaagaatcaactcttccaggatcaaccagtaaaaggcagaccttggatttgaaccatgcaacctggctcagtccatcctcaggtgactgtgtatcctgcaaagacccagcccctgcagcaccacaacctcctggtctgctctgtgagtggtttctatccaggcagcattgaagtcaggtggttccggaacggccaggaagagaaggctggggtggtgtccacgggcctgatccagaatggagactggaccttccagaccctggtgatgctagaaacagttcctcggagtggagaggtttacacctgccaagtggagcacccaagcgtaacgagccctctcacagtggaatggagagcacggtctgaatctgcacagagcaagatgctgagtggagtcgggggctttgtgctgggcctgctcttccttggggccgggctgttcatctacttcaggaatcagaaaggacactctggacttcagccaacaggattcctgagctgaagtgcagatgacaatttaaggaagaatcttcttccccagctttgcaggatgaaaagctttcccgcctggctgttattcttccacgagagagggctttctcaggacctagttgctactggttcagcaactgcagaaaatgtcctcccttgtggcttcctcagttcctgcccttggcctgaagtcccagcattgatggcagcgcctcatcttcaacttttgtgctcccctttgcctaaaccctatggcctcctgtgcatctgtactcaccctgtaccacaaacacattacattattaaatgtttctcaaagatggagttaaatatcatctggtccatttggctccaaagacaaaaaatgaaaagaaaagaaaagaaaaagggaagattatttcctaacaaaaaaaaaataaaacaactaaaacttaaaatatttaaaattaaactaccatataattttataaccattccaattctttcttccgggtttaatctgggcaacttttacattccccccattataggcctattgggcgatttcccctaaggggggcgaattaacatctatgggccctgttttacaccttggccctgggaaatcctggcgtgtcccaactttaagcn

SEQ ID NO: 439890 - DNA, 782 bp, Homo sapiens
  misc_feature (782)..(782): n is a, c, g, or t
gtgctctgcaggactattggctctgggagactcaggaacttgtttttcttcttcctgcagtgttctcatctgagtccttcaaagagggggaaagaaacgttagtagagccaggttgaaaacaacactctcctctgtcttttgcaggatgattcctgagctgaagtgcagatgacaatttaaggaagaatcttcttccccagctttgcaggatgaaaagctttcccgcctggctgttattcttccacgagagagggctttctcaggacctagttgctactggttcagcaactgcagaaaatgtcctcccttgtggcttcctcagttcctgcccttggcctgaagtcccagcattgatggcagcgcctcatcttcaacttttgtgctcccctttgcctaaaccctatggcctcctgtgcatctgtactcaccctgtaccacaaacacattacattattaaatgtttctcaaagatggagttaaatatcatctggtccatttggctccaaagacaaaaaatgaaaagaaaagaaaagaaaaagggaagattatttcctaacaaaaaaaaaataaaacaactaaaacttaaaatatttaaaattaaactaccatataattttataaccattccaattctttcttccgggtttaatctgggcaacttttacattccccccattataggcctattgggcgatttcccctaaggggggcgaattaacatctatgggccctgttttacaccttggccctgggaaatcctggcgtgtcccaactttaagcn

SEQ ID NO: 439891 - DNA, 543 bp, Homo sapiens
tgggtgctgtttaaggaaccggtaaacatgtgggatgagagaaggagcagagtgtctttggggtggaggctcccaggaggaggcggcgcgggctgcggtgctgggcggatcctcctccagctcctgcttggaggtctccagaacaggctggaggtagggaggggggtcccaaaagcctggggatcagacgtggttttcccgcctggtcccccaggccccctttcgcctcaggaagacagaggaggagcccctgggctgctggtggtgggcgttgcggcgggggccggttaaggttcccagtgcccgcaccccacccagggagccccggatggcggcgtcactgtcagtgtcttctcaggaggccgcctgtgtgactggatcgttcgtgtccccacagcacgtttcttggagtactctacgtctgagtgtcatttcttcaatgggacggagcgggtgcggttcctggacagatacttccataaccaggaggagtacgtgcgcttcgacagcgacgtgggggagttccgggcggtgacggagctg

SEQ ID NO: 439892 - DNA, 1448 bp, Homo sapiens
  misc_feature (1448)..(1448): n is a, c, g, or t
cagtaacttactccctataacttggaatgtgggtggaggggttcatagttctccctgagtgagacttgcctgctgctctggcccctggtcctgtcctgttctccagcatggtgtgtctgaggctccctggaggctcctgcatggcagttctgacagtgacactgatggtgctgagctccccactggctttggctggggacaccagaccacgtttcttggagtactctacgtctgagtgtcatttcttcaatgggacggagcgggtgcggttcctggacagatacttccataaccaggaggagtacgtgcgcttcgacagcgacgtgggggagttccgggcggtgacggagctggggcggcctgatgccgagtactggaacagccagaaggacctcctggaagcagagcggggccgcggtggacacctactgcagacacaactacggggttgtggagagcttcacagtgcagcggcgagtccatcctaaggtgactgtgtatccttcaaagacccagcccctgcagcaccacaacctcctggtctgttctgtgagtggtttctatccaggcagcattgaagtcaggtggttccggaatggccaggaagagaagactggggtggtgtccacaggcctgatccacaatggagactggaccttccagaccctggtgatgctggaaacagttcctcggagtggagaggtttacacctgccaagtggagcacccaagcgtgacaagccctctcacagtggaatggagagcacggtctgaatctgcacagagcaagatgctgagtggagtcgggggctttgtgctgggcctgctcttccttggggccgggctgttcatctacttcaggaatcagaaaggacactctggacttcagccaagaggattcctgagctgaagtgcagatgacacattcaaagaagaactttctgccccagctttgcaggatgaaaagctttccctcctggctgttattcttccacaagagagggctttctcaggacctggttgctactggttcagcaactgcagaaaatgtcctcccttgtggcttcctcagctcctgcccttggcctgaagcccacagcattgatggcagcgcctcatcttcaacttttgtgctcccctttgcctaaaccctatggcctcctgtgcatctgtactcaccctgtaccacaaacacattacattattaaatgtttctcaaagatggaaaaaaaaaataaaacaactaaaacttaaaatatttaaaattaaactaccatataattttataaccattccaattctttcttccgggtttaatctgggcaacttttacattccccccattataggcctattgggcgatttcccctaaggggggcgaattaacatctatgggccctgttttacaccttggccctgggaaatcctggcgtgtcccaactttaagcn

SEQ ID NO: 439893 - DNA, 3170 bp, Homo sapiens
ggcctgctgctggccgggcgggggacggggccgggaccggagccggagctgcggggcgcaccggctagacgcgcgcgggattctcggcgggcacgccccgcggaccatgagcgtccccagctccgggagcagccgcggcgcgggcggtgcgaggccggccgcgcggcgcctttgagccccagccggaggtccagagatcctgagagcccgagcgcccagcgccgcgccgggagagttgagaattatggctgcaggaaaatttgcaagccttcccagaaacatgccggtgaatcaccagttccccctggcctcatccatggaccttctgagcagcaggtcccctctcgctgagcatcgcccagatgcctatcaagatgtgtctatacatggcacccttccacggaagaaaaaaggtcctcctcccataaggtcctgtgatgacttcagtcacatgggcaccctcccccactccaaatccccacggcagaactcgcctgtgacccaggatggcatccaggagagcccatggcaggaccggcacggcgaaaccttcaccttcagggatccacatcttctggacccaactgtggaatatgtgaagttctccaaggagaggcacatcatggacaggacccccgagaaactgaagaaggagctggaggaggagctgctcctgagcagcgaggacctgcgcagccatgcctggtaccacggccgcatcccccgacaggtgtctgaaaaccttgtgcagcgagatggtgacttcctagttcgtgactctctgtccagccctgggaactttgtcctgacctgtcagtggaagaacctcgctcagcacttcaaaatcaaccggacagttctgcgactcagcgaggcctacagccgcgtgcagtaccagttcgagatggagagcttcgactccatccccggcctggtgcgctgctacgtgggcaaccgccggcccatctcccagcagagtggcgccatcatcttccagcccatcaacaggacggtgcctctgcggtgcctggaggagcattatggcacctccccaggccaggcccgggagggcagcctcaccaagggaaggccggatgtggccaagaggctgagcctcaccatgggtggcgtccaggcccgagagcagaatttgcccaggggaaacctcctcagaaacaaagaaaagagtggtagccagcccgcctgcctggatcacatgcaggacagaagagccttgtccctcaaagcccaccagtcagagagctacctgccgattggctgcaagctgccacctcagtcctcgggtgtggacacaagcccctgcccaaactcacctgtgttcaggacgggaagcgagcctgccctgagcccagcagtggttcggagggtctcctcagacgccagggctggggaggcgctgaggggatcagacagtcaactgtgccctaagcccccgcctaagccctgcaaggtgccgttcctcaaggttccctcgtctccctctgcctggctcaactcagaggccaactactgtgaactgaacccagcgtttgccacaggctgcggcaggggagcaaagctaccctcatgtgcccagggaagccacacagaactgctcacagccaagcagaatgaggcgccaggtccccggaactctggcgtcaactacttgatccttgatgatgatgacagggaaagaccttgggaacctgcggcagctcagatggagaaggggcagtgggacaagggcgagtttgtgacgcccctcctggagactgtctcctccttcaggcccaacgagtttgagtcaaagttccttccccctgagaataagcccctggaaacagcaatgttgaaacgtgcaaaagaactgttcaccaacaacgaccccaaggtcatcgcccagcacgtactgagcatggactgcagggttgctaggatacttggagtctctgaagagatgaggaggaacatgggggtgagctcaggcctggaactcattaccttgcctcacggacaccagctgcgcctggacataattgaaagacacaacacaatggccatcggcattgcagtggacattctgggatgcacgggcactttggaggaccgagcggccactctgagtaagatcatccaggtggcggtggaactgaaggattccatgggggacctctattccttctcagctctcatgaaagccctggaaatgccacagatcacaaggttagaaaagacgtggactgctctgcggcaccagtacacccaaactgccattctctatgagaaacagctgaagcccttcagcaaactcctgcatgaaggcagagagtccacatgtgttcccccaaacaatgtatcagtcccactgctgatgccgcttgtgacgttaatggagcgccaggctgtgacttttgaaggaaccgacatgtgggaaaaaaacgaccagagctgtgaaatcatgctgaaccatttggcaacagcgcgattcatggccgaggctgcagacagctaccggatgaatgctgagaggatcctggcaggttttcaaccagatgaagaaatgaatgaaatctgcaagactgaatttcaaatgcgattgctatggggcagcaaaggtgcacaagtcaatcagacagagagatatgagaaattcaaccagattttaactgccctctcgcgtaaattggaacctcctcctgtaaagcaggcagagctttgataactctccagagaacctttagaatatcttttcaagtttccccagcttcatctttgggaaagcttactgtttttgataaagtaataatgtgcaaatctgacaatatacaagcttttagtatccacaggatattaaacgtgtaaattgcacagagcacacttatttatgaattgtctaaagttactactgattttaaaatgaataatttattattaaggtaactactgctaatgttgatcagcaaatttaagagaagacctagctatgttggctggttgctttctattatcatggtatttgaccattttagttttaattccatgtcagataagtgtaaatagaagagtttaaaagcatgaaacatttcagaaggtatcagttatatgatattctttaaacaaatatgaaaaatgtaaatactcatgaatgaaaatacatctttttgtga

SEQ ID NO: 439894 - DNA, 996 bp, Homo sapiens
ggcctgctgctggccgggcgggggacggggccgggaccggagccggagctgcggggcgcaccggctagacgcgcgcgggattctcggcgggcacgccccgcggaccatgagcgtccccagctccgggagcagccgcggcgcgggcggtgcgaggccggccgcgcggcgcctttgagccccagccggaggtccagagatcctgagagcccgagcgcccagcgccgcgccgggaggtgagtctccgccgcgcgcccagcgtcctcggggtgctgttcctcccggggcgcctgggcctcccccaccccggtgaggacacgctaggaagtttgttggacaaagttaggctctggggaaagtagagccggcgtttgttggtccctacccacccccgccagcggatttggcgttgggggcgggggtgactgaagtggggctggggcttgcgctctccaggccctccgagcgcgctgggactccccgagacgtggcccacggcggggagcgctcagcgattggcggccaggcatcttgctcggtggcactcgagcggcatcttcccgggcgctggcctcgcccgaccccctgcccgtcggagctgctctgccggccaccccgccctgtcccgcccgtcccctcttcgcagaagccggccggggtcgggcagatgcgagggcccagagcgctctggtggaagcccaaggctccgaggaggcgagtttctccggtaatctcttgggaagtttgcaaagaaagcgaaggagcctgccctgtaactgttgacaacatctccctccctctctccctttgttgagaaagaatgaatagttggttgtgttgctccctctgcgtcgcggtggggagaggcgagggaaggcaaaggaagggagggacggtgggaaggaggttccgatagatcgtacagcccaactgtccttacccacttaggccgctgagggcgccgccgctttaaaacggtgtaatcaggtgtagacactc

SEQ ID NO: 439895 - DNA, 440 bp, Homo sapiens
gagcatcccccaaacgcagagaggagaatctaagcgattctaagagccccaactccgcctagagctgggcaatcctcagcccgtcttggagaaaagaaagcagcgaggcaatgcctggatccgagaggaacgcttctctttttgtgtctcaagtcgcctgcatcctgtcatttagctccggcttcctctctgcgtttgaaacgcagagaggatcctgtcaggttttcaaccagatgaagaaatgaatgaaatctgcaagactgaatttcaaatgcgattgctatggggcagcaaaggtgcacaagtcaatcagacagagagatatgagaaattcaaccagattttaactgccctctcgcgtttggcagagaggacaaacccagagaggacaaacgcagagaggttctcgtgttgaccaaggaatactcctgcttgctgat

SEQ ID NO: 439896 - DNA, 2826 bp, Homo sapiens
gagggaaggtacctcaggtactcgggaggaggttggaccaagacccactggctgggagaggccgtcttggctggagtgatggcgggcctcagacagaagaggaaaatgaggctcctcaggctggagtgcagtggcgccatctcagctcgccgcaacctctgcctcccagattcaagtgattctcctgcctcaccctcccaagtagctgggattacagggatccacatcttctggacccaactgtggaatatgtgaagttctccaaggagaggcacatcatggacaggacccccgagaaactgaagaaggagctggaggaggagctgctcctgagcagcgaggacctgcgcagccatgcctggtaccacggccgcatcccccgacaggtgtctgaaaaccttgtgcagcgagatggtgacttcctagttcgtgactctctgtccagccctgggaactttgtcctgacctgtcagtggaagaacctcgctcagcacttcaaaatcaaccggacagttctgcgactcagcgaggcctacagccgcgtgcagtaccagttcgagatggagagcttcgactccatccccggcctggtgcgctgctacgtgggcaaccgccggcccatctcccagcagagtggcgccatcatcttccagcccatcaacaggacggtgcctctgcggtgcctggaggagcattatggcacctccccaggccaggcccgggagggcagcctcaccaagggaaggccggatgtggccaagaggctgagcctcaccatgggtggcgtccaggcccgagagcagaatttgcccaggggaaacctcctcagaaacaaagaaaagagtggtagccagcccgcctgcctggatcacatgcaggacagaagagccttgtccctcaaagcccaccagtcagagagctacctgccgattggctgcaagctgccacctcagtcctcgggtgtggacacaagcccctgcccaaactcacctgtgttcaggacgggaagcgagcctgccctgagcccagcagtggttcggagggtctcctcagacgccagggctggggaggcgctgaggggatcagacagtcaactgtgccctaagcccccgcctaagccctgcaaggtgccgttcctcaaggttccctcgtctccctctgcctggctcaactcagaggccaactactgtgaactgaacccagcgtttgccacaggctgcggcaggggagcaaagctaccctcatgtgcccagggaagccacacagaactgctcacagccaagcagaatgaggcgccaggtccccggaactctggcgtcaactacttgatccttgatgatgatgacagggaaagaccttgggaacctgcggcagctcagatggagaaggggcagtgggacaagggcgagtttgtgacgcccctcctggagactgtctcctccttcaggcccaacgagtttgagtcaaagttccttccccctgagaataagcccctggaaacagcaatgttgaaacgtgcaaaagaactgttcaccaacaacgaccccaaggtcatcgcccagcacgtactgagcatggactgcagggttgctaggatacttggagtctctgaagagatgaggaggaacatgggggtgagctcaggcctggaactcattaccttgcctcacggacaccagctgcgcctggacataattgaaagacacaacacaatggccatcggcattgcagtggacattctgggatgcacgggcactttggaggaccgagcggccactctgagtaagatcatccaggtggcggtggaactgaaggattccatgggggacctctattccttctcagctctcatgaaagccctggaaatgccacagatcacaaggttagaaaagacgtggactgctctgcggcaccagtacacccaaactgccattctctatgagaaacagctgaagcccttcagcaaactcctgcatgaaggcagagagtccacatgtgttcccccaaacaatgtatcagtcccactgctgatgccgcttgtgacgttaatggagcgccaggctgtgacttttgaaggaaccgacatgtgggaaaaaaacgaccagagctgtgaaatcatgctgaaccatttggcaacagcgcgattcatggccgaggctgcagacagctaccggatgaatgctgagaggatcctggcaggttttcaaccagatgaagaaatgaatgaaatctgcaagactgaatttcaaatgcgattgctatggggcagcaaaggtgcacaagtcaatcagacagagagatatgagaaattcaaccagattttaactgccctctcgcgtaaattggaacctcctcctgtaaagcaggcagagctttgataactctccagagaacctttagaatatcttttcaagtttccccagcttcatctttgggaaagcttactgtttttgataaagtaataatgtgcaaatctgacaatatacaagcttttagtatccacaggatattaaacgtgtaaattgcacagagcacacttatttatgaattgtctaaagttactactgattttaaaatgaataatttattattaaggtaactactgctaatgttgatcagcaaatttaagagaagacctagctatgttggctggttgctttctattatcatggtatttgaccattttagttttaattccatgtcagataagtgtaaatagaagagtttaaaagcatgaaacatttcagaaggtatcagttatatgatattctttaaacaaatatgaaaaatgtaaatactcatgaatgaaaatacatctttttgtga

SEQ ID NO: 439897 - DNA, 4274 bp, Homo sapiens
ttttgacgggctcccgctgggattcgggtgtctgctcatctggaagcctccatgctggagaggtagtcagcacagcgcacgcagggcgtaggcgtgttttctcgtccctccctcgcaaccacagtcccgctcaaggcgtgggggtgtcacccgagacccgggcctcccctgcactttcctttaggccgaaaccgcgagccttcgcttcagtgtcgcttttccttcgccgccgccgccgccgccgccgccgctcttctcaggacctacatcgactgcccagtcggctgagctgggccctgggccaccgaggcccggggagctgaggggctcgggaccctgcgagccgcttaagaagaaggaccgcaagtaccgaatgcagtgaactgcgagagcacgggaatgagagagaaattaaaccgtttagccaaatattaaaaaataagagacatgatggaggcagaaaataaattgtaggggggagggaaaaaagcgttacgactccgccgggactcgaacccggaacctttgaatgccttcagcctctagaagtccaatgcgctatccattgcgccacggagccacctgttggagtctcagcgcatctgctatgttaagccagaggcgacggccccgcgctcttccgaccgcgcctcccgtcgtcagtgtcaccgagacccagccgccgcgctcagggcactgccatccgcctcaaacgccagccgcaggctctcggtctccccgcagtggtcgcccctcaacaaggtcggcgacccagttgagccaagggcggccgcagtccgacggtcccacctggtcggtgtgagggcagccgcaacccggtccccttcacggtccgggcccagccgtacgaatcacagtcgcgcttttccctccccggctcccttcctgccccaagcgccccgcctaccaggtctctccggcggccgctccagcccggcctggaccccagagttgcacgcccaggccagccgttgcaccgttaagccgggccggtgacgccgggcctttacgtcgcgcctgtgagcggccgaggccgagcggcctcccctcgggctgcgagacggagacattacctcatccctcaagattgctcgctgcaaacacaacgctgagaaatggcccaagtaaagcgtgatcagggtcttgcattcttggcacatctaggaagaacgtgcaaggatgcgaattgtgaatcgcttctccaaacagagctgcttcatctgacccaagctggcctggagaaaggaggaagaggcaagagttgagaattatggctgcaggaaaatttgcaagccttcccagaaacatgccggtgaatcaccagttccccctggcctcatccatggaccttctgagcagcaggtcccctctcgctgagcatcgcccagatgcctatcaagatgtgtctatacatggcacccttccacggaagaaaaaaggtcctcctcccataaggtcctgtgatgacttcagtcacatgggcaccctcccccactccaaatccccacggcagaactcgcctgtgacccaggatggcatccaggagagcccatggcaggaccggcacggcgaaaccttcaccttcagggatccacatcttctggacccaactgtggaatatgtgaagttctccaaggagaggcacatcatggacaggacccccgagaaactgaagaaggagctggaggaggagctgctcctgagcagcgaggacctgcgcagccatgcctggtaccacggccgcatcccccgacaggtgtctgaaaaccttgtgcagcgagatggtgacttcctagttcgtgactctctgtccagccctgggaactttgtcctgacctgtcagtggaagaacctcgctcagcacttcaaaatcaaccggacagttctgcgactcagcgaggcctacagccgcgtgcagtaccagttcgagatggagagcttcgactccatccccggcctggtgcgctgctacgtgggcaaccgccggcccatctcccagcagagtggcgccatcatcttccagcccatcaacaggacggtgcctctgcggtgcctggaggagcattatggcacctccccaggccaggcccgggagggcagcctcaccaagggaaggccggatgtggccaagaggctgagcctcaccatgggtggcgtccaggcccgagagcagaatttgcccaggggaaacctcctcagaaacaaagaaaagagtggtagccagcccgcctgcctggatcacatgcaggacagaagagccttgtccctcaaagcccaccagtcagagagctacctgccgattggctgcaagctgccacctcagtcctcgggtgtggacacaagcccctgcccaaactcacctgtgttcaggacgggaagcgagcctgccctgagcccagcagtggttcggagggtctcctcagacgccagggctggggaggcgctgaggggatcagacagtcaactgtgccctaagcccccgcctaagccctgcaaggtgccgttcctcaaggttccctcgtctccctctgcctggctcaactcagaggccaactactgtgaactgaacccagcgtttgccacaggctgcggcaggggagcaaagctaccctcatgtgcccagggaagccacacagaactgctcacagccaagcagaatgaggcgccaggtccccggaactctggcgtcaactacttgatccttgatgatgatgacagggaaagaccttgggaacctgcggcagctcagatggagaaggggcagtgggacaagggcgagtttgtgacgcccctcctggagactgtctcctccttcaggcccaacgagtttgagtcaaagttccttccccctgagaataagcccctggaaacagcaatgttgaaacgtgcaaaagaactgttcaccaacaacgaccccaaggtcatcgcccagcacgtactgagcatggactgcagggttgctaggatacttggagtctctgaagagatgaggaggaacatgggggtgagctcaggcctggaactcattaccttgcctcacggacaccagctgcgcctggacataattgaaagacacaacacaatggccatcggcattgcagtggacattctgggatgcacgggcactttggaggaccgagcggccactctgagtaagatcatccaggtggcggtggaactgaaggattccatgggggacctctattccttctcagctctcatgaaagccctggaaatgccacagatcacaaggttagaaaagacgtggactgctctgcggcaccagtacacccaaactgccattctctatgagaaacagctgaagcccttcagcaaactcctgcatgaaggcagagagtccacatgtgttcccccaaacaatgtatcagtcccactgctgatgccgcttgtgacgttaatggagcgccaggctgtgacttttgaaggaaccgacatgtgggaaaaaaacgaccagagctgtgaaatcatgctgaaccatttggcaacagcgcgattcatggccgaggctgcagacagctaccggatgaatgctgagaggatcctggcaggttttcaaccagatgaagaaatgaatgaaatctgcaagactgaatttcaaatgcgattgctatggggcagcaaaggtgcacaagtcaatcagacagagagatatgagaaattcaaccagattttaactgccctctcgcgtaaattggaacctcctcctgtaaagcaggcagagctttgataactctccagagaacctttagaatatcttttcaagtttccccagcttcatctttgggaaagcttactgtttttgataaagtaataatgtgcaaatctgacaatatacaagcttttagtatccacaggatattaaacgtgtaaattgcacagagcacacttatttatgaattgtctaaagttactactgattttaaaatgaataatttattattaaggtaactactgctaatgttgatcagcaaatttaagagaagacctagctatgttggctggttgctttctattatcatggtatttgaccattttagttttaattccatgtcagataagtgtaaatagaagagtttaaaagcatgaaacatttcagaaggtatcagttatatgatattctttaaacaaatatgaaaaatgtaaatactcatgaatgaaaatacatctttttgtgaaacagttgtatccagtctctttcatattaaacaactcatcttggtacaataactcta

SEQ ID NO: 439898 - DNA, 1293 bp, Homo sapiens
ggatcccccggcaggctgtactccaccggcaggttgtactccaccggcaggttgtactccaccggcaggttgtactccaccggcaggttgtactcatgggggtgagctcaggcctggaactcattaccttgcctcacggacaccagctgcgcctggacataattgaaagacacaacacaatggccatcggcattgcagtggacattctgggatgcacgggcactttggaggaccgagcggccactctgagtaagatcatccaggtggcggtggaactgaaggattccatgggggacctctattccttctcagctctcatgaaagccctggaaatgccacagatcacaaggttagaaaagacgtggactgctctgcggcaccagtacacccaaactgccattctctatgagaaacagctgaagcccttcagcaaactcctgcatgaaggcagagagtccacatgtgttcccccaaacaatgtatcagtcccactgctgatgccgcttgtgacgttaatggagcgccaggctgtgacttttgaaggaaccgacatgtgggaaaaaaacgaccagagctgtgaaatcatgctgaaccatttggcaacagcgcgattcatggccgaggctgcagacagctaccggatgaatgctgagaggatcctggcaggttttcaaccagatgaagaaatgaatgaaatctgcaagactgaatttcaaatgcgattgctatggggcagcaaaggtgcacaagtcaatcagacagagagatatgagaaattcaaccagattttaactgccctctcgcgtaaattggaacctcctcctgtaaagcaggcagagctttgataactctccagagaacctttagaatatcttttcaagtttccccagcttcatctttgggaaagcttactgtttttgataaagtaataatgtgcaaatctgacaatatacaagcttttagtatccacaggatattaaacgtgtaaattgcacagagcacacttatttatgaattgtctaaagttactactgattttaaaatgaataatttattattaaggtaactactgctaatgttgatcagcaaatttaagagaagacctagctatgttggctggttgctttctattatcatggtatttgaccattttagttttaattccatgtcagataagtgtaaatagaagagtttaaaagcatgaaacatttcagaaggtatcagttatatgatattctttaaacaaatatgaaaaatgtaaatactcatgaatgaaaatacatctttttgtga

SEQ ID NO: 439899 - DNA, 4218 bp, Homo sapiens
  misc_feature (3806)..(3806): n is a, c, g, or t
  misc_feature (3825)..(3825): n is a, c, g, or t
  misc_feature (3827)..(3827): n is a, c, g, or t
  misc_feature (3829)..(3830): n is a, c, g, or t
  misc_feature (3834)..(3834): n is a, c, g, or t
  misc_feature (3838)..(3838): n is a, c, g, or t
  misc_feature (3842)..(3844): n is a, c, g, or t
  misc_feature (3847)..(3847): n is a, c, g, or t
  misc_feature (3849)..(3849): n is a, c, g, or t
ttttgacgggctcccgctgggattcgggtgtctgctcatctggaagcctccatgctggagaggtagtcagcacagcgcacgcagggcgtaggcgtgttttctcgtccctccctcgcaaccacagtcccgctcaaggcgtgggggtgtcacccgagacccgggcctcccctgcactttcctttaggccgaaaccgcgagccttcgcttcagtgtcgcttttccttcgccgccgccgccgccgccgccgccgctcttctcaggacctacatcgactgcccagtcggctgagctgggccctgggccaccgaggcccggggagctgaggggctcgggaccctgcgagccgcttaagaagaaggaccgcaagtaccgaatgcagtgaactgcgagagcacgggaatgagagagaaattaaaccgtttagccaaatattaaaaaataagagacatgatggaggcagaaaataaattgtaggggggagggaaaaaagcgttacgactccgccgggactcgaacccggaacctttgaatgccttcagcctctagaagtccaatgcgctatccattgcgccacggagccacctgttggagtctcagcgcatctgctatgttaagccagaggcgacggccccgcgctcttccgaccgcgcctcccgtcgtcagtgtcaccgagacccagccgccgcgctcagggcactgccatccgcctcaaacgccagccgcaggctctcggtctccccgcagtggtcgcccctcaacaaggtcggcgacccagttgagccaagggcggccgcagtccgacggtcccacctggtcggtgtgagggcagccgcaacccggtccccttcacggtccgggcccagccgtacgaatcacagtcgcgcttttccctccccggctcccttcctgccccaagcgccccgcctaccaggtctctccggcggccgctccagcccggcctggaccccagagttgcacgcccaggccagccgttgcaccgttaagccgggccggtgacgccgggcctttacgtcgcgcctgtgagcggccgaggccgagcggcctcccctcgggctgcgagacggagacattacctcatccctcaagattgctcgctgcaaacacaacgctgagaaatggcccaagtaaagcgtgatcagggtcttgcattcttggcacatctaggaagaacgtgcaaggatgcgaattgtgaatcgcttctccaaacagagctgcttcatctgacccaagctggcctggagaaaggaggaagaggcaagagttgagaattatggctgcaggaaaatttgcaagccttcccagaaacatgccggtgaatcaccagttccccctggcctcatccatggaccttctgagcagcaggtcccctctcgctgagcatcgcccagatgcctatcaagatgtgtctatacatggcacccttccacggaagaaaaaaggtcctcctcccataaggtcctgtgatgacttcagtcacatgggcaccctcccccactccaaatccccacggcagaactcgcctgtgacccaggatggcatccaggagagcccatggcaggaccggcacggcgaaaccttcaccttcagggatccacatcttctggacccaactgtggaatatgtgaagttctccaaggagaggcacatcatggacaggacccccgagaaactgaagaaggagctggaggaggagctgctcctgagcagcgaggacctgcgcagccatgcctggtaccacggccgcatcccccgacaggtgtctgaaaaccttgtgcagcgagatggtgacttcctagttcgtgactctctgtccagccctgggaactttgtcctgacctgtcagtggaagaacctcgctcagcacttcaaaatcaaccggacagttctgcgactcagcgaggcctacagccgcgtgcagtaccagttcgagatggagagcttcgactccatccccggcctggtgcgctgctacgtgggcaaccgccggcccatctcccagcagagtggcgccatcatcttccagcccatcaacaggacggtgcctctgcggtgcctggaggagcattatggcacctccccaggccaggcccgggagggcagcctcaccaagggaaggccggatgtggccaagaggctgagcctcaccatgggtggcgtccaggcccgagagcagaatttgcccaggggaaacctcctcagaaacaaagaaaagagtggtagccagcccgcctgcctggatcacatgcaggacagaagagccttgtccctcaaagcccaccagtcagagagctacctgccgattggctgcaagctgccacctcagtcctcgggtgtggacacaagcccctgcccaaactcacctgtgttcaggacgggaagcgagcctgccctgagcccagcagtggttcggagggtctcctcagacgccagggctggggaggcgctgaggggatcagacagtcaactgtgccctaagcccccgcctaagccctgcaaggtgccgttcctcaaggttccctcgtctccctctgcctggctcaactcagaggccaactactgtgaactgaacccagcgtttgccacaggctgcggcaggggagcaaagctaccctcatgtgcccagggaagccacacagaactgctcacagccaagcagaatgaggcgccaggtccccggaactctggcgtcaactacttgatccttgatgatgatgacagggaaagaccttgggaacctgcggcagctcagatggagaaggggcagtgggacaagggcgagtttgtgacgcccctcctggagactgtctcctccttcaggcccaacgagtttgagtcaaagttccttccccctgagaataagcccctggaaacagcaatgttgaaacgtgcaaaagaactgttcaccaacaacgaccccaaggtcatcgcccagcacgtactgagcatggactgcagggttgctaggatacttggagtctctgaagagatgaggaggaacatgggggtgagctcaggcctggaactcattaccttgcctcacggacaccagctgcgcctggacataattgaaagacacaacacaatggccatcggcattgcagtggacattctgggatgcacgggcactttggaggaccgagcggccactctgagtaagatcatccaggtggcggtggaactgaaggattccatgggggacctctattccttctcagctctcatgaaagccctggaaatgccacagatcacaaggttagaaaagacgtggactgctctgcggcaccagtacacccaaactgccattctctatgagaaacagctgaagcccttcagcaaactcctgcatgaaggcagagagtccacatgtgttcccccaaacaatgtatcagtcccactgctgatgccgcttgtgacgttaatggagcgccaggctgtgacttttgaaggaaccgacatgtgggaaaaaaacgaccagagctgtgaaatcatgctgaaccatttggcaacagcgcgattcatggccgaggctgcagacagctaccggatgaatgctgagaggatcctggcaggttttcaaccagatgaagaaatgaatgaaatctgcaagactgaatttcaaatgcgattgctatggggcagcaaaggtgcacaagtcaatcagacagagagatatgagaaattcaaccagattttaactgccctctcgcgtaaattggaacctcctcctgtaaagcaggcagacgccccgctcccccccccgcgccccccccgcctcccctcccccntcccccccgcccccccccngngnncgcncccngccnnngcncncgtaataatgtgcaaatctgacaatatacaagcttttagtatccacaggatattaaacgtgtaaattgcacagagcacacttatttatgaattgtctaaagttactactgattttaaaatgaataatttattattaaggtaactactgctaatgttgatcagcaaatttaagagaagacctagctatgttggctggttgctttctattatcatggtatttgaccattttagttttaattccatgtcagataagtgtaaatagaagagtttaaaagcatgaaacatttcagaaggtatcagttatatgatattctttaaacaaatatgaaaaatgtaaatactcatgaatgaaaatacatctttttgtga

SEQ ID NO: 439900 - DNA, 3302 bp, Homo sapiens
ttttgacgggctcccgctgggattcgggtgtctgctcatctggaagcctccatgctggagaggtagtcagcacagcgcacgcagggcgtaggcgtgttttctcgtccctccctcgcaaccacagtcccgctcaaggcgtgggggtgtcacccgagacccgggcctcccctgcactttcctttaggccgaaaccgcgagccttcgcttcagtgtcgcttttccttcgccgccgccgccgccgccgccgccgctcttctcaggacctacatcgactgcccagtcggctgagctgggccctgggccaccgaggcccggggagctgaggggctcgggaccctgcgagccgcttaagaagaaggaccgcaagtaccgaatgcagtgaactgcgagagcacgggaatgagagagaaattaaaccgtttagccaaatattaaaaaataagagacatgatggaggcagaaaataaattgtaggggggagggaaaaaagcgttacgactccgccgggactcgaacccggaacctttgaatgccttcagcctctagaagtccaatgcgctatccattgcgccacggagccacctgttggagtctcagcgcatctgctatgttaagccagaggcgacggccccgcgctcttccgaccgcgcctcccgtcgtcagtgtcaccgagacccagccgccgcgctcagggcactgccatccgcctcaaacgccagccgcaggctctcggtctccccgcagtggtcgcccctcaacaaggtcggcgacccagttgagccaagggcggccgcagtccgacggtcccacctggtcggtgtgagggcagccgcaacccggtccccttcacggtccgggcccagccgtacgaatcacagtcgcgcttttccctccccggctcccttcctgccccaagcgccccgcctaccaggtctctccggcggccgctccagcccggcctggaccccagagttgcacgcccaggccagccgttgcaccgttaagccgggccggtgacgccgggcctttacgtcgcgcctgtgagcggccgaggccgagcggcctcccctcgggctgcgagacggagacattacctcatccctcaagattgctcgctgcaaacacaacgctgagaaatggcccaagtaaagcgtgatcagggtcttgcattcttggcacatctaggaagaacgtgcaaggatgcgaattgtgaatcgcttctccaaacagagctgcttcatctgacccaagctggcctggagaaaggaggaagaggcaagagttgagaattatggctgcaggaaaatttgcaagccttcccagaaacatgccggtgaatcaccagttccccctggcctcatccatggaccttctgagcagcaggtcccctctcgctgagcatcgcccagatgcctatcaagatgtgtctatacatggcacccttccacggaagaaaaaaggtcctcctcccataaggtcctgtgatgacttcagtcacatgggcaccctcccccactccaaatccccacggcagaactcgcctgtgacccaggatggcatccaggagagcccatggcaggaccggcacggcgaaaccttcaccttcagggatccacatcttctggacccaactgtggaatatgtgaagttctccaaggagaggcacatcatggacaggacccccgagaaactgaagaaggagctggaggaggagctgctcctgagcagcgaggacctgcgcagccatgcctggtaccacggccgcatcccccgacaggtgtctgaaaaccttgtgcagcgagatggtgacttcctagttcgtgactctctgtccagccctgggaactttgtcctgacctgtcagtggaagaacctcgctcagcacttcaaaatcaaccggacagttctgcgactcagcgaggcctacagccgcgtgcagtaccagttcgagatggagagcttcgactccatccccggcctggtgcgctgctacgtgggcaaccgccggcccatctcccagcagagtggcgccatcatcttccagcccatcaacaggacggtgcctctgcggtgcctggaggagcattatggcacctccccaggccaggcccgggagggcagcctcaccaagggaaggccggatgtggccaagaggctgagcctcaccatgggtggcgtccaggcccgagagcagaatttgcccaggggaaacctcctcagaaacaaagaaaagagtggtagccagcccgcctgcctggatcacatgcaggacagaagagccttgtccctcaaagcccaccagtcagagagctacctgccgattggctgcaagctgccacctcagtcctcgggtgtggacacaagcccctgcccaaactcacctgtgttcaggacgggaagcgagcctgccctgagcccagcagtggttcggagggtctcctcagacgccagggctggggaggcgctgaggggatcagacagtcaactgtgccctaagcccccgcctaagccctgcaaggtgccgttcctcaaggttccctcgtctccctctgcctggctcaactcagaggccaactactgtgaactgaacccagcgtttgccacaggctgcggcaggggagcaaagctaccctcatgtgcccagggaagccacacagaactgctcacagccaagcagaatgaggcgccaggtccccggaactctggcgtcaactacttgatccttgatgatgatgacagggaaagaccttgggaacctgcggcagctcagatggagaaggggcagtgggacaagggcgagtttgtgacgcccctcctggagactgtctcctccttcaggcccaacgagctttgataactctccagagaacctttagaatatcttttcaagtttccccagcttcatctttgggaaagcttactgtttttgataaagtaataatgtgcaaatctgacaatatacaagcttttagtatccacaggatattaaacgtgtaaattgcacagagcacacttatttatgaattgtctaaagttactactgattttaaaatgaataatttattattaaggtaactactgctaatgttgatcagcaaatttaagagaagacctagctatgttggctggttgctttctattatcatggtatttgaccattttagttttaattccatgtcagataagtgtaaatagaagagtttaaaagcatgaaacatttcagaaggtatcagttatatgatattctttaaacaaatatgaaaaatgtaaatactcatgaatgaaaatacatctttttgtga

SEQ ID NO: 439901 - DNA, 1890 bp, Homo sapiens
ttttgacgggctcccgctgggattcgggtgtctgctcatctggaagcctccatgctggagaggtagtcagcacagcgcacgcagggcgtaggcgtgttttctcgtccctccctcgcaaccacagtcccgctcaaggcgtgggggtgtcacccgagacccgggcctcccctgcactttcctttaggccgaaaccgcgagccttcgcttcagtgtcgcttttccttcgccgccgccgccgccgccgccgccgctcttctcaggacctacatcgactgcccagtcggctgagctgggccctgggccaccgaggcccggggagctgaggggctcgggaccctgcgagccgcttaagaagaaggaccgcaagtaccgaatgcagtgaactgcgagagcacgggaatgagagagaaattaaaccgtttagccaaatattaaaaaataagagacatgatggaggcagaaaataaattgtaggggggagggaaaaaagcgttacgactccgccgggactcgaacccggaacctttgaatgccttcagcctctagaagtccaatgcgctatccattgcgccacggagccacctgttggagtctcagcgcatctgctatgttaagccagaggcgacggccccgcgctcttccgaccgcgcctcccgtcgtcagtgtcaccgagacccagccgccgcgctcagggcactgccatccgcctcaaacgccagccgcaggctctcggtctccccgcagtggtcgcccctcaacaaggtcggcgacccagttgagccaagggcggccgcagtccgacggtcccacctggtcggtgtgagggcagccgcaacccggtccccttcacggtccgggcccagccgtacgaatcacagtcgcgcttttccctccccggctcccttcctgccccaagcgccccgcctaccaggtctctccggcggccgctccagcccggcctggaccccagagttgcacgcccaggccagccgttgcaccgttaagccgggccggtgacgccgggcctttacgtcgcgcctgtgagcggccgaggccgagcggcctcccctcgggctgcgagacggagacattacctcatccctcaagattgctcgctgcaaacacaacgctgagaaatggcccaagtaaagcgtgatcagggtcttgcattcttggcacatctaggaagaacgtgcaaggatgcgaattgtgaatcgcttctccaaacagagctgcttcatctgacccaagctggcctggagaaaggaggaagaggcaagagttgagaattatggctgcaggaaaatttgcaagccttcccagaaacatgccggtgaatcaccagttccccctggcctcatccatggaccttctgagcagcaggtcccctctcgctgagcatcgcccagatgcctatcaagatgtgtctatacatggcacccttccacggaagaaaaaaggtcctcctcccataaggtcctgtgatgacttcagtcacatgggcaccctcccccactccaaatccccacggcagaactcgcctgtgacccaggatggcatccaggagagcccatggcaggaccggcacggcgaaaccttcaccttcagggatccacatcttctggacccaactgtggaatatgtgaagttctccaaggagaggcacatcatggacaggacccccgagaaactgaagaaggagctggaggaggagctgctcctgagcagcgaggacctgcgcagccatgcctggtaccacggccgcatcccccgacaggtacctggtcttgtcccttccagagcatacacggctgctctcaggcaatgtacagattgatgacccgcagggtcccactccgaggccacatgggcggaagcacctgtgtaacc

SEQ ID NO: 439902 - DNA, 475 bp, Homo sapiens
tgagatggagtctcgcttgtcacccaggctgcagtgcagtggcgcagtctcgctcactgcaagctccacctcccgggttcacgccattctcctgcctcagcctcccgagtagctgggactacaggcgctcgccaccacgcctggctaattttttgtatttttttagtagagacgggatttcactgtgttagccaggatggtctcgatctcctgatcttgtgatccacccacctcggcctcccaaagtgctgggattacaggcgtgagccaccgcgcctggtgctttcagtctatttttaacacatcttaggcagaactgaagtaactttttgtttattttgtttcattaggttttcaaccagatgaagaaatgaatgaaatctgcaagactgaatttcaaatgcgattgctatggggcagcaaaggtgcacaagtcaatcagacagagagatatgagaaattcaaccagatttta

SEQ ID NO: 439903 - DNA, 329 bp, Homo sapiens
catcctaggactcagctgctgcattggtcatggggacagggggatggagtacacaacacagtcatatattaatcgtcccatcagtaatttgtttctccagcggtcattcctttacttttagggtatgctgtagcactctcgttctgagcagttttctttttttttgtttttgtttaagttcccatggcattgcctaaaagttttattttacacgttagtaacacatttccatcctatgtgtcttttacttcagaaacaaagaaaagagtggtagccagcccgcctgcctggatcacatgcaggacagaagagccttgtccctcaaagcc

SEQ ID NO: 439904 - DNA, 4217 bp, Homo sapiens
ttttgacgggctcccgctgggattcgggtgtctgctcatctggaagcctccatgctggagaggtagtcagcacagcgcacgcagggcgtaggcgtgttttctcgtccctccctcgcaaccacagtcccgctcaaggcgtgggggtgtcacccgagacccgggcctcccctgcactttcctttaggccgaaaccgcgagccttcgcttcagtgtcgcttttccttcgccgccgccgccgccgccgccgccgctcttctcaggacctacatcgactgcccagtcggctgagctgggccctgggccaccgaggcccggggagctgaggggctcgggaccctgcgagccgcttaagaagaaggaccgcaagtaccgaatgcagtgaactgcgagagcacgggaatgagagagaaattaaaccgtttagccaaatattaaaaaataagagacatgatggaggcagaaaataaattgtaggggggagggaaaaaagcgttacgactccgccgggactcgaacccggaacctttgaatgccttcagcctctagaagtccaatgcgctatccattgcgccacggagccacctgttggagtctcagcgcatctgctatgttaagccagaggcgacggccccgcgctcttccgaccgcgcctcccgtcgtcagtgtcaccgagacccagccgccgcgctcagggcactgccatccgcctcaaacgccagccgcaggctctcggtctccccgcagtggtcgcccctcaacaaggtcggcgacccagttgagccaagggcggccgcagtccgacggtcccacctggtcggtgtgagggcagccgcaacccggtccccttcacggtccgggcccagccgtacgaatcacagtcgcgcttttccctccccggctcccttcctgccccaagcgccccgcctaccaggtctctccggcggccgctccagcccggcctggaccccagagttgcacgcccaggccagccgttgcaccgttaagccgggccggtgacgccgggcctttacgtcgcgcctgtgagcggccgaggccgagcggcctcccctcgggctgcgagacggagacattacctcatccctcaagattgctcgctgcaaacacaacgctgagaaatggcccaagtaaagcgtgatcagggtcttgcattcttggcacatctaggaagaacgtgcaaggatgcgaattgtgaatcgcttctccaaacagagctgcttcatctgacccaagctggcctggagaaaggaggaagaggcaagagttgagaattatggctgcaggaaaatttgcaagccttcccagaaacatgccggtgaatcaccagttccccctggcctcatccatggaccttctgagcagcaggtcccctctcgctgagcatcgcccagatgcctatcaagatgtgtctatacatggcacccttccacggaagaaaaaaggtcctcctcccataaggtcctgtgatgacttcagtcacatgggcaccctcccccactccaaatccccacggcagaactcgcctgtgacccaggatggcatccaggagagcccatggcaggaccggcacggcgaaaccttcaccttcagggatccacatcttctggacccaactgtggaatatgtgaagttctccaaggagaggcacatcatggacaggacccccgagaaactgaagaaggagctggaggaggagctgctcctgagcagcgaggacctgcgcagccatgcctggtaccacggccgcatcccccgacaggtgtctgaaaaccttgtgcagcgagatggtgacttcctagttcgtgactctctgtccagccctgggaactttgtcctgacctgtcagtggaagaacctcgctcagcacttcaaaatcaaccggacagttctgcgactcagcgaggcctacagccgcgtgcagtaccagttcgagatggagagcttcgactccatccccggcctggtgcgctgctacgtgggcaaccgccggcccatctcccagcagagtggcgccatcatcttccagcccatcaacaggacggtgcctctgcggtgcctggaggagcattatggcacctccccaggccaggcccgggagggcagcctcaccaagggaaggccggatgtggccaagaggctgagcctcaccatgggtggcgtccaggcccgagagcagaatttgcccaggggaaacctcctcagaaacaaagaaaagagtggtagccagcccgcctgcctggatcacatgcaggacagaagagccttgtccctcaaagcccaccagtcagagagctacctgccgattggctgcaagctgccacctcagtcctcgggtgtggacacaagcccctgcccaaactcacctgtgttcaggacgggaagcgagcctgccctgagcccagcagtggttcggagggtctcctcagacgccagggctggggaggcgctgaggggatcagacagtcaactgtgccctaagcccccgcctaagccctgcaaggtgccgttcctcaaggttccctcgtctccctctgcctggctcaactcagaggccaactactgtgaactgaacccagcgtttgccacaggctgcggcaggggagcaaagctaccctcatgtgcccagggaagccacacagaactgctcacagccaagcagaatgaggcgccaggtccccggaactctggcgtcaactacttgatccttgatgatgatgacagggaaagaccttgggaacctgcggcagctcagatggagaaggggcagtgggacaagggcgagtttgtgacgcccctcctggagactgtctcctccttcaggcccaacgagtttgagtcaaagttccttccccctgagaataagcccctggaaacagcaatgttgaaacgtgcaaaagaactgttcaccaacaacgaccccaaggtcatcgcccagcacgtactgagcatggactgcagggttgctaggatacttggagtctctgaagagatgaggaggaacatgggggtgagctcaggcctggaactcattaccttgcctcacggacaccagctgcgcctggacataattgaaagacacaacacaatggccatcggcattgcagtggacattctgggatgcacgggcactttggaggaccgagcggccactctgagtaagatcatccaggtggcggtggaactgaaggattccatgggggacctctattccttctcagctctcatgaaagccctggaaatgccacagatcacaaggttagaaaagacgtggactgctctgcggcaccagtacacccaaactgccattctctatgagaaacagctgaagcccttcagcaaactcctgcatgaaggcagagagtccacatgtgttcccccaaacaatgtatcagtcccactgctgatgccgcttgtgacgttaatggagcgccaggctgtgacttttgaaggaaccgacatgtgggaaaaaaacgaccagagctgtgaaatcatgctgaaccatttggcaacagcgcgattcatggccgaggctgcagacagctaccggatgaatgctgagaggatcctggcaggttttcaaccagatgaagaaatgaatgaaatctgcaagactgaatttcaaatgcgattgctatggggcagcaaaggtgcacaagtcaatcagacagagagatatgagaaattcaaccagattttaactgccctctcgcgtaaattggaacctcctcctgtaaagcaggcagagctttgataactctccagagaacctttagaatatcttttcaagtttccccagcttcatctttgggaaagcttactgtttttgataaagtaataatgtgcaaatctgacaatatacaagcttttagtatccacaggatattaaacgtgtaaattgcacagagcacacttatttatgaattgtctaaagttactactgattttaaaatgaataatttattattaaggtaactactgctaatgttgatcagcaaatttaagagaagacctagctatgttggctggttgctttctattatcatggtatttgaccattttagttttaattccatgtcagataagtgtaaatagaagagtttaaaagcatgaaacatttcagaaggtatcagttatatgatattctttaaacaaatatgaaaaatgtaaatactcatgaatgaaaatacatctttttgtga

SEQ ID NO: 439905 - DNA, 2569 bp, Homo sapiens
tgatataagtgagccacaaggagattatgtaatttgtccagagtcatacagctgagccaggatgcaaacccaggtggtcaggctacaggaacagccaggctgcaccacattataaattctccagttgctgtgtctgaaaaccttgtgcagcgagatggtgacttcctagttcgtgactctctgtccagccctgggaactttgtcctgacctgtcagtggaagaacctcgctcagcacttcaaaatcaaccggacagttctgcgactcagcgaggcctacagccgcgtgcagtaccagttcgagatggagagcttcgactccatccccggcctggtgcgctgctacgtgggcaaccgccggcccatctcccagcagagtggcgccatcatcttccagcccatcaacaggacggtgcctctgcggtgcctggaggagcattatggcacctccccaggccaggcccgggagggcagcctcaccaagggaaggccggatgtggccaagaggctgagcctcaccatgggtggcgtccaggcccgagagcagaatttgcccaggggaaacctcctcagaaacaaagaaaagagtggtagccagcccgcctgcctggatcacatgcaggacagaagagccttgtccctcaaagcccaccagtcagagagctacctgccgattggctgcaagctgccacctcagtcctcgggtgtggacacaagcccctgcccaaactcacctgtgttcaggacgggaagcgagcctgccctgagcccagcagtggttcggagggtctcctcagacgccagggctggggaggcgctgaggggatcagacagtcaactgtgccctaagcccccgcctaagccctgcaaggtgccgttcctcaaggttccctcgtctccctctgcctggctcaactcagaggccaactactgtgaactgaacccagcgtttgccacaggctgcggcaggggagcaaagctaccctcatgtgcccagggaagccacacagaactgctcacagccaagcagaatgaggcgccaggtccccggaactctggcgtcaactacttgatccttgatgatgatgacagggaaagaccttgggaacctgcggcagctcagatggagaaggggcagtgggacaagggcgagtttgtgacgcccctcctggagactgtctcctccttcaggcccaacgagtttgagtcaaagttccttccccctgagaataagcccctggaaacagcaatgttgaaacgtgcaaaagaactgttcaccaacaacgaccccaaggtcatcgcccagcacgtactgagcatggactgcagggttgctaggatacttggagtctctgaagagatgaggaggaacatgggggtgagctcaggcctggaactcattaccttgcctcacggacaccagctgcgcctggacataattgaaagacacaacacaatggccatcggcattgcagtggacattctgggatgcacgggcactttggaggaccgagcggccactctgagtaagatcatccaggtggcggtggaactgaaggattccatgggggacctctattccttctcagctctcatgaaagccctggaaatgccacagatcacaaggttagaaaagacgtggactgctctgcggcaccagtacacccaaactgccattctctatgagaaacagctgaagcccttcagcaaactcctgcatgaaggcagagagtccacatgtgttcccccaaacaatgtatcagtcccactgctgatgccgcttgtgacgttaatggagcgccaggctgtgacttttgaaggaaccgacatgtgggaaaaaaacgaccagagctgtgaaatcatgctgaaccatttggcaacagcgcgattcatggccgaggctgcagacagctaccggatgaatgctgagaggatcctggcaggttttcaaccagatgaagaaatgaatgaaatctgcaagactgaatttcaaatgcgattgctatggggcagcaaaggtgcacaagtcaatcagacagagagatatgagaaattcaaccagattttaactgccctctcgcgtaaattggaacctcctcctgtaaagcaggcagagctttgataactctccagagaacctttagaatatcttttcaagtttccccagcttcatctttgggaaagcttactgtttttgataaagtaataatgtgcaaatctgacaatatacaagcttttagtatccacaggatattaaacgtgtaaattgcacagagcacacttatttatgaattgtctaaagttactactgattttaaaatgaataatttattattaaggtaactactgctaatgttgatcagcaaatttaagagaagacctagctatgttggctggttgctttctattatcatggtatttgaccattttagttttaattccatgtcagataagtgtaaatagaagagtttaaaagcatgaaacatttcagaaggtatcagttatatgatattctttaaacaaatatgaaaaatgtaaatactcatgaatgaaaatacatctttttgtga

SEQ ID NO: 439906 - DNA, 4045 bp, Homo sapiens
ttttgacgggctcccgctgggattcgggtgtctgctcatctggaagcctccatgctggagaggtagtcagcacagcgcacgcagggcgtaggcgtgttttctcgtccctccctcgcaaccacagtcccgctcaaggcgtgggggtgtcacccgagacccgggcctcccctgcactttcctttaggccgaaaccgcgagccttcgcttcagtgtcgcttttccttcgccgccgccgccgccgccgccgccgctcttctcaggacctacatcgactgcccagtcggctgagctgggccctgggccaccgaggcccggggagctgaggggctcgggaccctgcgagccgcttaagaagaaggaccgcaagtaccgaatgcagtgaactgcgagagcacgggaatgagagagaaattaaaccgtttagccaaatattaaaaaataagagacatgatggaggcagaaaataaattgtaggggggagggaaaaaagcgttacgactccgccgggactcgaacccggaacctttgaatgccttcagcctctagaagtccaatgcgctatccattgcgccacggagccacctgttggagtctcagcgcatctgctatgttaagccagaggcgacggccccgcgctcttccgaccgcgcctcccgtcgtcagtgtcaccgagacccagccgccgcgctcagggcactgccatccgcctcaaacgccagccgcaggctctcggtctccccgcagtggtcgcccctcaacaaggtcggcgacccagttgagccaagggcggccgcagtccgacggtcccacctggtcggtgtgagggcagccgcaacccggtccccttcacggtccgggcccagccgtacgaatcacagtcgcgcttttccctccccggctcccttcctgccccaagcgccccgcctaccaggtctctccggcggccgctccagcccggcctggaccccagagttgcacgcccaggccagccgttgcaccgttaagccgggccggtgacgccgggcctttacgtcgcgcctgtgagcggccgaggccgagcggcctcccctcgggctgcgagacggagacattacctcatccctcaagattgctcgctgcaaacacaacgctgagaaatggcccaagtaaagcgtgatcagggtcttgcattcttggcacatctaggaagaacgtgcaaggatgcgaattgtgaatcgcttctccaaacagagctgcttcatctgacccaagctggcctggagaaaggaggaagaggcaagagttgagaattatggctgcaggaaaatttgcaagccttcccagaaacatgccggtgaatcaccagttccccctggcctcatccatggaccttctgagcagcaggtcccctctcgctgagcatcgcccagatgcctatcaagatgtgtctatacatggcacccttccacggaagaaaaaaggtcctcctcccataaggtcctgtgatgacttcagtcacatgggcaccctcccccactccaaatccccacggcagaactcgcctgtgacccaggatggcatccaggagagcccatggcaggaccggcacggcgaaaccttcaccttcagggatccacatcttctggacccaactgtggaatatgtgaagttctccaaggagaggcacatcatggacaggacccccgagaaactgaagaaggagctggaggaggagctgctcctgagcagcgaggacctgcgcagccatgcctggtaccacggccgcatcccccgacaggtgtctgaaaaccttgtgcagcgagatggtgacttcctagttcgtgactctctgtccagccctgggaactttgtcctgacctgtcagtggaagaacctcgctcagcacttcaaaatcaaccggacagttctgcgactcagcgaggcctacagccgcgtgcagtaccagttcgagatggagagcttcgactccatccccggcctggtgcgctgctacgtgggcaaccgccggcccatctcccagcagagtggcgccatcatcttccagcccatcaacaggacggtgcctctgcggtgcctggaggagcattatggcacctccccaggccaggcccgggagggcagcctcaccaagggaaggccggatgtggccaagaggctgagcctcaccatgggtggcgtccaggcccgagagcagaatttgcccaggggaaacctcctcagaaacaaagaaaagagtggtagccagcccgcctgcctggatcacatgcaggacagaagagccttgtccctcaaagcccaccagtcagagagctacctgccgattggctgcaagctgccacctcagtcctcgggtgtggacacaagcccctgcccaaactcacctgtgttcaggacgggaagcgagcctgccctgagcccagcagtggttcggagggtctcctcagacgccagggctggggaggcgctgaggggatcagacagtcaactgtgccctaagcccccgcctaagccctgcaaggtgccgttcctcaaggttccctcgtctccctctgcctggctcaactcagaggccaactactgtgaactgaacccagcgtttgccacaggctgcggcaggggagcaaagctaccctcatgtgcccagggaagccacacagaactgctcacagccaagcagaatgaggcgccaggtccccggaactctggcgtcaactacttgatccttgatgatgatgacagggaaagaccttgggaacctgcggcagctcagatggagaaggggcagtgggacaagggcgagtttgtgacgcccctcctggagactgtctcctccttcaggcccaacgagtttgagtcaaagttccttccccctgagaataagcccctggaaacagcaatgttgaaacgtgcaaaagaactgttcaccaacaacgaccccaaggtcatcgcccagcacgtactgagcatggactgcagggttgctaggatacttggagtctctgaagagatgaggaggaacatgggggtgagctcaggcctggaactcattaccttgcctcacggacaccagctgcgcctggacataattgaaagatcacaaggttagaaaagacgtggactgctctgcggcaccagtacacccaaactgccattctctatgagaaacagctgaagcccttcagcaaactcctgcatgaaggcagagagtccacatgtgttcccccaaacaatgtatcagtcccactgctgatgccgcttgtgacgttaatggagcgccaggctgtgacttttgaaggaaccgacatgtgggaaaaaaacgaccagagctgtgaaatcatgctgaaccatttggcaacagcgcgattcatggccgaggctgcagacagctaccggatgaatgctgagaggatcctggcaggttttcaaccagatgaagaaatgaatgaaatctgcaagactgaatttcaaatgcgattgctatggggcagcaaaggtgcacaagtcaatcagacagagagatatgagaaattcaaccagattttaactgccctctcgcgtaaattggaacctcctcctgtaaagcaggcagagctttgataactctccagagaacctttagaatatcttttcaagtttccccagcttcatctttgggaaagcttactgtttttgataaagtaataatgtgcaaatctgacaatatacaagcttttagtatccacaggatattaaacgtgtaaattgcacagagcacacttatttatgaattgtctaaagttactactgattttaaaatgaataatttattattaaggtaactactgctaatgttgatcagcaaatttaagagaagacctagctatgttggctggttgctttctattatcatggtatttgaccattttagttttaattccatgtcagataagtgtaaatagaagagtttaaaagcatgaaacatttcagaaggtatcagttatatgatattctttaaacaaatatgaaaaatgtaaatactcatgaatgaaaatacatctttttgtga

SEQ ID NO: 439907 - DNA, 1188 bp, Homo sapiens
aatgatacgatcgagtcggacctctgtatgctcagggacacagcgcgccggacataatgaaagaacacaacacaatggccatcggcattgcagtggacattctgggatgcacgggcactttggaggaccgagcggccactctgagtaagatcatccaggtggcggtggaactgaaggattccatgggggacctctattccttctcagctctcatgaaagccctggaaatgccacagatcacaaggttagaaaagacgtggactgctctgcggcaccagtacacccaaactgccattctctatgagaaacagctgaagcccttcagcaaactcctgcatgaaggcagagagtccacatgtgttcccccaaacaatgtatcagtcccactgctgatgccgcttgtgacgttaatggagcgccaggctgtgacttttgaaggaaccgacatgtgggaaaaaaacgaccagagctgtgaaatcatgctgaaccatttggcaacagcgcgattcatggccgaggctgcagacagctaccggatgaatgctgagaggatcctggcaggttttcaaccagatgaagaaatgaatgaaatctgcaagactgaatttcaaatgcgattgctatggggcagcaaaggtgcacaagtcaatcagacagagagatatgagaaattcaaccagattttaactgccctctcgcgtaaattggaacctcctcctgtaaagcaggcagagctttgataactctccagagaacctttagaatatcttttcaagtttccccagcttcatctttgggaaagcttactgtttttgataaagtaataatgtgcaaatctgacaatatacaagcttttagtatccacaggatattaaacgtgtaaattgcacagagcacacttatttatgaattgtctaaagttactactgattttaaaatgaataatttattattaaggtaactactgctaatgttgatcagcaaatttaagagaagacctagctatgttggctggttgctttctattatcatggtatttgaccattttagttttaattccatgtcagataagtgtaaatagaagagtttaaaagcatgaaacatttcagaaggtatcagttatatgatattctttaaacaaatatgaaaaatgtaaatactcatgaatgaaaatacatctttttgtga

SEQ ID NO: 439908 - DNA, 1213 bp, Homo sapiens
cacttctcgggagatatttccttttgtaatttgccctcggtcttgtcttatcttcgaaaggttgctggaatttctctgttccttggagtttgggggttttttgatttgttttttctttggtgcttgtaaagaaacaaagaaaagagtggtagccagcccgcctgcctggatcacatgcaggacagaagagccttgtccctcaaagcccaccagtcagagagctacctgccgattggctgcaagctgccacctcagtcctcgggtgtggacacaagcccctgcccaaactcacctgtgttcaggacgggaagcgagcctgccctgagcccagcagtggttcggagggtctcctcagacgccagggctggggaggcgctgaggggatcagacagtcaactgtgccctaagcccccgcctaagccctgcaaggtgccgttcctcaaggttccctcgtctccctctgcctggctcaactcagaggccaactactgtgaactgaacccagcgtttgccacaggctgcggcaggggagcaaagctaccctcatgtgcccagggaagccacacagaactgctcacagccaagcagaatgaggcgccaggtccccggaactctggcgtcaactacttgatccttgatgatgatgacagggaaagaccttgggaacctgcggcagctcagatggagaaggggcagtgggacaagggcgagtttgtgacgcccctcctggagactgtctcctccttcaggcccaacgagctttgataactctccagagaacctttagaatatcttttcaagtttccccagcttcatctttgggaaagcttactgtttttgataaagtaataatgtgcaaatctgacaatatacaagcttttagtatccacaggatattaaacgtgtaaattgcacagagcacacttatttatgaattgtctaaagttactactgattttaaaatgaataatttattattaaggtaactactgctaatgttgatcagcaaatttaagagaagacctagctatgttggctggttgctttctattatcatggtatttgaccattttagttttaattccatgtcagataagtgtaaatagaagagtttaaaagcatgaaacatttcagaaggtatcagttatatgatattctttaaacaaatatgaaaaatgtaaatactcatgaatgaaaatacatctttttgtga

SEQ ID NO: 439909 - DNA, 394 bp, Homo sapiens
ggtacagggtactaggagccacatgcacttctgagcacctttgccccaggagctccctctttgtgcccccaggtccagggttgaatgtggccctgtccggggacatcttgctttctgactgaaagtgcaccctctgtggcctactttggccctccacagtcagcctgctaaggggcgttctctctgttgagattggccgtctaaactgtgctgccggcacattttagagcaaaaggagcaaatggcacaaaaacagccctgctcttggctgatttggtttagttttctcctagtcccattggccctgaacctgaccgctgatctcctggctttcagacacaacacaatggccatcggcattgcagtggacattctgggatgcacgggcactttg

SEQ ID NO: 439910 - DNA, 1430 bp, Homo sapiens
gcacgaggttgtatatatcaattagcctctgataaattggttttattatatgttatttcccctaacgtcgcagtttccaagaacctatcaagtacattaaatgacaacttactgtacactgattaaaatgctattgtaataatttggggggaaagcaataaaggtagtggaaataggtataggtagtggaagtaggtatatatataatctcagcattttgggacaccaaggcggaggatcagttgagctcaggagttcgagaccaacctggacaacataatgagaccacatctttatagaaacaaagtagctgggtgtggtggtgcttgcctgtggtctcagttacttgggagcctgaggttggaggattgcttgaacccaagaggttaaagccgtagtgagctatgatcatgccactgcactccactctaggcaacagagcaagactagcaaaaaaaaaaaaaaaaaaaaaaaaaaagaaagaaaggatgtcttggaactgttgcaacttggtaactactgaatgtgagggctgagcaacaagcctgacaactacagggtttcaagcctacttgattggcagcctggggttccctcagtataagcagggagcccaagagaagtgagatcaggaggaaaatttgtttggttttggtataacgtttgcaggtgtgatggttatatacaggtgatgatgattctgataaaaagaaaattagtattctctttagaaaggatgtgcatctgttgctttcgtgccttcattttgatatagctaactcccagaaagagaagtaagactcagttgctggatctattgctggcatcagaatctagataattgatttggaaaactttgacacagtacctgaatttttcttttcatctgtaagtagctcaacccttttcactaagtttgttagataagttgctctggttgtaaaaacactatgtattctcagtagcttgatacaacttacaggttatcctttgaaatctcctttactgctgcttcattggttatggatatctaagtagtgcctttcttacgtctttgaagaaaacagatgagcagttgagtgttcccaactagtaaccttgatcaccttgagatgaaggcagtgtttatttgaattaaaaggtttgcatgcttttgccataccatactcctgtttttccccttaggacatagagccacattggaagaggacaagccttttaacctaattagtggtagttaagatgttagttgccaaaacatttctttaacagcctacatttaacaaaataccagaagatatcagaggatgtagctttctatgccaggcagattcaagaacaacagtgtaaggttcttttagatttatagcattttcagagccctgtagcaggaggtgtttttaacccaaagatgatagacaaaaaaatta

SEQ ID NO: 439911 - DNA, 108 bp, Homo sapiens
agatgaacagctgaccgtgttttcaaagataccacctggggaaacagccagaagctggaagtcatcccaagagagaagtcagccaggggttggagaccccagcagaag

SEQ ID NO: 439912 - DNA, 2999 bp, Homo sapiens
agcaaaccaatcgcaagcctcgttgagtggaaggggtgggatcttccccggaagtgttggttaaagcccctccaatcagcggctcggtgcggcaagtttgaatttcgtggaggctcgggttgtgagggttcctgcttcggagtcggcggtggtcgtccagaccgagtgttctttactttttgtttggttgaggtttcacgctagaaggtggctcaggatgtcttcatcacattttgccagtcgacacaggaaggatataagtactgaaatgattagaactaaaattgctcataggaaatcactgtctcagaaagaaaatagacataaggaatacgaacgaaatagacactttggtttgaaagatgtaaacattccaaccttggaaggtagaattcttgttgaattagatgagacatctcaagggcttgttccagaaaagaccaatgttaagccaagggcaatgaaaactattctaggtgatcaacgaaaacagatgctccaaaaatacaaagaagaaaagcaacttcaaaaattgaaagagcagagagagaaagctaaacgaggaatatttaaagtgggtcgttatagacctgatatgccttgttttcttttatcaaaccagaatgctgtgaaagctgagccaaaaaaggctattccatcttctgtacggattacaaggtcaaaggccaaagaccaaatggagcagactaagattgataacgagagtgatgttcgagcaatccgacctggtccaagacaaacttctgaaaagaaagtgtcagacaaagagaaaaaagttgtgcagcctgtaatgcccacgtcgttgagaatgactcgatcagctactcaagcagcaaagcaggttcccagaacagtctcatctaccacagcaagaaagccagtcacaagagctgctaatgaaaacgaaccagaaggaaaggtgccaagtaaaggaagacctgccaaaaatgtagaaacaaaacccgacaagggtatttcttgtaaagtcgatagtgaagaaaatactttgaattcacaaactaatgcaacaagtggaatgaatccagatggagtcttatcaaaaatggaaaacttacctgagataaatactgcaaaaataaaagggaagaattcctttgcacctaaggattttatgtttcagccactggatggtctgaagacctatcaagtaacacctatgactcccagaagtgccaatgcttttttgacacccagttacacctggactcctttaaaaacagaagttgatgagtctcaagcaacaaaagaaattttggcacaaaaatgtaaaacttactctaccaagacaatacagcaagattcaaataaattgccatgtcctttgggtcctctaactgtttggcatgaagaacatgttttaaataaaaatgaagctactactaaaaatttaaatggccttccaataaaagaagtcccatcacttgaaagaaatgaaggtcgaattgctcagccccaccatggtgtgccatatttcagaaatatcctccagtcagaaactgagaaattaacttcacattgcttcgagtgggacaggaaacttgaattggacattccagatgatgctaaagatcttattcgcacagcagttggtcaaacaagactccttatgaaggaaaggtttaaacagtttgaaggactggttgatgattgtgaatataaacgaggtataaaggagactacctgtacagatctggatggattttgggatatggttagttttcagatagaagatgtaatccacaaattcaacaatctgatcaaacttgaggaatctgggtggcaagtcaataataatatgaatcataatatgaacaaaaatgtctttaggaaaaaagttgtctcaggtatagcaagtaaaccaaaacaggatgatgctggaagaattgcagcgagaaatcgcctagctgccataaaaaatgcaatgagagagagaattaggcaggaagaatgtgctgaaacagcagtttctgtgataccaaaggaagttgataaaatagtgttcgatgctggatttttcagagttgaaagtcctgttaaattattctcaggactttctgtctcttctgaaggcccttctcaaagacttggaacacctaagtctgtcaacaaagctgtatctcagagtagaaatgagatgggcattccacaacaaactacatcaccagaaaatgccggtcctcagaatacgaaaagtgaacatgtgaagaagactttgtttttgagtattcctgaaagcaggagcagcatagaagatgctcagtgtcctggattaccagatttaattgaagaaaatcatgttgtaaataagacagacttgaaggtggattgtttatccagtgagagaatgagtttgcctcttcttgctggtggagtagcagatgatattaatactaacaaaaaagaaggaatttcagatgttgtggaaggaatggaactgaattcttcaattacatcacaggatgttttgatgagtagccctgaaaaaaatacagcttcacaaaatagcatcttagaagaaggggaaactaaaatttctcagtcagaactatttgataataaaagtctcactactgaatgccaccttcttgattcaccaggtctaaactgcagtaatccatttactcagctggagaggagacatcaagaacatgccagacacatttcttttggtggtaacctgattactttttcacctctacaaccaggagaattttgaatttaaaaataaatccaaacattttccttcatattatcaatgcttatatattccttagactattgaaattttggagaaaatgtatttgtgttcacttctatagcatataatgttttaatattctgtgttcatcaaagtgtattttagatatactctttctcaagggaagtggggatattttgtacattttcaacacagaataaaaaatgtactgtgccttgcctctcttgtttaaaaggaa

SEQ ID NO: 439913 - DNA, 429 bp, Homo sapiens
ggacgcgtgggtcgacccacgcgtcgaataaaagtctcactactgaatgccaccttcttgattcaccaggtctaaactgcagtaatccatttactcagctggagaggagacatcaagaacatgccagacacatttcttttggtggtaacctgattactttttcacctctacaaccaggagaattttgaatttaaaaataaatccaaacattttccttcatattatcaatgcttatatattccttagactattgaaattttggagaaaatgtatttgtgttcacttctatagcatataatgttttaatattctgtgttcatcaaagtgtattttagatatactctttctcaagggaagtggggatattttgtacattttcaacacagaataaaaaatgtactgtgccttgcctctcttgtttaaaaggaa

SEQ ID NO: 439914 - DNA, 648 bp, Homo sapiens
  misc_feature (1)..(1): n is a, c, g, or t
nctcttctttcccttgtcactttttgtgtgttccctcctgtgaggttgatatcttcgtttcggcgggggtgtgtttctccttctgttttggtcccccccccccgcaggtgtggtggggtgtctcttcccccggaggatcttcctcgctctcgtccgctgttttttctcctgccatctagcgtcgggtgttgtttattgctaggcgtggccgggcgctcgttctgcgtctgtctctattaataagaggcctcctcttttgttgggcccccttcttgtttcagcaacaagccggccggctgcggcggtttgggggccccccggggggggtttttggggcggcccccccccttttttttttttttttttttttttttttttttttttttttttttttttttttttttttttttttttttttttttcacagtacattttttattctgtgttgaaaatgtacaaaatatccccacttcccttgagaaagagtatatctaaaatacacttctatagcatataatgttttaatattctgtgttcatcaaagtgtattttagatatactctttctcaagggaagtggggatattttgtacattttcaacacagaataaaaaatgtactgtgccttgcctctcttgtttaaaaggaa

SEQ ID NO: 439915 - DNA, 306 bp, Homo sapiens
agcaaaccaatcgcaagcctcgttgagtggaaggggtgggatcttccccggaagtgttggttaaagcccctccaatcagcggctcggtgcggcaagtttgaatttcgtggaggctcgggttgtgagggttcctgcttcggagtcggcggtggtcgtccagaccgagtgttctttactttttgtttggttgaggtttcacgctagaaggtggctcaggtaggtgggtgctggagagctggacggagaacactggcccgcttccgttgaaggtctagaagggtctgaggaccgggggctgcgagcggg

SEQ ID NO: 439916 - DNA, 3058 bp, Homo sapiens
tctgtggtaagcccagagcctcttttattctggactatcacttactggctttctcttcactggtcaagcaagttcctatttaaaacccccaaataggtagcttcttattctctgataatcttcttctcacttttcagtgttacatatttatttcattgcacattttatatttttatttcagaaggccctgaagtgggacaggaaatgaactgtaatcttaattttttaaataatgaaaattcatgtaagttgggttttgtccttttccttgacaggatgtcttcatcacattttgccagtcgacacaggaaggatataagtactgaaatgattagaactaaaattgctcataggaaatcactgtctcagaaagaaaatagacataaggaatacgaacgaaatagacactttggtttgaaagatgtaaacattccaaccttggaaggtagaattcttgttgaattagatgagacatctcaagggcttgttccagaaaagaccaatgttaagccaagggcaatgaaaactattctaggtgatcaacgaaaacagatgctccaaaaatacaaagaagaaaagcaacttcaaaaattgaaagagcagagagagaaagctaaacgaggaatatttaaagtgggtcgttatagacctgatatgccttgttttcttttatcaaaccagaatgctgtgaaagctgagccaaaaaaggctattccatcttctgtacggattacaaggtcaaaggccaaagaccaaatggagcagactaagattgataacgagagtgatgttcgagcaatccgacctggtccaagacaaacttctgaaaagaaagtgtcagacaaagagaaaaaagttgtgcagcctgtaatgcccacgtcgttgagaatgactcgatcagctactcaagcagcaaagcaggttcccagaacagtctcatctaccacagcaagaaagccagtcacaagagctgctaatgaaaacgaaccagaaggaaaggtgccaagtaaaggaagacctgccaaaaatgtagaaacaaaacccgacaagggtatttcttgtaaagtcgatagtgaagaaaatactttgaattcacaaactaatgcaacaagtggaatgaatccagatggagtcttatcaaaaatggaaaacttacctgagataaatactgcaaaaataaaagggaagaattcctttgcacctaaggattttatgtttcagccactggatggtctgaagacctatcaagtaacacctatgactcccagaagtgccaatgcttttttgacacccagttacacctggactcctttaaaaacagaagttgatgagtctcaagcaacaaaagaaattttggcacaaaaatgtaaaacttactctaccaagacaatacagcaagattcaaataaattgccatgtcctttgggtcctctaactgtttggcatgaagaacatgttttaaataaaaatgaagctactactaaaaatttaaatggccttccaataaaagaagtcccatcacttgaaagaaatgaaggtcgaattgctcagccccaccatggtgtgccatatttcagaaatatcctccagtcagaaactgagaaattaacttcacattgcttcgagtgggacaggaaacttgaattggacattccagatgatgctaaagatcttattcgcacagcagttggtcaaacaagactccttatgaaggaaaggtttaaacagtttgaaggactggttgatgattgtgaatataaacgaggtataaaggagactacctgtacagatctggatggattttgggatatggttagttttcagatagaagatgtaatccacaaattcaacaatctgatcaaacttgaggaatctgggtggcaagtcaataataatatgaatcataatatgaacaaaaatgtctttaggaaaaaagttgtctcaggtatagcaagtaaaccaaaacaggatgatgctggaagaattgcagcgagaaatcgcctagctgccataaaaaatgcaatgagagagagaattaggcaggaagaatgtgctgaaacagcagtttctgtgataccaaaggaagttgataaaatagtgttcgatgctggatttttcagagttgaaagtcctgttaaattattctcaggactttctgtctcttctgaaggcccttctcaaagacttggaacacctaagtctgtcaacaaagctgtatctcagagtagaaatgagatgggcattccacaacaaactacatcaccagaaaatgccggtcctcagaatacgaaaagtgaacatgtgaagaagactttgtttttgagtattcctgaaagcaggagcagcatagaagatgctcagtgtcctggattaccagatttaattgaagaaaatcatgttgtaaataagacagacttgaaggtggattgtttatccagtgagagaatgagtttgcctcttcttgctggtggagtagcagatgatattaatactaacaaaaaagaaggaatttcagatgttgtggaaggaatggaactgaattcttcaattacatcacaggatgttttgatgagtagccctgaaaaaaatacagcttcacaaaatagcatcttagaagaaggggaaactaaaatttctcagtcagaactatttgataataaaagtctcactactgaatgccaccttcttgattcaccaggtctaaactgcagtaatccatttactcagctggagaggagacatcaagaacatgccagacacatttcttttggtggtaacctgattactttttcacctctacaaccaggagaattttgaatttaaaaataaatccaaacattttccttcatattatcaatgcttatatattccttagactattgaaattttggagaaaatgtatttgtgttcacttctatagcatataatgttttaatattctgtgttcatcaaagtgtattttagatatactctttctcaagggaagtggggatattttgtacattttcaacacagaataaaaaatgtactgtgccttgcctctcttgtttaaaaggaa

SEQ ID NO: 439917 - DNA, 2150 bp, Homo sapiens
gtcgcaacgatcacccaaagatctttgagcatcaccgtgatgcataatgagccaggcagagagctgaaatgaaaacgaaccagaaggaaaggtgccaagtaaaggaagacctgccaaaaatgtagaaacaaaacccgacaagggtatttcttgtaaagtcgatagtgaagaaaatactttgaattcacaaactaatgcaacaagtggaatgaatccagatggagtcttatcaaaaatggaaaacttacctgagataaatactgcaaaaataaaagggaagaattcctttgcacctaaggattttatgtttcagccactggatggtctgaagacctatcaagtaacacctatgactcccagaagtgccaatgcttttttgacacccagttacacctggactcctttaaaaacagaagttgatgagtctcaagcaacaaaagaaattttggcacaaaaatgtaaaacttactctaccaagacaatacagcaagattcaaataaattgccatgtcctttgggtcctctaactgtttggcatgaagaacatgttttaaataaaaatgaagctactactaaaaatttaaatggccttccaataaaagaagtcccatcacttgaaagaaatgaaggtcgaattgctcagccccaccatggtgtgccatatttcagaaatatcctccagtcagaaactgagaaattaacttcacattgcttcgagtgggacaggaaacttgaattggacattccagatgatgctaaagatcttattcgcacagcagttggtcaaacaagactccttatgaaggaaaggtttaaacagtttgaaggactggttgatgattgtgaatataaacgaggtataaaggagactacctgtacagatctggatggattttgggatatggttagttttcagatagaagatgtaatccacaaattcaacaatctgatcaaacttgaggaatctgggtggcaagtcaataataatatgaatcataatatgaacaaaaatgtctttaggaaaaaagttgtctcaggtatagcaagtaaaccaaaacaggatgatgctggaagaattgcagcgagaaatcgcctagctgccataaaaaatgcaatgagagagagaattaggcaggaagaatgtgctgaaacagcagtttctgtgataccaaaggaagttgataaaatagtgttcgatgctggatttttcagagttgaaagtcctgttaaattattctcaggactttctgtctcttctgaaggcccttctcaaagacttggaacacctaagtctgtcaacaaagctgtatctcagagtagaaatgagatgggcattccacaacaaactacatcaccagaaaatgccggtcctcagaatacgaaaagtgaacatgtgaagaagactttgtttttgagtattcctgaaagcaggagcagcatagaagatgctcagtgtcctggattaccagatttaattgaagaaaatcatgttgtaaataagacagacttgaaggtggattgtttatccagtgagagaatgagtttgcctcttcttgctggtggagtagcagatgatattaatactaacaaaaaagaaggaatttcagatgttgtggaaggaatggaactgaattcttcaattacatcacaggatgttttgatgagtagccctgaaaaaaatacagcttcacaaaatagcatcttagaagaaggggaaactaaaatttctcagtcagaactatttgataataaaagtctcactactgaatgccaccttcttgattcaccaggtctaaactgcagtaatccatttactcagctggagaggagacatcaagaacatgccagacacatttcttttggtggtaacctgattactttttcacctctacaaccaggagaattttgaatttaaaaataaatccaaacattttccttcatattatcaatgcttatatattccttagactattgaaattttggagaaaatgtatttgtgttcacttctatagcatataatgttttaatattctgtgttcatcaaagtgtattttagatatactctttctcaagggaagtggggatattttgtacattttcaacacagaataaaaaatgtactgtgccttgcctctcttgtttaaaaggaa

SEQ ID NO: 439918 - DNA, 3090 bp, Homo sapiens
agcaaaccaatcgcaagcctcgttgagtggaaggggtgggatcttccccggaagtgttggttaaagcccctccaatcagcggctcggtgcggcaagtttgaatttcgtggaggctcgggttgtgagggttcctgcttcggagtcggcggtggtcgtccagaccgagtgttctttactttttgtttggttgaggtttcacgctagaaggtggctcaggatgtcttcatcacattttgccagtcgacacaggaaggatataagtactgaaatgattagaactaaaattgctcataggaaatcactgtctcagaaagaaaatagacataaggaatacgaacgaaatagacactttggtttgaaagatgtaaacattccaaccttggaaggtagaattcttgttgaattagatgagacatctcaagggcttgttccagaaaagaccaatgttaagccaagggcaatgaaaactattctaggtgatcaacgaaaacagatgctccaaaaatacaaagaagaaaagcaacttcaaaaattgaaagagcagagagagaaagctaaacgaggaatatttaaagtgggtcgttatagacctgatatgccttgttttcttttatcaaaccagaatgctgtgaaagctgagccaaaaaaggctattccatcttctgtacggattacaaggtcaaaggccaaagaccaaatggagcagactaagattgataacgagagtgatgttcgagcaatccgacctggtccaagacaaacttctgaaaagaaagtgtcagacaaagagaaaaaagttgtgcagcctgtaatgcccacgtcgttgagaatgactcgatcagctactcaagcagcaaagcaggttcccagaacagtctcatctaccacagcaagaaagccagtcacaagagctgctaatgaaaacgaaccagaaggaaaggtgccaagtaaaggaagacctgccaaaaatgtagaaacaaaacccgacaagggtatttcttgtaaagtcgatagtgaagaaaatactttgaattcacaaactaatgcaacaagtggaatgaatccagatggagtcttatcaaaaatggaaaacttacctgagataaatactgcaaaaataaaagggaagaattcctttgcacctaaggattttatgtttcagccactggatggtctgaagacctatcaagtaacacctatgactcccagaagtgccaatgcttttttgacacccagttacacctggactcctttaaaaacagaagttgatgagtctcaagcaacaaaagaaattttggcacaaaaatgtaaaacttactctaccaagacaatacagcaagattcaaataaattgccatgtcctttgggtcctctaactgtttggcatgaagaacatgttttaaataaaaatgaagctactactaaaaatttaaatggccttccaataaaagaagtcccatcacttgaaagaaatgaaggtcgaattgctcagccccaccatggtgtgccatatttcagaaatatcctccagtcagaaactgagaaattaacttcacattgcttcgagtgggacaggaaacttgaattggacattccagatgatgctaaagatcttattcgcacagcagttggtcaaacaagactccttatgaaggaaaggtttaaacagtttgaaggactggttgatgattgtgaatataaacgaggtataaaggagactacctgtacagatctggatggattttgggatatggttagttttcagatagaagatgtaatccacaaattcaacaatctgatcaaacttgaggaatctgggtggcaagtcaataataatatgaatcataatatgaacaaaaatgtctttaggaaaaaagttgtctcaggtatagcaagtaaaccaaaacaggatgatgctggaagaattgcagcgagaaatcgcctagctgccataaaaaatgcaatgagagagagaattaggcaggaagaatgtgctgaaacagcagtttctgtgataccaaaggaagttgataaaatagtgttcgatgctggatttttcagagttgaaagtcctgttaaattattctcaggactttctgtctcttctgaaggcccttctcaaagacttggaacacctaagtctgtcaacaaagctgtatctcagagtagaaatgagatgggcattccacaacaaactacatcaccagaaaatgccggtcctcagaatacgaaaagtgaacatgtgaagaagactttgtttttgagtattcctgaaagcaggagcagcatagaagatgctcagtgtcctggattaccagatttaattgaagaaaatcatgttgtaaataagacagacttgaaggtggattgtttatccagtgagagaatgagtttgcctcttcttgctggtggagtagcagatgatattaatactaacaaaaaagaaggaatttcagatgttgtggaaggaatggaactgaattcttcaattacatcacaggatgttttgatgagtagccctgaaaaaaatacagcttcacaaaatagcatcttagaagaaggggaaactaaaatttctcagtcagaactatttgataataaaagtctcactactgaatgccaccttcttgattcagtgggatcttgctatgttgctcgggctggtcttgaagtcctgggttcaagtgatcctaccacctcagcctcccgagtagctgggactacagccaggtctaaactgcagtaatccatttactcagctggagaggagacatcaagaacatgccagacacatttcttttggtggtaacctgattactttttcacctctacaaccaggagaattttgaatttaaaaataaatccaaacattttccttcatattatcaatgcttatatattccttagactattgaaattttggagaaaatgtatttgtgttcacttctatagcatataatgttttaatattctgtgttcatcaaagtgtattttagatatactctttctcaagggaagtggggatattttgtacattttcaacacagaataaaaaatgtactgtgccttgcctctcttgtttaaaaggaa

SEQ ID NO: 439919 - DNA, 3210 bp, Homo sapiens
agcaaaccaatcgcaagcctcgttgagtggaaggggtgggatcttccccggaagtgttggttaaagcccctccaatcagcggctcggtgcggcaagtttgaatttcgtggaggctcgggttgtgagggttcctgcttcggagtcggcggtggtcgtccagaccgagtgttctttactttttgtttggttgaggtttcacgctagaaggtggctcaggatgtcttcatcacattttgccagtcgacacaggaaggatataagtactgaaatgattagaactaaaattgctcataggaaatcactgtctcagaaagaaaatagacataaggaatacgaacgaaatagacactttggtttgaaagatgtaaacattccaaccttggaaggtagaattcttgttgaattagatgagacatctcaagggcttgttccagaaaagaccaatgttaagccaagggcaatgaaaactattctaggtgatcaacgaaaacagatgctccaaaaatacaaagaagaaaagcaacttcaaaaattgaaagagcagagagagaaagctaaacgaggaatatttaaagtgggtcgttatagacctgatatgccttgttttcttttatcaaaccagaatgctgtgaaagctgagccaaaaaaggctattccatcttctgtacggattacaaggtcaaaggccaaagaccaaatggagcagactaagattgataacgagagtgatgttcgagcaatccgacctggtccaagacaaacttctgaaaagaaagtgtcagacaaagagaaaaaagttgtgcagcctgtaatgcccacgtcgttgagaatgactcgatcagctactcaagcagcaaagcaggttcccagaacagtctcatctaccacagcaagaaagccagtcacaagagctgctaatgaaaacgaaccagaaggaaaggtgccaagtaaaggaagacctgccaaaaatgtagaaacaaaacccgacaagggtatttcttgtaaagtcgatagtgaagaaaatactttgaattcacaaactaatgcaacaagtggaatgaatccagatggagtcttatcaaaaatggaaaacttacctgagataaatactgcaaaaataaaagggaagaattcctttgcacctaaggattttatgtttcagccactggatggtctgaagacctatcaagtaacacctatgactcccagaagtgccaatgcttttttgacacccagttacacctggactcctttaaaaacagaagttgatgagtctcaagcaacaaaagaaattttggcacaaaaatgtaaaacttactctaccaagacaatacagcaagattcaaataaattgccatgtcctttgggtcctctaactgtttggcatgaagaacatgttttaaataaaaatgaagctactactaaaaatttaaatggccttccaataaaagaagtcccatcacttgaaagaaatgaaggtcgaattgctcagccccaccatggtgtgccatatttcagaaatatcctccagtcagaaactgagaaattaacttcacattgcttcgagtgggacaggaaacttgaattggacattccagatgatgctaaagatcttattcgcacagcagttggtcaaacaagactccttatgaaggaaaggtttaaacagtttgaaggactggttgatgattgtgaatataaacgaggtataaaggagactacctgtacagatctggatggattttgggatatggttagttttcagatagaagatgtaatccacaaattcaacaatctgatcaaacttgaggaatctgggtggcaagtcaataataatatgaatcataatatgaacaaaaatgtctttaggaaaaaagttgtctcaggtatagcaagtaaaccaaaacaggatgatgctggaagaattgcagcgagaaatcgcctagctgccataaaaaatgcaatgagagagagaattaggcaggaagaatgtgctgaaacagcagtttctgtgataccaaaggaagttgataaaatagtgttcgatgctggatttttcagagttgaaagtcctgttaaattattctcaggactttctgtctcttctgaaggcccttctcaaagacttggaacacctaagtctgtcaacaaagctgtatctcagagtagaaatgagatgggcattccacaacaaactacatcaccagaaaatgccggtcctcagaatacgaaaagtgaacatgtgaagaagactttgtttttgagtattcctgaaagcaggagcagcatagaagatgctcagtgtcctggattaccagatttaattgaagaaaatcatgttgtaaataagacagacttgaaggtggattgtttatccagtgagagaatgagtttgcctcttcttgctggtggagtagcagatgatattaatactaacaaaaaagaaggaatttcagatgttgtggaaggaatggaactgaattcttcaattacatcacaggatgttttgatgagtagccctgaaaaaaatacagcttcacaaaatagcatcttagaagaaggggaaactaaaatttctcagtcagaactatttgataataaaagtctcactactgaatgccaccttcttgattcagtgggatcttgctatgttgctcgggctggtcttgaagtcctgggttcaagtgatcctaccacctcagcctcccgagtagctgggactacaggtgtgcaccaccgcacccggtttatttttgttattaattaatccactatagaatgttgaagaattaattggtgaaactcttgatggatactttactgacttctctggatttgttctccagccaggtctaaactgcagtaatccatttactcagctggagaggagacatcaagaacatgccagacacatttcttttggtggtaacctgattactttttcacctctacaaccaggagaattttgaatttaaaaataaatccaaacattttccttcatattatcaatgcttatatattccttagactattgaaattttggagaaaatgtatttgtgttcacttctatagcatataatgttttaatattctgtgttcatcaaagtgtattttagatatactctttctcaagggaagtggggatattttgtacattttcaacacagaataaaaaatgtactgtgccttgcctctcttgtttaaaaggaa

SEQ ID NO: 439920 - DNA, 730 bp, Homo sapiens
gcttgagtccatttacatattattcacatttttgtacatatattctgaatatacctttccaataaaaaaaactgtaatatacatttgaaataagatctactggaaagtagcataatcattgttgtttataattttattgttatatagggaaaatgtttacgtgtttcttgtttgtttgtttttgaggtgggatcttgctatgttgctcgggctggtcttgaagtcctgggttcaagtgatcctaccacctcagcctcccgagtagctgggactacaggtgtgcaccaccgcacccggtttatttttgttattaattaatccactatagaatgttgaagaattaattggtgaaactcttgatggatactttactgacttctctggatttgttctccagccaggtctaaactgcagtaatccatttactcagctggagaggagacatcaagaacatgccagacacatttcttttggtggtaacctgattactttttcacctctacaaccaggagaattttgaatttaaaaataaatccaaacattttccttcatattatcaatgcttatatattccttagactattgaaattttggagaaaatgtatttgtgttcacttctatagcatataatgttttaatattctgtgttcatcaaagtgtattttagatatactctttctcaagggaagtggggatattttgtacattttcaacacagaataaaaaatgt

SEQ ID NO: 439921 - DNA, 689 bp, Homo sapiens
gaaatgtatgtcataattttagaaatatcctccagtcagaaactgagaaattaacttcacattgcttcgagtgggacaggaaacttgaattggacattccagatgatgctaaagatcttattcgcacagcagttggtcaaacaagactccttatgaaggaaaggtttaaacagtttgaaggactggttgatgattgtgaatataaacgaggtataaaggagactacctgtacagatctggatggattttgggatatggttagttttcagatagaagatgtaatccacaaattcaacaatctgatcaaacttgaggaatctgggtggcaagtcaataataatatgaatcataatatgaacaaaaatgtctttagggtaagtttgtgggttttatatccaatttttttttttttagttaaggaactgttatacatacatccaaatttctaatatagattcttctacttcttgtttttaagttttaaaaacatttaggtttagatttctcattattttacaaagttaagtctttatactacttagagtgtacttgattgcctttgaagaaagagcaaggaaatcgatcaacataaaatttaggatagttatgtctagagagaagaaaggaggggctgtgattgaattggggtacccagagggcttctaagttaccacatactggatatatga

SEQ ID NO: 439922 - DNA, 2986 bp, Homo sapiens
  misc_feature (2912)..(2912): n is a, c, g, or t
agcaaaccaatcgcaagcctcgttgagtggaaggggtgggatcttccccggaagtgttggttaaagcccctccaatcagcggctcggtgcggcaagtttgaatttcgtggaggctcgggttgtgagggttcctgcttcggagtcggcggtggtcgtccagaccgagtgttctttactttttgtttggttgaggtttcacgctagaaggtggctcaggatgtcttcatcacattttgccagtcgacacaggaaggatataagtactgaaatgattagaactaaaattgctcataggaaatcactgtctcagaaagaaaatagacataaggaatacgaacgaaatagacactttggtttgaaagatgtaaacattccaaccttggaaggtagaattcttgttgaattagatgagacatctcaagggcttgttccagaaaagaccaatgttaagccaagggcaatgaaaactattctaggtgatcaacgaaaacagatgctccaaaaatacaaagaagaaaagcaacttcaaaaattgaaagagcagagagagaaagctaaacgaggaatatttaaagtgggtcgttatagacctgatatgccttgttttcttttatcaaaccagaatgctgtgaaagctgagccaaaaaaggctattccatcttctgtacggattacaaggtcaaaggccaaagaccaaatggagcagactaagattgataacgagagtgatgttcgagcaatccgacctggtccaagacaaacttctgaaaagaaagtgtcagacaaagagaaaaaagttgtgcagcctgtaatgcccacgtcgttgagaatgactcgatcagctactcaagcagcaaagcaggttcccagaacagtctcatctaccacagcaagaaagccagtcacaagagctgctaatgaaaacgaaccagaaggaaaggtgccaagtaaaggaagacctgccaaaaatgtagaaacaaaacccgacaagggtatttcttgtaaagtcgatagtgaagaaaatactttgaattcacaaactaatgcaacaagtggaatgaatccagatggagtcttatcaaaaatggaaaacttacctgagataaatactgcaaaaataaaagggaagaattcctttgcacctaaggattttatgtttcagccactggatggtctgaagacctatcaagtaacacctatgactcccagaagtgccaatgcttttttgacacccagttacacctggactcctttaaaaacagaagttgatgagtctcaagcaacaaaagaaattttggcacaaaaatgtaaaacttactctaccaagacaatacagcaagattcaaataaattgccatgtcctttgggtcctctaactgtttggcatgaagaacatgttttaaataaaaatgaagctactactaaaaatttaaatggccttccaataaaagaagtcccatcacttgaaagaaatgaaggtcgaattgctcagccccaccatggtgtgccatatttcagaaatatcctccagtcagaaactgagaaattaacttcacattgcttcgagtgggacaggaaacttgaattggacattccagatgatgctaaagatcttattcgcacagcagttggtcaaacaagactccttatgaaggaaaggtttaaacagtttgaaggactggttgatgattgtgaatataaacgaggtataaaggagactacctgtacagatctggatggattttgggatatggttagttttcagatagaagatgtaatccacaaattcaacaatctgatcaaacttgaggaatctgggtggcaagtcaataataatatgaatcataatatgaacaaaaatgtctttaggaaaaaagttgtctcaggtatagcaagtaaaccaaaacaggatgatgctggaagaattgcagcgagaaatcgcctagctgccataaaaaatgcaatgagagagagaattaggcaggaagaatgtgctgaaacagcagtttctgtgataccaaaggaagttgataaaatagtgttcgatgctggatttttcagagttgaaagtcctgttaaattattctcaggactttctgtctcttctgaaggcccttctcaaagacttggaacacctaagtctgtcaacaaagctgtatctcagagtagaaatgagatgggcattccacaacaaactacatcaccagaaaatgccggtcctcagaatacgaaaagtgaacatgtgaagaagactttgtttttgagtattcctgaaagcaggagcagcatagaagatgctcagtgtcctggattaccagatttaattgaagaaaatcatgttgtaaataagacagacttgaaggtggattgtttatccagtgagagaatgagtttgcctcttcttgctggtggagtagcagatgatattaatactaacaaaaaagaaggaatttcagatgttgtggaaggaatggaactgaattcttcaattacatcacaggatgttttgatgagtagccctgaaaaaaatacagcttcacaaaatagcatcttagaagaaggggaaactaaaatttctcagtcagaactatttgataataaaagtctcactactgaatgccaccttcttgattcaccaggtctaaactgcagtaatccatttactcagctggagaggagacatcaagaacatgccagacacatttcttttggtggtaacctgattactttttcacctctacaaccaggagaattttgaatttaaaaataaatccaaacattttccttcatattatcaatgcttatatattccttagactattgaaattttggagaaaatgtatttgtgttcacttctatagcatataatgttttaatattctgtgttccatccaaaagttgttttttttaanaataatactcttttcctcaaaggggaaaattggggggaataatttttggttaccatttttttcccaacccccta

SEQ ID NO: 439923 - DNA, 203 bp, Homo sapiens
agaggattttctattcttctgaaaggcaaatgacaatatgggtagcttacctgaatcatgtggggatgtgaattccagttttactctccataagactgaatgggacaatggaaatatctgcttactattttagcctgatagcagctgttttttttttttttttttttttttggggggcactcataggcaggcggcgcggggca

SEQ ID NO: 439924 - DNA, 5681 bp, Homo sapiens
agaggattttctattcttctgaaaggcaaatgacaatatgggtagcttacctgaatcatgtggggatgtgaattccagttttactctccataagactgaatgggacaatggaaatatctgcttactattttagcctgatagcagctgtttttttttttttttttttttttttgctttgtttctcagcttcttgctctgcatataggcagcttaggaatggcaaatgccatgacaggaatatcatgtagaatattgagctcactttacagttcattttctctaacctcttgtgagttgactgccttggtagtcctgaactcaattttagtcttcatatcctactgacactgccactgttctaggcagccacagtctgtttagcccatgtacctcaccactagaattgacaaatacgctaagggaaaagagtggccatggctcaccttattatatttctgttctacctgggatcttggccctctagtcctgattgcctttgttgctcttcattgctttaaaacatctgagaggttttgcttgttttgggttctattttattcagctttcatatttgttttcagcaggagagttgagtcgtctttacagatagaagtgtaaattcccatctgctgagtttttaagtcattttttcaagtatattatgttaattgccgtatgctttacattcttcaggatgcagtgtcagccttacttgcaagaacatcagctgagttgttagctgtggaacaagaattagcacaagaagaagaagaagaatcaggacaagaagagccaaggggcccagatggagactggctaacaatgctaagagaggcctctgatgaaattgtggctgaaaaagaggctgaagttaaattgccagaggacagtagctgtacagaagatttaagttcatgcactagtgtgcctgagatgaatgaagacgggaacaggaaagaaagcaactgtgccaaagacctcagaagtcagccacctactagaataccaacactggttgacaaagagacaaacactgatgaagccgctaatgacaatatggcagttcgccccaaagagcgcagcagcctgagctctagacagcatccgtttgtgaggagcagtgtgatagtgcgctcacagaccttttctccaggagagcggaaccagtacatctgcaggttaaatcggagtgacagtgacagttcaaccctggctaaaaaatcactgtttgtgagaaactccaccgaacgccgcagtttgagggtcaaaaggacggtttgccagtcagtccttagaagaacaacacaggaatgcccagtgcggacatctctagacttagaactggaccttcaggcatctctgacccggcagagccgcctcaatgatgagctgcaggcgctgagggacttgcggcagaagctggaggaactgaaagctcagggagagactgaccttccaccaggcgtgctggaggatgagaggttccagaggcttctgaagcaagctgagaagcaggctgaacagtccaaagaagagcagaagcaaggtctgaatgcagagaagttgatgaggcaagtctccaaggacgtgtgtcggctccgggagcagagccagaaggtgcctcggcaggtgcagtccttcagggagaagattgcctacttcaccagagcaaagataagcatcccatccctgccagctgatgatgtgtgattacatgacttaagaaattattttttcatctgttcactttcttagggagggtaaaagactgaagatttgtgtttttgttttggtgtttggttttttttggtaacgtaactgtcaactcttgaagaacttttatttcacatcagattttcaacacattaatttgtaaagtaccttgagtgtaatttttatatgcttaaaaaagaaaaaatcatataagaaagatgggataacctggtacacaaatgttgcccagtatgtgcgcattgccagtggacttcattttgtaaaaatggaatagaggcagtaccccaccatgtgtactgttgagccggctgttgagaaacaacttggttcagccggtggttttgcttctcctttgtgttcctgtgagtaggctgtgccgatggcagcagcgccacgtggtatctgtgcgctggcgaggagaggagcgctttccatttggaggcagtgtgagcacacgctggagtgcagcgttccaaagtccgcccgaaatggatgctgcgtccacggccatcacctgtgcgggaacacctggtttccttaagacaatttcctttttgtccttttatatttttctaaagaaaactaagatataaactaccaagtgctcttaagaataaaaataagaataagaatacaaaggagcactactcttggctacacgaaagatcttgggattcatgacactgagggcagggagaagaaagaacaccagccacgcagagatacaaataagctcatcaaatgagcagctggtttgtctcactcagcctgaatttgcattaagtgttcaaaagtgagtttctggcttgcactagtgttttgccctaaatctaaggatggtgcctagtggtggccctgtgttctgaggacagagagagctggaggggtggagggaaatgcatcggcactcatttggtgtaaccaagaagagggggaaagatgtcttgatagaatcaaagttgccaaaaacaaagaagagtttatcaagcagatttctaacatttagtagaaactacttcatagctctcatttttagggggttctatctataatttatggtaaatagttgggaggcaaagggaagaatgtgtgtggggggattattaatttgaagtataagctaaattgtttattaaaaagcctattttggatgaacaagtttagagagataaactgactaatgtgtcctccagtttagaatttcaccttacccgacccaggcacttcttaaaaacacagatcctcagtgcagctctgccagcatcaaggcttttaaaatatgtagtatttaggccatttaaaccatacttattactcaataacccaagaaacaattttgggttagccatctaatatagcaaataaaatagattttttaaagaaatccaaaattgtcttaaaggaatggaccccttgaagaaaaaaaaaaaaagttttgttcctcagttagaatgctcactagctcactagcaagaatttttattttcttgaaagcaattatatatattttggaaagttcatgttattggaattgaagttcaaattaagcaacttctgagcctagaactttaattactttttcctaaatgtcccaacacttacatacaaatttctttgaagacataactggacatggcagacactgctttgaacaaaaaccagcctagtgaattgactgagtacagtcctttaaggctgcccagttcattctattagatgactaaggaaaactagaaaaagaatacagttcacccttgtcaaggtcaaatgtgaaagacagaagttttatttaatgtagaggtaaatgaaggtgagctgttttcagcatcttagtttgaccatgaaaatgtctatagaattatgtgtagttgttccgtacgattttattttcttcatttatttatttacagtcttatttatgttctgtttaatatatagtttgattctggccattttaaatatttgacacagaagagactatattggaatatttacagctttataagtctttcatcagattagctgttgactttttgtaatacaaaaagtttcagacaagtattaaagaataaaatctgtctcaggctggtagttagcagttgtgaccaagatgcttttggttgttgtatttcacaaaatttcctcatttctaacatgagagatgaacttattttaatataatcctttttctacactttaaaagtcagcaatagtgttatgtatttataggcagcttttaataatcttgtcatatttgtactaacccaaatgattcacagtgacaaaacattttaataacttgatcacaaaaccatatggacaaatatgaattttaatattataaatactatttttaaaaggtagaatttattcgcacagggtaaaaagaatgtaatatttagttctcaagtttgaattatcagtatattattacaattttgtatatcagaatcttaagtgttacaggtacaaaaagaatattgctagccaaatgaacaaagtttagctaaatctctgtagcatgcaaatcaaataaattaaaattttttgctattgctttatctatattgtcttaaatatcaaaagctcaggactgaacttaatatttaatcaggttaaattctgaacatgtttctgttttaatttgtcttgtttgtaaacgtatgcaaatacatcacatagattaactggtttctgcactttccatgtgtttgtgggtggaaaaaaattcagtggtttttttttaaaaaaaaaagcaaaaacaaagctacatattgcctaatactctatttcagtgtcgtttattgttcagtttatttccctgattggcacaaacacaagagtttccttgaaccatgtaccaagcaaatacaaaatatttcatgaagaaatccccaggctggcagtttgtgatgaatagttcttgttggaactatatgtattgctgataaaaaaggacgaagtattttcattgagcaaataaaatgaagggctccagaatatgtgctctgtggtcgctgcgcctgggctggcagtgtgctccacagagaggcagccgtcccaggaggttatctacccacacaccccagtcctgccctgccgtgccccccacaggctgctcagtgcctgggaagccagaaacgctgcccgtgaaatacagaacacaggatgcagaagcacgtttgtgtggcagagtctacttgaatcatccaaaacccaagatcgccctcctgcctctgacagtatagaaggcgtgactgaatgtggctgccttttgaaaaaggttccatagagacactgaggtctctgattcagaaggagatgatgtgtctacacctttcacctctgaagcttctaaagagctagtaattattttatataataagacgtcatgcattttaaataaatatgcaacaagacctcaggcttattatactaggttatcttaaacacctgaaagaagtaaatgatttgccaaatgattccgctccatatgaataataccttcaaagatacatagagattaatgttttatttaccacttctgtgcaatcgctattttaaaattgagaaaactcatccacagtaatgggtgtcattactattcagtcttgattgattttggtctcagactagaagataaaaatggtttaccagtcttggaaagaaactatagtttaatagccacaggaaaagatgcattttcaaaaatcaaaagcacagtgagatgactagagcgggacatcctaccaaatccagtgttgagcaagcgtctcctgaacagcagacgcttgtcctttctggcttagtgtttcaggttggtgtttctcgtctccagttcttgatgatgatcttgtgtttgtgccactgcgtagtggcccgaagctaggggagcgtggctggagcaggctgcacagtggagcagacaccctcctagcagaagagaa

SEQ ID NO: 439925 - DNA, 4967 bp, Homo sapiens
tgagtctgtttatttcccagataacaacttagcatgcccaggttgcgtgttcatggagcatgcctgcctaccaaaagtgttttgtttttgttttaccataggctaacaatgctaagagaggcctctgatgaaattgtggctgaaaaagaggctgaagttaaattgccagaggacagtagctgtacagaagatttaagttcatgcactagtgtgcctgagatgaatgaagacgggaacaggaaagaaagcaactgtgccaaagacctcagaagtcagccacctactagaataccaacactggttgacaaagagacaaacactgatgaagccgctaatgacaatatggcagttcgccccaaagagcgcagcagcctgagctctagacagcatccgtttgtgaggagcagtgtgatagtgcgctcacagaccttttctccaggagagcggaaccagtacatctgcaggttaaatcggagtgacagtgacagttcaaccctggctaaaaaatcactgtttgtgagaaactccaccgaacgccgcagtttgagggtcaaaaggacggtttgccagtcagtccttagaagaacaacacaggaatgcccagtgcggacatctctagacttagaactggaccttcaggcatctctgacccggcagagccgcctcaatgatgagctgcaggcgctgagggacttgcggcagaagctggaggaactgaaagctcagggagagactgaccttccaccaggcgtgctggaggatgagaggttccagaggcttctgaagcaagctgagaagcaggctgaacagtccaaagaagagcagaagcaaggtctgaatgcagagaagttgatgaggcaagtctccaaggacgtgtgtcggctccgggagcagagccagaaggtgcctcggcaggtgcagtccttcagggagaagattgcctacttcaccagagcaaagataagcatcccatccctgccagctgatgatgtgtgattacatgacttaagaaattattttttcatctgttcactttcttagggagggtaaaagactgaagatttgtgtttttgttttggtgtttggttttttttggtaacgtaactgtcaactcttgaagaacttttatttcacatcagattttcaacacattaatttgtaaagtaccttgagtgtaatttttatatgcttaaaaaagaaaaaatcatataagaaagatgggataacctggtacacaaatgttgcccagtatgtgcgcattgccagtggacttcattttgtaaaaatggaatagaggcagtaccccaccatgtgtactgttgagccggctgttgagaaacaacttggttcagccggtggttttgcttctcctttgtgttcctgtgagtaggctgtgccgatggcagcagcgccacgtggtatctgtgcgctggcgaggagaggagcgctttccatttggaggcagtgtgagcacacgctggagtgcagcgttccaaagtccgcccgaaatggatgctgcgtccacggccatcacctgtgcgggaacacctggtttccttaagacaatttcctttttgtccttttatatttttctaaagaaaactaagatataaactaccaagtgctcttaagaataaaaataagaataagaatacaaaggagcactactcttggctacacgaaagatcttgggattcatgacactgagggcagggagaagaaagaacaccagccacgcagagatacaaataagctcatcaaatgagcagctggtttgtctcactcagcctgaatttgcattaagtgttcaaaagtgagtttctggcttgcactagtgttttgccctaaatctaaggatggtgcctagtggtggccctgtgttctgaggacagagagagctggaggggtggagggaaatgcatcggcactcatttggtgtaaccaagaagagggggaaagatgtcttgatagaatcaaagttgccaaaaacaaagaagagtttatcaagcagatttctaacatttagtagaaactacttcatagctctcatttttagggggttctatctataatttatggtaaatagttgggaggcaaagggaagaatgtgtgtggggggattattaatttgaagtataagctaaattgtttattaaaaagcctattttggatgaacaagtttagagagataaactgactaatgtgtcctccagtttagaatttcaccttacccgacccaggcacttcttaaaaacacagatcctcagtgcagctctgccagcatcaaggcttttaaaatatgtagtatttaggccatttaaaccatacttattactcaataacccaagaaacaattttgggttagccatctaatatagcaaataaaatagattttttaaagaaatccaaaattgtcttaaaggaatggaccccttgaagaaaaaaaaaaaaagttttgttcctcagttagaatgctcactagctcactagcaagaatttttattttcttgaaagcaattatatatattttggaaagttcatgttattggaattgaagttcaaattaagcaacttctgagcctagaactttaattactttttcctaaatgtcccaacacttacatacaaatttctttgaagacataactggacatggcagacactgctttgaacaaaaaccagcctagtgaattgactgagtacagtcctttaaggctgcccagttcattctattagatgactaaggaaaactagaaaaagaatacagttcacccttgtcaaggtcaaatgtgaaagacagaagttttatttaatgtagaggtaaatgaaggtgagctgttttcagcatcttagtttgaccatgaaaatgtctatagaattatgtgtagttgttccgtacgattttattttcttcatttatttatttacagtcttatttatgttctgtttaatatatagtttgattctggccattttaaatatttgacacagaagagactatattggaatatttacagctttataagtctttcatcagattagctgttgactttttgtaatacaaaaagtttcagacaagtattaaagaataaaatctgtctcaggctggtagttagcagttgtgaccaagatgcttttggttgttgtatttcacaaaatttcctcatttctaacatgagagatgaacttattttaatataatcctttttctacactttaaaagtcagcaatagtgttatgtatttataggcagcttttaataatcttgtcatatttgtactaacccaaatgattcacagtgacaaaacattttaataacttgatcacaaaaccatatggacaaatatgaattttaatattataaatactatttttaaaaggtagaatttattcgcacagggtaaaaagaatgtaatatttagttctcaagtttgaattatcagtatattattacaattttgtatatcagaatcttaagtgttacaggtacaaaaagaatattgctagccaaatgaacaaagtttagctaaatctctgtagcatgcaaatcaaataaattaaaattttttgctattgctttatctatattgtcttaaatatcaaaagctcaggactgaacttaatatttaatcaggttaaattctgaacatgtttctgttttaatttgtcttgtttgtaaacgtatgcaaatacatcacatagattaactggtttctgcactttccatgtgtttgtgggtggaaaaaaattcagtggtttttttttaaaaaaaaaagcaaaaacaaagctacatattgcctaatactctatttcagtgtcgtttattgttcagtttatttccctgattggcacaaacacaagagtttccttgaaccatgtaccaagcaaatacaaaatatttcatgaagaaatccccaggctggcagtttgtgatgaatagttcttgttggaactatatgtattgctgataaaaaaggacgaagtattttcattgagcaaataaaatgaagggctccagaatatgtgctctgtggtcgctgcgcctgggctggcagtgtgctccacagagaggcagccgtcccaggaggttatctacccacacaccccagtcctgccctgccgtgccccccacaggctgctcagtgcctgggaagccagaaacgctgcccgtgaaatacagaacacaggatgcagaagcacgtttgtgtggcagagtctacttgaatcatccaaaacccaagatcgccctcctgcctctgacagtatagaaggcgtgactgaatgtggctgccttttgaaaaaggttccatagagacactgaggtctctgattcagaaggagatgatgtgtctacacctttcacctctgaagcttctaaagagctagtaattattttatataataagacgtcatgcattttaaataaatatgcaacaagacctcaggcttattatactaggttatcttaaacacctgaaagaagtaaatgatttgccaaatgattccgctccatatgaataataccttcaaagatacatagagattaatgttttatttaccacttctgtgcaatcgctattttaaaattgagaaaactcatccacagtaatgggtgtcattactattcagtcttgattgattttggtctcagactagaagataaaaatggtttaccagtcttggaaagaaactatagtttaatagccacaggaaaagatgcattttcaaaaatcaaaagcacagtgagatgactagagcgggacatcctaccaaatccagtgttgagcaagcgtctcctgaacagcagacgcttgtcctttctggcttagtgtttcaggttggtgtttctcgtctccagttcttgatgatgatcttgtgtttgtgccactgcgtagtggcccgaagctaggggagcgtggctggagcaggctgcacagtggagcagacaccctcctagcagaagagaa

SEQ ID NO: 439926 - DNA, 4284 bp, Homo sapiens
aagggaacttacgggcttggtctgtaggtgacttccgtgatccagagctgctgttctccttgataccccccctttaagcaggcagaggctctcctgattttaaatggagttctgcgtaaggaaaagagcttctacctgtgcttgcagagacatcactgccactgcaggtcttggggactgttttaatggtcccagagtatttttagcatcatatataagtcaatttatttctcaccccaactctagggagaagattgcctacttcaccagagcaaagataagcatcccatccctgccagctgatgatgtgtgattacatgacttaagaaattattttttcatctgttcactttcttagggagggtaaaagactgaagatttgtgtttttgttttggtgtttggttttttttggtaacgtaactgtcaactcttgaagaacttttatttcacatcagattttcaacacattaatttgtaaagtaccttgagtgtaatttttatatgcttaaaaaagaaaaaatcatataagaaagatgggataacctggtacacaaatgttgcccagtatgtgcgcattgccagtggacttcattttgtaaaaatggaatagaggcagtaccccaccatgtgtactgttgagccggctgttgagaaacaacttggttcagccggtggttttgcttctcctttgtgttcctgtgagtaggctgtgccgatggcagcagcgccacgtggtatctgtgcgctggcgaggagaggagcgctttccatttggaggcagtgtgagcacacgctggagtgcagcgttccaaagtccgcccgaaatggatgctgcgtccacggccatcacctgtgcgggaacacctggtttccttaagacaatttcctttttgtccttttatatttttctaaagaaaactaagatataaactaccaagtgctcttaagaataaaaataagaataagaatacaaaggagcactactcttggctacacgaaagatcttgggattcatgacactgagggcagggagaagaaagaacaccagccacgcagagatacaaataagctcatcaaatgagcagctggtttgtctcactcagcctgaatttgcattaagtgttcaaaagtgagtttctggcttgcactagtgttttgccctaaatctaaggatggtgcctagtggtggccctgtgttctgaggacagagagagctggaggggtggagggaaatgcatcggcactcatttggtgtaaccaagaagagggggaaagatgtcttgatagaatcaaagttgccaaaaacaaagaagagtttatcaagcagatttctaacatttagtagaaactacttcatagctctcatttttagggggttctatctataatttatggtaaatagttgggaggcaaagggaagaatgtgtgtggggggattattaatttgaagtataagctaaattgtttattaaaaagcctattttggatgaacaagtttagagagataaactgactaatgtgtcctccagtttagaatttcaccttacccgacccaggcacttcttaaaaacacagatcctcagtgcagctctgccagcatcaaggcttttaaaatatgtagtatttaggccatttaaaccatacttattactcaataacccaagaaacaattttgggttagccatctaatatagcaaataaaatagattttttaaagaaatccaaaattgtcttaaaggaatggaccccttgaagaaaaaaaaaaaaagttttgttcctcagttagaatgctcactagctcactagcaagaatttttattttcttgaaagcaattatatatattttggaaagttcatgttattggaattgaagttcaaattaagcaacttctgagcctagaactttaattactttttcctaaatgtcccaacacttacatacaaatttctttgaagacataactggacatggcagacactgctttgaacaaaaaccagcctagtgaattgactgagtacagtcctttaaggctgcccagttcattctattagatgactaaggaaaactagaaaaagaatacagttcacccttgtcaaggtcaaatgtgaaagacagaagttttatttaatgtagaggtaaatgaaggtgagctgttttcagcatcttagtttgaccatgaaaatgtctatagaattatgtgtagttgttccgtacgattttattttcttcatttatttatttacagtcttatttatgttctgtttaatatatagtttgattctggccattttaaatatttgacacagaagagactatattggaatatttacagctttataagtctttcatcagattagctgttgactttttgtaatacaaaaagtttcagacaagtattaaagaataaaatctgtctcaggctggtagttagcagttgtgaccaagatgcttttggttgttgtatttcacaaaatttcctcatttctaacatgagagatgaacttattttaatataatcctttttctacactttaaaagtcagcaatagtgttatgtatttataggcagcttttaataatcttgtcatatttgtactaacccaaatgattcacagtgacaaaacattttaataacttgatcacaaaaccatatggacaaatatgaattttaatattataaatactatttttaaaaggtagaatttattcgcacagggtaaaaagaatgtaatatttagttctcaagtttgaattatcagtatattattacaattttgtatatcagaatcttaagtgttacaggtacaaaaagaatattgctagccaaatgaacaaagtttagctaaatctctgtagcatgcaaatcaaataaattaaaattttttgctattgctttatctatattgtcttaaatatcaaaagctcaggactgaacttaatatttaatcaggttaaattctgaacatgtttctgttttaatttgtcttgtttgtaaacgtatgcaaatacatcacatagattaactggtttctgcactttccatgtgtttgtgggtggaaaaaaattcagtggtttttttttaaaaaaaaaagcaaaaacaaagctacatattgcctaatactctatttcagtgtcgtttattgttcagtttatttccctgattggcacaaacacaagagtttccttgaaccatgtaccaagcaaatacaaaatatttcatgaagaaatccccaggctggcagtttgtgatgaatagttcttgttggaactatatgtattgctgataaaaaaggacgaagtattttcattgagcaaataaaatgaagggctccagaatatgtgctctgtggtcgctgcgcctgggctggcagtgtgctccacagagaggcagccgtcccaggaggttatctacccacacaccccagtcctgccctgccgtgccccccacaggctgctcagtgcctgggaagccagaaacgctgcccgtgaaatacagaacacaggatgcagaagcacgtttgtgtggcagagtctacttgaatcatccaaaacccaagatcgccctcctgcctctgacagtatagaaggcgtgactgaatgtggctgccttttgaaaaaggttccatagagacactgaggtctctgattcagaaggagatgatgtgtctacacctttcacctctgaagcttctaaagagctagtaattattttatataataagacgtcatgcattttaaataaatatgcaacaagacctcaggcttattatactaggttatcttaaacacctgaaagaagtaaatgatttgccaaatgattccgctccatatgaataataccttcaaagatacatagagattaatgttttatttaccacttctgtgcaatcgctattttaaaattgagaaaactcatccacagtaatgggtgtcattactattcagtcttgattgattttggtctcagactagaagataaaaatggtttaccagtcttggaaagaaactatagtttaatagccacaggaaaagatgcattttcaaaaatcaaaagcacagtgagatgactagagcgggacatcctaccaaatccagtgttgagcaagcgtctcctgaacagcagacgcttgtcctttctggcttagtgtttcaggttggtgtttctcgtctccagttcttgatgatgatcttgtgtttgtgccactgcgtagtggcccgaagctaggggagcgtggctggagcaggctgcacagtggagcagacaccctcctagcagaagagaa

SEQ ID NO: 439927 - DNA, 2365 bp, Homo sapiens
agaggattttctattcttctgaaaggcaaatgacaatatgggtagcttacctgaatcatgtggggatgtgaattccagttttactctccataagactgaatgggacaatggaaatatctgcttactattttagcctgatagcagctgtttttttttttttttttttttttttgctttgtttctcagcttcttgctctgcatataggcagcttaggaatggcaaatgccatgacaggaatatcatgtagaatattgagctcactttacagttcattttctctaacctcttgtgagttgactgccttggtagtcctgaactcaattttagtcttcatatcctactgacactgccactgttctaggcagccacagtctgtttagcccatgtacctcaccactagaattgacaaatacgctaagggaaaagagtggccatggctcaccttattatatttctgttctacctgggatcttggccctctagtcctgattgcctttgttgctcttcattgctttaaaacatctgagaggttttgcttgttttgggttctattttattcagctttcatatttgttttcagcaggagagttgagtcgtctttacagatagaagtgtaaattcccatctgctgagtttttaagtcattttttcaagtatattatgttaattgccgtatgctttacattcttcaggatgcagtgtcagccttacttgcaagaacatcagctgagttgttagctgtggaacaagaattagcacaagaagaagaagaagaatcaggacaagaagagccaaggggcccagatggagactggctaacaatgctaagagaggcctctgatgaaattgtggctgaaaaagaggctgaagttaaattgccagaggacagtagctgtacagaagatttaagttcatgcactagtgtgcctgagatgaatgaagacgggaacaggaaagaaagcaactgtgccaaagacctcagaagtcagccacctactagaataccaacactggttgacaaagagacaaacactgatgaagccgctaatgacaatatggcagttcgccccaaagagcgcagcagcctgagctctagacagcatccgtttgtgaggagcagtgtgatagtgcgctcacagaccttttctccaggagagcggaaccagtacatctgcaggttaaatcggagtgacagtgacagttcaaccctggctaaaaaatcactgtttgtgagaaactccaccgaacgccgcagtttgagggtcaaaaggacggtttgccagtcagtccttagaagaacaacacaggaatgcccagtgcggacatctctagacttagaactggaccttcaggcatctctgacccggcagagccgcctcaatgatgagctgcaggcgctgagggacttgcggcagaagctggaggaactgaaagctcagggagagactgaccttccaccaggcgtgctggaggatgagaggttccagaggcttctgaagcaagctgagaagcaggctgaacagtccaaagaagagcagaagcaaggtctgaatgcagagaagttgatgaggcaagtctccaaggacgtgtgtcggctccgggagcagagccagaaggtgcctcggcaggtgcagtccttcagggagaagattgcctacttcaccagagcaaagataagcatcccatccctgccagctgatgatgtgtgattacatgacttaagaaattattttttcatctgttcactttcttagggagggtaaaagactgaagatttgtgtttttgttttggtgtttggttttttttggtaacgtaactgtcaactcttgaagaacttttatttcacatcagattttcaacacattaatttgtaaagtaccttgagtgtaatttttatatgcttaaaaaagaaaaaatcatataagaaagatgggataacctggtacacaaatgttgcccagtatgtgcgcattgccagtggacttcattttgtaaaaatggaatagaggcagtaccccaccatgtgtactgttgagccggctgttgagaaacaacttggttcagccggtggttttgcttctcctttgtgttcctgtgagtaggctgtgccgatggcagcagcgccacgtggtatctgtgcgctggcgaggagaggagcgctttccatttggaggcagtgtgagcacacgctggagtgcagcgttccaaagtccgcccgaaatggatgctgcgtccacggccatcacctgtgcgggaacacctggtttccttaagacaatttcctttttgtccttttatatttttctaaagaaaactaagatataaactaccaagtgctcttaagaataaaaataagaataaga

SEQ ID NO: 439928 - DNA, 518 bp, Homo sapiens
tcagaaagttgaataaagtttaatgatgatatgtacccaaataggattctttatagaatcactttaaatctaaaccttcatttttatgttcaaccctttggaggcagcacctctatttatggtgcttgttggacagatatcacacggcctgctgtgcagaacttcctaagaacttagtacaaaaccattcttggtagaaaactgaagaacaattctccccagaagtacttcagaagtactatagtctgtaatgcaaagcctttctcttaggagtggccatagtgctccatgagtctctgttgtaacattagatattttttctttcttagaagaaaggagcataatgtttacacatctttcagctcctgacaaattgttaacttctcttataggttgacaaagagacaaacactgatgaagccgctaatgacaatatggcagttcgccccaaagagcgcagcagcctgagctctagacagcatccgtttgtgaggagcagtgtgatagtgcgctcacag

SEQ ID NO: 439929 - DNA, 5715 bp, Homo sapiens
agcctcccagtctctttcagaggataaagaccttaatgaatgtgctagggagccattatatgaaggaactgcagatgtggaaaaatcattaccaaaaagaagagtgatccacttgcttggggagaaaaccacttgtgtgtcggctgctgtgtctgatgagtctgtggctggagacagtggggtctatgaagctttcgtgaaacaacctagtgaaatggaagatgtcacatacagtgaagaggatgtagccattgtagagaccgcccaggttcagataggactcagatacaatgcaaaaagttcaagtttcatggtgattatagcacagctccgaaaccttcatgccttcttgatacctcatacttcaaaagtatattttagggttgccgttcttccttcctcaactgatgtcagctgtctgtttcgcacaaaagttcatccgcccacagaatccattttattcaatgatgtgttcagagtcgccatttcccaaacagccttacaacagaagacactgagggtagacctttgctctgtcagtaaacaccgaagggaagaatgcctggctggaactcagatcagcctggcagatttaccattttccagtgaggttttcactctatggtataacttgcttccttccaagcaaatgccttgcaaaaagaatgaagaaaatgaggactctgtatttcaaccaaaccagccgttagtagattctatagacttggatgcagtgtcagccttacttgcaagaacatcagctgagttgttagctgtggaacaagaattagcacaagaagaagaagaagaatcaggacaagaagagccaaggggcccagatggagactggctaacaatgctaagagaggcctctgatgaaattgtggctgaaaaagaggctgaagttaaattgccagaggacagtagctgtacagaagatttaagttcatgcactagtgtgcctgagatgaatgaagacgggaacaggaaagaaagcaactgtgccaaagacctcagaagtcagccacctactagaataccaacactggttgacaaagagacaaacactgatgaagccgctaatgacaatatggcagttcgccccaaagagcgcagcagcctgagctctagacagcatccgtttgtgaggagcagtgtgatagtgcgctcacagaccttttctccaggagagcggaaccagtacatctgcaggttaaatcggagtgacagtgacagttcaaccctggctaaaaaatcactgtttgtgagaaactccaccgaacgccgcagtttgagggtcaaaaggacggtttgccagtcagtccttagaagaacaacacaggaatgcccagtgcggacatctctagacttagaactggaccttcaggcatctctgacccggcagagccgcctcaatgatgagctgcaggcgctgagggacttgcggcagaagctggaggaactgaaagctcagggagagactgaccttccaccaggcgtgctggaggatgagaggttccagaggcttctgaagcaagctgagaagcaggctgaacagtccaaagaagagcagaagcaaggtctgaatgcagagaagttgatgaggcaagtctccaaggacgtgtgtcggctccgggagcagagccagaaggtgcctcggcaggtgcagtccttcagggagaagattgcctacttcaccagagcaaagataagcatcccatccctgccagctgatgatgtgtgattacatgacttaagaaattattttttcatctgttcactttcttagggagggtaaaagactgaagatttgtgtttttgttttggtgtttggttttttttggtaacgtaactgtcaactcttgaagaacttttatttcacatcagattttcaacacattaatttgtaaagtaccttgagtgtaatttttatatgcttaaaaaagaaaaaatcatataagaaagatgggataacctggtacacaaatgttgcccagtatgtgcgcattgccagtggacttcattttgtaaaaatggaatagaggcagtaccccaccatgtgtactgttgagccggctgttgagaaacaacttggttcagccggtggttttgcttctcctttgtgttcctgtgagtaggctgtgccgatggcagcagcgccacgtggtatctgtgcgctggcgaggagaggagcgctttccatttggaggcagtgtgagcacacgctggagtgcagcgttccaaagtccgcccgaaatggatgctgcgtccacggccatcacctgtgcgggaacacctggtttccttaagacaatttcctttttgtccttttatatttttctaaagaaaactaagatataaactaccaagtgctcttaagaataaaaataagaataagaatacaaaggagcactactcttggctacacgaaagatcttgggattcatgacactgagggcagggagaagaaagaacaccagccacgcagagatacaaataagctcatcaaatgagcagctggtttgtctcactcagcctgaatttgcattaagtgttcaaaagtgagtttctggcttgcactagtgttttgccctaaatctaaggatggtgcctagtggtggccctgtgttctgaggacagagagagctggaggggtggagggaaatgcatcggcactcatttggtgtaaccaagaagagggggaaagatgtcttgatagaatcaaagttgccaaaaacaaagaagagtttatcaagcagatttctaacatttagtagaaactacttcatagctctcatttttagggggttctatctataatttatggtaaatagttgggaggcaaagggaagaatgtgtgtggggggattattaatttgaagtataagctaaattgtttattaaaaagcctattttggatgaacaagtttagagagataaactgactaatgtgtcctccagtttagaatttcaccttacccgacccaggcacttcttaaaaacacagatcctcagtgcagctctgccagcatcaaggcttttaaaatatgtagtatttaggccatttaaaccatacttattactcaataacccaagaaacaattttgggttagccatctaatatagcaaataaaatagattttttaaagaaatccaaaattgtcttaaaggaatggaccccttgaagaaaaaaaaaaaaagttttgttcctcagttagaatgctcactagctcactagcaagaatttttattttcttgaaagcaattatatatattttggaaagttcatgttattggaattgaagttcaaattaagcaacttctgagcctagaactttaattactttttcctaaatgtcccaacacttacatacaaatttctttgaagacataactggacatggcagacactgctttgaacaaaaaccagcctagtgaattgactgagtacagtcctttaaggctgcccagttcattctattagatgactaaggaaaactagaaaaagaatacagttcacccttgtcaaggtcaaatgtgaaagacagaagttttatttaatgtagaggtaaatgaaggtgagctgttttcagcatcttagtttgaccatgaaaatgtctatagaattatgtgtagttgttccgtacgattttattttcttcatttatttatttacagtcttatttatgttctgtttaatatatagtttgattctggccattttaaatatttgacacagaagagactatattggaatatttacagctttataagtctttcatcagattagctgttgactttttgtaatacaaaaagtttcagacaagtattaaagaataaaatctgtctcaggctggtagttagcagttgtgaccaagatgcttttggttgttgtatttcacaaaatttcctcatttctaacatgagagatgaacttattttaatataatcctttttctacactttaaaagtcagcaatagtgttatgtatttataggcagcttttaataatcttgtcatatttgtactaacccaaatgattcacagtgacaaaacattttaataacttgatcacaaaaccatatggacaaatatgaattttaatattataaatactatttttaaaaggtagaatttattcgcacagggtaaaaagaatgtaatatttagttctcaagtttgaattatcagtatattattacaattttgtatatcagaatcttaagtgttacaggtacaaaaagaatattgctagccaaatgaacaaagtttagctaaatctctgtagcatgcaaatcaaataaattaaaattttttgctattgctttatctatattgtcttaaatatcaaaagctcaggactgaacttaatatttaatcaggttaaattctgaacatgtttctgttttaatttgtcttgtttgtaaacgtatgcaaatacatcacatagattaactggtttctgcactttccatgtgtttgtgggtggaaaaaaattcagtggtttttttttaaaaaaaaaagcaaaaacaaagctacatattgcctaatactctatttcagtgtcgtttattgttcagtttatttccctgattggcacaaacacaagagtttccttgaaccatgtaccaagcaaatacaaaatatttcatgaagaaatccccaggctggcagtttgtgatgaatagttcttgttggaactatatgtattgctgataaaaaaggacgaagtattttcattgagcaaataaaatgaagggctccagaatatgtgctctgtggtcgctgcgcctgggctggcagtgtgctccacagagaggcagccgtcccaggaggttatctacccacacaccccagtcctgccctgccgtgccccccacaggctgctcagtgcctgggaagccagaaacgctgcccgtgaaatacagaacacaggatgcagaagcacgtttgtgtggcagagtctacttgaatcatccaaaacccaagatcgccctcctgcctctgacagtatagaaggcgtgactgaatgtggctgccttttgaaaaaggttccatagagacactgaggtctctgattcagaaggagatgatgtgtctacacctttcacctctgaagcttctaaagagctagtaattattttatataataagacgtcatgcattttaaataaatatgcaacaagacctcaggcttattatactaggttatcttaaacacctgaaagaagtaaatgatttgccaaatgattccgctccatatgaataataccttcaaagatacatagagattaatgttttatttaccacttctgtgcaatcgctattttaaaattgagaaaactcatccacagtaatgggtgtcattactattcagtcttgattgattttggtctcagactagaagataaaaatggtttaccagtcttggaaagaaactatagtttaatagccacaggaaaagatgcattttcaaaaatcaaaagcacagtgagatgactagagcgggacatcctaccaaatccagtgttgagcaagcgtctcctgaacagcagacgcttgtcctttctggcttagtgtttcaggttggtgtttctcgtctccagttcttgatgatgatcttgtgtttgtgccactgcgtagtggcccgaagctaggggagcgtggctggagcaggctgcacagtggagcagacaccctcctagcagaagagaa

SEQ ID NO: 439930 - DNA, 5613 bp, Homo sapiens
agaggattttctattcttctgaaaggcaaatgacaatatgggtagcttacctgaatcatgtggggatgtgaattccagttttactctccataagactgaatgggacaatggaaatatctgcttactattttagcctgatagcagctgtttttttttttttttttttttttttgctttgtttctcagcttcttgctctgcatataggcagcttaggaatggcaaatgccatgacaggaatatcatgtagaatattgagctcactttacagttcattttctctaacctcttgtgagttgactgccttggtagtcctgaactcaattttagtcttcatatcctactgacactgccactgttctaggcagccacagtctgtttagcccatgtacctcaccactagaattgacaaatacgctaagggaaaagagtggccatggctcaccttattatatttctgttctacctgggatcttggccctctagtcctgattgcctttgttgctcttcattgctttaaaacatctgagaggttttgcttgttttgggttctattttattcagctttcatatttgttttcagcaggagagttgagtcgtctttacagatagaagtgtaaattcccatctgctgagtttttaagtcattttttcaagtatattatgttaattgccgtatgctttacattcttcaggatgcagtgtcagccttacttgcaagaacatcagctgagttgttagctgtggaacaagaattagcacaagaagaagaagaagaatcaggacaagaagagccaaggggcccagatggagactggctaacaatgctaagagaggcctctgatgaaattgtggctgaaaaagaggctgaagttaaattgccagaggacagtagctgtacagaagatttaagttcatgcactagtgtgcctgagatgaatgaagacgggaacaggaaagaaagcaactgtgccaaagacctcagaagtcagccacctactagaataccaacactggttgacaaagagacaaacactgatgaagccgctaatgacaatatggcagttcgccccaaagagcgcagcagcctgagctctagacagcatccgtttgtgaggagcagtgtgatagtgcgctcacagaccttttctccaggagagcggaaccagtacatctgcaggttaaatcggagtgacagtgacagttcaaccctggctaaaaaatcactgtttgtgagaaactccaccgaacgccgcagtttgagggtcaaaaggacggtttgccagtcagtccttagaagaacaacacaggaatgcccagtgcggacatctctagacttagaactggaccttcaggcatctctgacccggcagagccgcctcaatgatgagctgcaggcgctgagggacttgcggcagaagctggaggaactgaaagctcagggagagactgaccttccaccaggcgtgctggaggatgagaggttccagaggcttctgaagcaagctgagaagcaggctgaacagtccaaagaagagcagaagcaaggtctgaatgcagagaagttgatgaggcaagtctccaaggacgtgtgtcggctccgggagcagagccagaaggtgcctcggcaggtgcagtccttcagggagaagattgcctacttcaccagagcaaagataagcatcccatccctgccagctgatgatgtgtgattacatgacttaagaaattattttttcatctgttcactttcttagggagggtaaaagactgaagatttgtgtttttgttttggtgtttggttttttttggtaacgtaactgtcaactcttgaagaacttttatttcacatcagattttcaacacattaatttgtaaagtaccttgagtgtaatttttatatgcttaaaaaagaaaaaatcatataagaaagatgggataacctggtacacaaatgttgcccagtatgtgcgcattgccagtggacttcattttgtaaaaatggaatagaggcagtaccccaccatgtgtactgttgagccggctgttgagaaacaacttggttcagccggtggttttgcttctcctttgtgttcctgtgagtaggctgtgccgatggcagcagcgccacgtggtatctgtgcgctggcgaggagaggagcgctttccatttggaggcagtgtgagcacacgctggagtgcagcgttccaaagtccgcccgaaatggatgctgcgtccacggccatcacctgtgcgggaacacctggtttccttaagacaatttcctttttgtccttttatatttttctaaagaaaactaagatataaactaccaagtgctcttaagaataaaaataagaataagaatacaaaggagcactactcttggctacacgaaagatcttgggattcatgacactgagggcagggagaagaaagaacaccagccacgcagagatacaaataagctcatcaaatgagcagctggtttgtctcactcagcctgaatttgcattaagtgttcaaaagtgagtttctggcttgcactagtgttttgccctaaatctaaggatggtgcctagtggtggccctgtgttctgaggacagagagagctggaggggtggagggaaatgcatcggcactcatttggtgtaaccaagaagagggggaaagatgtcttgatagaatcaaagttgccaaaaacaaagaagagtttatcaagcagatttctaacatttagtagaaactacttcatagctctcatttttagggggttctatctataatttatggtaaatagttgggaggcaaagggaagaatgtgtgtggggggattattaatttgaagtataagctaaattgtttattaaaaagcctattttggatgaacaagtttagagagataaactgactaatgtgtcctccagtttagaatttcaccttacccgacccaggcacttcttaaaaacacagatcctcagtgcagctctgccagcatcaaggcttttaaaatatgtagtatttaggccatttaaaccatacttattactcaataacccaagaaacaattttgggttagccatctaatatagcaaataaaatagattttttaaagaaatccaaaattgtcttaaaggaatggaccccttgaagaaaaaaaaaaaaagttttgttcctcagttagaatgctcactagctcactagcaagaatttttattttcttgaaagcaattatatatattttggaaagttcatgttattggaattgaagttcaaattaagcaacttctgagcctagaactttaattactttttcctaaatgtcccaacacttacatacaaatttctttgaagacataactggacatggcagacactgctttgaacaaaaaccagcctagtgaattgactgagtacagtcctttaaggctgcccagttcattctattagatgactaaggaaaactagaaaaagaatacagttcacccttgtcaaggtcaaatgtgaaagacagaagttttatttaatgtagaggtaaatgaaggtgagctgttttcagcatcttagtttgaccatgaaaatgtctatagaattatgtgtagttgttccgtacgattttattttcttcatttatttatttacagtcttatttatgttctgtttaatatatagtttgattctggccattttaaatatttgacacagaagagactatattggaatatttacagctttataagtctttcatcagattagctgttgactttttgtaatacaaaaagtttcagacaagtattaaagaataaaatctgtctcaggctggtagttagcagttgtgaccaagatgcttttggttgttgtatttcacaaaatttcctcatttctaacatgagagatgaacttattttaatataatcctttttctacactttaaaagtcagcaatagtgttatgtatttataggcagcttttaataatcttgtcatatttgtactaacccaaatgattcacagtgacaaaacattttaataacttgatcacaaaaccatatggacaaatatgaattttttctcaagtttgaattatcagtatattattacaattttgtatatcagaatcttaagtgttacaggtacaaaaagaatattgctagccaaatgaacaaagtttagctaaatctctgtagcatgcaaatcaaataaattaaaattttttgctattgctttatctatattgtcttaaatatcaaaagctcaggactgaacttaatatttaatcaggttaaattctgaacatgtttctgttttaatttgtcttgtttgtaaacgtatgcaaatacatcacatagattaactggtttctgcactttccatgtgtttgtgggtggaaaaaaattcagtggtttttttttaaaaaaaaaagcaaaaacaaagctacatattgcctaatactctatttcagtgtcgtttattgttcagtttatttccctgattggcacaaacacaagagtttccttgaaccatgtaccaagcaaatacaaaatatttcatgaagaaatccccaggctggcagtttgtgatgaatagttcttgttggaactatatgtattgctgataaaaaaggacgaagtattttcattgagcaaataaaatgaagggctccagaatatgtgctctgtggtcgctgcgcctgggctggcagtgtgctccacagagaggcagccgtcccaggaggttatctacccacacaccccagtcctgccctgccgtgccccccacaggctgctcagtgcctgggaagccagaaacgctgcccgtgaaatacagaacacaggatgcagaagcacgtttgtgtggcagagtctacttgaatcatccaaaacccaagatcgccctcctgcctctgacagtatagaaggcgtgactgaatgtggctgccttttgaaaaaggttccatagagacactgaggtctctgattcagaaggagatgatgtgtctacacctttcacctctgaagcttctaaagagctagtaattattttatataataagacgtcatgcattttaaataaatatgcaacaagacctcaggcttattatactaggttatcttaaacacctgaaagaagtaaatgatttgccaaatgattccgctccatatgaataataccttcaaagatacatagagattaatgttttatttaccacttctgtgcaatcgctattttaaaattgagaaaactcatccacagtaatgggtgtcattactattcagtcttgattgattttggtctcagactagaagataaaaatggtttaccagtcttggaaagaaactatagtttaatagccacaggaaaagatgcattttcaaaaatcaaaagcacagtgagatgactagagcgggacatcctaccaaatccagtgttgagcaagcgtctcctgaacagcagacgcttgtcctttctggcttagtgtttcaggttggtgtttctcgtctccagttcttgatgatgatcttgtgtttgtgccactgcgtagtggcccgaagctaggggagcgtggctggagcaggctgcacagtggagcagacaccctcctagcagaagagaa

SEQ ID NO: 439931 - DNA, 328 bp, Homo sapiens
cttaggccctggcttctagggtgcaaggaagcaccatccatcatgcgccaggaaggaggggaagtggggtaaccactgcctgtataaccagggtgttcgtcattccgtttctaactatccagacggtttgccagtcagtccttagaagaacaacacaggaatgcccagtgcggacatctctagacttagaactggaccttcaggcatctctgacccggcagagccgcctcaatgatgagctgcaggcgctgagggacttgcggcagaagctggaggaactgaaagctcagggagagactgaccttccaccaggcgtgctggaggatga

SEQ ID NO: 439932 - DNA, 3133 bp, Homo sapiens
cgcccgccccggccggagccgccatgtaaccggcgccgcccggagcccgagccgcgcgggccccagcgacccgcccgccatgggggacgaggacgacgatgagagctgcgccgtggagctgcggatcacagaagccaacctgaccgggcacgaggagaaggtgagcgtggagaacttcgagctgctcaaggtgctgggcacgggagcctacggcaaggtgttcctggtgcggaaggcgggcgggcacgacgcggggaagctgtacgccatgaaggtgctgcgcaaggcggcgctggtgcagcgcgccaagacgcaggagcacacgcgcaccgagcgctcggtgctggagctggtgcgccaggcgcccttcctggtcacgctgcactacgctttccagacggatgccaagctgcacctcatcctggactatgtgagcggcggggagatgttcacccacctctaccagcgccagtacttcaaggaggctgaggtgcgcgtgtatgggggtgagatcgtgctggccctggaacacctgcacaagctcggcatcatttaccgagacctgaaactggagaatgtgctgctggactccgagggccacattgtcctcacggacttcgggctgagcaaggagttcctgacggaggagaaagagcggaccttctccttctgtggcaccatcgagtacatggcccccgaaatcatccgtagcaagacggggcatggcaaggctgtggactggtggagcctgggcatcttgctcttcgagctgctgacgggggcctcgcccttcaccctggagggcgagaggaacacgcaggctgaggtgtctcgacggatcctgaagtgctcccctcccttcccccctcggatcgggcccgtggcgcaggacctgctgcagcggctgctttgtaaggatcctaagaagcgattgggcgcggggccccagggggcacaagaagtccggaaccatcccttcttccagggcctcgattgggtggctctggctgccaggaagattccagccccattccggccccaaatccgctcagagctggatgtgggcaactttgcggaggaattcactcggctggagcctgtctactcaccccctggcagccccccacctggggacccccgaatctttcagggatactcctttgtggcaccctccattctctttgaccacaacaacgcggtgatgaccgatgggctggaagcgcctggtgctggagaccggccaggtcgggcagcggtggccaggagcgctatgatgcaggactcgcccttcttccagcagtacgagctggacctgcgggagcctgcgctgggccagggcagcttttctgtgtgtcgccgctgccgccagcgccagagcggccaggagttcgcagtcaagatcctcagtcgcaggctggaggcgaacacgcagcgcgaagtggctgccctgcgcctgtgccagtcacaccccaacgtggtgaatctgcacgaggtgcatcacgaccagctgcacacgtacctggtcctggagctgctgcggggcggggagctgctggagcacatccgcaagaagcggcacttcagcgagtcggaagcaagccagatcctgcgcagcctcgtgtcggccgtgagcttcatgcacgaggaggcgggcgtggtgcaccgcgacctcaagccggagaacatcctgtacgccgacgacacgcccggggccccggtgaaaatcatcgacttcgggttcgcgcggttgcggccgcagagtcccggggtgcccatgcagacgccctgcttcacgctgcagtacgctgcccccgagctgctggcgcagcagggctacgacgagtcctgcgacctctggagcctgggcgtcattctgtacatgatgctgtcggggcaggtccccttccagggggcctctggccagggcgggcagagccaggcggccgagatcatgtgcaaaatccgcgaggggcgcttctcccttgacggggaggcctggcagggtgtatccgaggaagccaaggagctggtccgagggctcctgaccgtggaccccgccaagcggctgaagctcgagggactgcggggcagctcgtggctgcaggacggcagcgcgcgctcctcgcccccgctccggacgcccgacgtgctcgagtcctctgggcccgcagtgcgctcgggtctcaacgccaccttcatggcattcaaccggggcaagcgggagggcttcttcctgaagagcgtggagaatgcacccctggccaagcggcggaagcagaagctgcggagcgccaccgcctcccgccggggctcccctgcaccagccaacccgggccgagcccccgtcgcctccaaaggggccccccgccgagccaacggccccctgcccccctcctaatccccaccactgtgacccccttccctcataggggctgtgacctgggagcccggctcactcccggaggcctctgcctgcggctgacctgatccccaagggactgtcctttcctctcctaccccaccccactcccagacagagcagaagtatttttataagcagagaattttttatgtcttaccagatagagttgcagggaagggggggcctgctggggagtggggtttggggggccctctcccaggacactgcctcttctgggcagaaggcccctccagggggactgctccaacaggaaagagcccctcccccacttctaagcactgagttaggagtgctaactcctaaactgggaccccctaccctgttctcccctgaggccccgttcctgggaggggcacccctcaactgtcactttatggactgtctgtgcaattacgtccaccaaagacccgtgttgggggtactgaaggagaggccctgggggaccctctgaagcatttctgcctcactttatgtcatctgcttctcccctgttggggctaaggaaggagataggtggctcctaaaagaggaggccatcttctcacccaccccttcctctttggcacagctactcctggctgggggtggggccttgggggtctgggctgggcatccatggtcactgcctcagcccagccaggctgtgcctttgactttaaaataaaagtccacccagtgctgtgtgtggca

SEQ ID NO: 439933 - DNA, 3115 bp, Homo sapiens
  misc_feature (22)..(22): n is a, c, g, or t
tagcggctgtacggccgggatntttgggatcggcgccgcccggagcccgagccgcgcgggccccagcgacccgcccgccatgggggacgaggacgacgatgagagctgcgccgtggagctgcggatcacagaagccaacctgaccgggcacgaggagaaggtgagcgtggagaacttcgagctgctcaaggtgctgggcacgggagcctacggcaaggtgttcctggtgcggaaggcgggcgggcacgacgcggggaagctgtacgccatgaaggtgctgcgcaaggcggcgctggtgcagcgcgccaagacgcaggagcacacgcgcaccgagcgctcggtgctggagctggtgcgccaggcgcccttcctggtcacgctgcactacgctttccagacggatgccaagctgcacctcatcctggactatgtgagcggcggggagatgttcacccacctctaccagcgccagtacttcaaggaggctgaggtgcgcgtgtatgggggtgagatcgtgctggccctggaacacctgcacaagctcggcatcatttaccgagacctgaaactggagaatgtgctgctggactccgagggccacattgtcctcacggacttcgggctgagcaaggagttcctgacggaggagaaagagcggaccttctccttctgtggcaccatcgagtacatggcccccgaaatcatccgtagcaagacggggcatggcaaggctgtggactggtggagcctgggcatcttgctcttcgagctgctgacgggggcctcgcccttcaccctggagggcgagaggaacacgcaggctgaggtgtctcgacggatcctgaagtgctcccctcccttcccccctcggatcgggcccgtggcgcaggacctgctgcagcggctgctttgtaaggatcctaagaagcgattgggcgcggggccccagggggcacaagaagtccggaaccatcccttcttccagggcctcgattgggtggctctggctgccaggaagattccagccccattccggccccaaatccgctcagagctggatgtgggcaactttgcggaggaattcactcggctggagcctgtctactcaccccctggcagccccccacctggggacccccgaatctttcagggatactcctttgtggcaccctccattctctttgaccacaacaacgcggtgatgaccgatgggctggaagcgcctggtgctggagaccggccaggtcgggcagcggtggccaggagcgctatgatgcagcagtacgagctggacctgcgggagcctgcgctgggccagggcagcttttctgtgtgtcgccgctgccgccagcgccagagcggccaggagttcgcagtcaagatcctcagtcgcaggctggaggcgaacacgcagcgcgaagtggctgccctgcgcctgtgccagtcacaccccaacgtggtgaatctgcacgaggtgcatcacgaccagctgcacacgtacctggtcctggagctgctgcggggcggggagctgctggagcacatccgcaagaagcggcacttcagcgagtcggaagcaagccagatcctgcgcagcctcgtgtcggccgtgagcttcatgcacgaggaggcgggcgtggtgcaccgcgacctcaagccggagaacatcctgtacgccgacgacacgcccggggccccggtgaaaatcatcgacttcgggttcgcgcggttgcggccgcagagtcccggggtgcccatgcagacgccctgcttcacgctgcagtacgctgcccccgagctgctggcgcagcagggctacgacgagtcctgcgacctctggagcctgggcgtcattctgtacatgatgctgtcggggcaggtccccttccagggggcctctggccagggcgggcagagccaggcggccgagatcatgtgcaaaatccgcgaggggcgcttctcccttgacggggaggcctggcagggtgtatccgaggaagccaaggagctggtccgagggctcctgaccgtggaccccgccaagcggctgaagctcgagggactgcggggcagctcgtggctgcaggacggcagcgcgcgctcctcgcccccgctccggacgcccgacgtgctcgagtcctctgggcccgcagtgcgctcgggtctcaacgccaccttcatggcattcaaccggggcaagcgggagggcttcttcctgaagagcgtggagaatgcacccctggccaagcggcggaagcagaagctgcggagcgccaccgcctcccgccggggctcccctgcaccagccaacccgggccgagcccccgtcgcctccaaaggggccccccgccgagccaacggccccctgcccccctcctaatccccaccactgtgacccccttccctcataggggctgtgacctgggagcccggctcactcccggaggcctctgcctgcggctgacctgatccccaagggactgtcctttcctctcctaccccaccccactcccagacagagcagaagtatttttataagcagagaattttttatgtcttaccagatagagttgcagggaagggggggcctgctggggagtggggtttggggggccctctcccaggacactgcctcttctgggcagaaggcccctccagggggactgctccaacaggaaagagcccctcccccacttctaagcactgagttaggagtgctaactcctaaactgggaccccctaccctgttctcccctgaggccccgttcctgggaggggcacccctcaactgtcactttatggactgtctgtgcaattacgtccaccaaagacccgtgttgggggtactgaaggagaggccctgggggaccctctgaagcatttctgcctcactttatgtcatctgcttctcccctgttggggctaaggaaggagataggtggctcctaaaagaggaggccatcttctcacccaccccttcctctttggcacagctactcctggctgggggtggggccttgggggtctgggctgggcatccatggtcactgcctcagcccagccaggctgtgcctttgactttaaaataaaagtccacccagtgctgtgtgtggca

SEQ ID NO: 439934 - DNA, 2736 bp, Homo sapiens
attcagtggctctgccctggagaccccctctacaggcagatgactttctctggggggtctccttatcctgagcagggccaggagctggaggagctggggagggtttcggggaggaagcctcagcacccctcttgctcctaccagctcggcatcatttaccgagacctgaaactggagaatgtgctgctggactccgagggccacattgtcctcacggacttcgggctgagcaaggagttcctgacggaggagaaagagcggaccttctccttctgtggcaccatcgagtacatggcccccgaaatcatccgtagcaagacggggcatggcaaggctgtggactggtggagcctgggcatcttgctcttcgagctgctgacgggggcctcgcccttcaccctggagggcgagaggaacacgcaggctgaggtgtctcgacggatcctgaagtgctcccctcccttcccccctcggatcgggcccgtggcgcaggacctgctgcagcggctgctttgtaaggatcctaagaagcgattgggcgcggggccccagggggcacaagaagtccggaaccatcccttcttccagggcctcgattgggtggctctggctgccaggaagattccagccccattccggccccaaatccgctcagagctggatgtgggcaactttgcggaggaattcactcggctggagcctgtctactcaccccctggcagccccccacctggggacccccgaatctttcagggatactcctttgtggcaccctccattctctttgaccacaacaacgcggtgatgaccgatgggctggaagcgcctggtgctggagaccggccaggtcgggcagcggtggccaggagcgctatgatgcaggactcgcccttcttccagcagtacgagctggacctgcgggagcctgcgctgggccagggcagcttttctgtgtgtcgccgctgccgccagcgccagagcggccaggagttcgcagtcaagatcctcagtcgcaggctggaggcgaacacgcagcgcgaagtggctgccctgcgcctgtgccagtcacaccccaacgtggtgaatctgcacgaggtgcatcacgaccagctgcacacgtacctggtcctggagctgctgcggggcggggagctgctggagcacatccgcaagaagcggcacttcagcgagtcggaagcaagccagatcctgcgcagcctcgtgtcggccgtgagcttcatgcacgaggaggcgggcgtggtgcaccgcgacctcaagccggagaacatcctgtacgccgacgacacgcccggggccccggtgaaaatcatcgacttcgggttcgcgcggttgcggccgcagagtcccggggtgcccatgcagacgccctgcttcacgctgcagtacgctgcccccgagctgctggcgcagcagggctacgacgagtcctgcgacctctggagcctgggcgtcattctgtacatgatgctgtcggggcaggtccccttccagggggcctctggccagggcgggcagagccaggcggccgagatcatgtgcaaaatccgcgaggggcgcttctcccttgacggggaggcctggcagggtgtatccgaggaagccaaggagctggtccgagggctcctgaccgtggaccccgccaagcggctgaagctcgagggactgcggggcagctcgtggctgcaggacggcagcgcgcgctcctcgcccccgctccggacgcccgacgtgctcgagtcctctgggcccgcagtgcgctcgggtctcaacgccaccttcatggcattcaaccggggcaagcgggagggcttcttcctgaagagcgtggagaatgcacccctggccaagcggcggaagcagaagctgcggagcgccaccgcctcccgccggggctcccctgcaccagccaacccgggccgagcccccgtcgcctccaaaggggccccccgccgagccaacggccccctgcccccctcctaatccccaccactgtgacccccttccctcataggggctgtgacctgggagcccggctcactcccggaggcctctgcctgcggctgacctgatccccaagggactgtcctttcctctcctaccccaccccactcccagacagagcagaagtatttttataagcagagaattttttatgtcttaccagatagagttgcagggaagggggggcctgctggggagtggggtttggggggccctctcccaggacactgcctcttctgggcagaaggcccctccagggggactgctccaacaggaaagagcccctcccccacttctaagcactgagttaggagtgctaactcctaaactgggaccccctaccctgttctcccctgaggccccgttcctgggaggggcacccctcaactgtcactttatggactgtctgtgcaattacgtccaccaaagacccgtgttgggggtactgaaggagaggccctgggggaccctctgaagcatttctgcctcactttatgtcatctgcttctcccctgttggggctaaggaaggagataggtggctcctaaaagaggaggccatcttctcacccaccccttcctctttggcacagctactcctggctgggggtggggccttgggggtctgggctgggcatccatggtcactgcctcagcccagccaggctgtgcctttgactttaaaataaaagtccacccagtgctgtgtgtggca

SEQ ID NO: 439935 - DNA, 193 bp, Homo sapiens
tcaccacgcgtgggtctcaggagtgcccctagtggggagggtgagtggttctgtgggagcggaggggtcagcctcggcaccccagcctgggccggcctcaccttcccctcaccctcctagtacatgatgctgtcggggcaggtccccttccagggggcctctggccagggcgggcagagccaggcggccgaga

SEQ ID NO: 439936 - DNA, 329 bp, Homo sapiens
ctgcacacgtacctggtcctggagctgctgcggggcggggagctgctggagcacatccgcaagaagcggcacttcagcgagtcggaagcaagccagatcctgcgcagcctcgtgtcggccgtgagcttcatgcacgaggaggcgggcgtggtgcaccgcgacctcaagccggaggtgggcgagctgcctcggcggcggggcggagcggtggcgccgggggctgcctctgaccactaccccgccgccctcgcaaacatcctgtacgccgacgacacgcccggggccccggtgaaaatcatcgacttcgggttcgcgcggttgcggccgca

SEQ ID NO: 439937 - DNA, 3115 bp, Homo sapiens
cgcccgccccggccggagccgccatgtaaccggcgccgcccggagcccgagccgcgcgggccccagcgacccgcccgccatgggggacgaggacgacgatgagagctgcgccgtggagctgcggatcacagaagccaacctgaccgggcacgaggagaaggtgagcgtggagaacttcgagctgctcaaggtgctgggcacgggagcctacggcaaggtgttcctggtgcggaaggcgggcgggcacgacgcggggaagctgtacgccatgaaggtgctgcgcaaggcggcgctggtgcagcgcgccaagacgcaggagcacacgcgcaccgagcgctcggtgctggagctggtgcgccaggcgcccttcctggtcacgctgcactacgctttccagacggatgccaagctgcacctcatcctggactatgtgagcggcggggagatgttcacccacctctaccagcgccagtacttcaaggaggctgaggtgcgcgtgtatgggggtgagatcgtgctggccctggaacacctgcacaagctcggcatcatttaccgagacctgaaactggagaatgtgctgctggactccgagggccacattgtcctcacggacttcgggctgagcaaggagttcctgacggaggagaaagagcggaccttctccttctgtggcaccatcgagtacatggcccccgaaatcatccgtagcaagacggggcatggcaaggctgtggactggtggagcctgggcatcttgctcttcgagctgctgacgggggcctcgcccttcaccctggagggcgagaggaacacgcaggctgaggtgtctcgacggatcctgaagtgctcccctcccttcccccctcggatcgggcccgtggcgcaggacctgctgcagcggctgctttgtaaggatcctaagaagcgattgggcgcggggccccagggggcacaagaagtccggaaccatcccttcttccagggcctcgattgggtggctctggctgccaggaagattccagccccattccggccccaaatccgctcagagctggatgtgggcaactttgcggaggaattcactcggctggagcctgtctactcaccccctggcagccccccacctggggacccccgaatctttcagggatactcctttgtggcaccctccattctctttgaccacaacaacgcggtgatgaccgatgggctggaagcgcctggtgctggagaccggccaggtcgggcagcggtggccaggagcgctatgatgcagcagtacgagctggacctgcgggagcctgcgctgggccagggcagcttttctgtgtgtcgccgctgccgccagcgccagagcggccaggagttcgcagtcaagatcctcagtcgcaggctggaggcgaacacgcagcgcgaagtggctgccctgcgcctgtgccagtcacaccccaacgtggtgaatctgcacgaggtgcatcacgaccagctgcacacgtacctggtcctggagctgctgcggggcggggagctgctggagcacatccgcaagaagcggcacttcagcgagtcggaagcaagccagatcctgcgcagcctcgtgtcggccgtgagcttcatgcacgaggaggcgggcgtggtgcaccgcgacctcaagccggagaacatcctgtacgccgacgacacgcccggggccccggtgaaaatcatcgacttcgggttcgcgcggttgcggccgcagagtcccggggtgcccatgcagacgccctgcttcacgctgcagtacgctgcccccgagctgctggcgcagcagggctacgacgagtcctgcgacctctggagcctgggcgtcattctgtacatgatgctgtcggggcaggtccccttccagggggcctctggccagggcgggcagagccaggcggccgagatcatgtgcaaaatccgcgaggggcgcttctcccttgacggggaggcctggcagggtgtatccgaggaagccaaggagctggtccgagggctcctgaccgtggaccccgccaagcggctgaagctcgagggactgcggggcagctcgtggctgcaggacggcagcgcgcgctcctcgcccccgctccggacgcccgacgtgctcgagtcctctgggcccgcagtgcgctcgggtctcaacgccaccttcatggcattcaaccggggcaagcgggagggcttcttcctgaagagcgtggagaatgcacccctggccaagcggcggaagcagaagctgcggagcgccaccgcctcccgccggggctcccctgcaccagccaacccgggccgagcccccgtcgcctccaaaggggccccccgccgagccaacggccccctgcccccctcctaatccccaccactgtgacccccttccctcataggggctgtgacctgggagcccggctcactcccggaggcctctgcctgcggctgacctgatccccaagggactgtcctttcctctcctaccccaccccactcccagacagagcagaagtatttttataagcagagaattttttatgtcttaccagatagagttgcagggaagggggggcctgctggggagtggggtttggggggccctctcccaggacactgcctcttctgggcagaaggcccctccagggggactgctccaacaggaaagagcccctcccccacttctaagcactgagttaggagtgctaactcctaaactgggaccccctaccctgttctcccctgaggccccgttcctgggaggggcacccctcaactgtcactttatggactgtctgtgcaattacgtccaccaaagacccgtgttgggggtactgaaggagaggccctgggggaccctctgaagcatttctgcctcactttatgtcatctgcttctcccctgttggggctaaggaaggagataggtggctcctaaaagaggaggccatcttctcacccaccccttcctctttggcacagctactcctggctgggggtggggccttgggggtctgggctgggcatccatggtcactgcctcagcccagccaggctgtgcctttgactttaaaataaaagtccacccagtgctgtgtgtggca

SEQ ID NO: 439938 - DNA, 2959 bp, Homo sapiens
cgcccgccccggccggagccgccatgtaaccggcgccgcccggagcccgagccgcgcgggccccagcgacccgcccgccatgggggacgaggacgacgatgagagctgcgccgtggagctgcggatcacagaagccaacctgaccgggcacgaggagaaggtgagcgtggagaacttcgagctgctcaaggtgctgggcacgggagcctacggcaaggtgttcctggtgcggaaggcgggcgggcacgacgcggggaagctgtacgccatgaaggtgctgcgcaaggcggcgctggtgcagcgcgccaagacgcaggagcacacgcgcaccgagcgctcggtgctggagctggtgcgccaggcgcccttcctggtcacgctgcactacgctttccagacggatgccaagctgcacctcatcctggactatgtgagcggcggggagatgttcacccacctctaccagcgccagtacttcaaggaggctgaggtgcgcgtgtatgggggtgagatcgtgctggccctggaacacctgcacaagctcggcatcatttaccgagacctgaaactggagaatgtgctgctggactccgagggccacattgtcctcacggacttcgggctgagcaaggagttcctgacggaggagaaagagcggaccttctccttctgtggcaccatcgagtacatggcccccgaaatcatccgtagcaagacggggcatggcaaggctgtggactggtggagcctgggcatcttgctcttcgagctgctgacgggggcctcgcccttcaccctggagggcgagaggaacacgcaggctgaggtgtctcgacggatcctgaagtgctcccctcccttcccccctcggatcgggcccgtggcgcaggacctgctgcagcggctgctttgtaaggatcctaagaagcgattgggcgcggggccccagggggcacaagaagtccggaaccatcccttcttccagggcctcgattgggtggctctggctgccaggaagattccagccccattccggccccaaatccgctcagagctggatgtgggcaactttgcggaggaattcactcggctggagcctgtctactcaccccctggcagccccccacctggggacccccgaatctttcagggatactcctttgtggcaccctccattctctttgaccacaacaacgcggtgatgaccgatgggctggaagcgcctggtgctggagaccggccaggtcgggcagcggtggccaggagcgctatgatgcaggactcgcccttcttccagcagtacgagctggacctgcgggagcctgcgctgggccagggcagcttttctgtgtgtcgccgctgccgccagcgccagagcggccaggagttcgcagtcaagatcctcagtcgcaggctggaggcgaacacgcagcgcgaagtggctgccctgcgcctgtgccagtcacaccccaacgtggtgaatctgcacgaggtgcatcacgaccagaacatcctgtacgccgacgacacgcccggggccccggtgaaaatcatcgacttcgggttcgcgcggttgcggccgcagagtcccggggtgcccatgcagacgccctgcttcacgctgcagtacgctgcccccgagctgctggcgcagcagggctacgacgagtcctgcgacctctggagcctgggcgtcattctgtacatgatgctgtcggggcaggtccccttccagggggcctctggccagggcgggcagagccaggcggccgagatcatgtgcaaaatccgcgaggggcgcttctcccttgacggggaggcctggcagggtgtatccgaggaagccaaggagctggtccgagggctcctgaccgtggaccccgccaagcggctgaagctcgagggactgcggggcagctcgtggctgcaggacggcagcgcgcgctcctcgcccccgctccggacgcccgacgtgctcgagtcctctgggcccgcagtgcgctcgggtctcaacgccaccttcatggcattcaaccggggcaagcgggagggcttcttcctgaagagcgtggagaatgcacccctggccaagcggcggaagcagaagctgcggagcgccaccgcctcccgccggggctcccctgcaccagccaacccgggccgagcccccgtcgcctccaaaggggccccccgccgagccaacggccccctgcccccctcctaatccccaccactgtgacccccttccctcataggggctgtgacctgggagcccggctcactcccggaggcctctgcctgcggctgacctgatccccaagggactgtcctttcctctcctaccccaccccactcccagacagagcagaagtatttttataagcagagaattttttatgtcttaccagatagagttgcagggaagggggggcctgctggggagtggggtttggggggccctctcccaggacactgcctcttctgggcagaaggcccctccagggggactgctccaacaggaaagagcccctcccccacttctaagcactgagttaggagtgctaactcctaaactgggaccccctaccctgttctcccctgaggccccgttcctgggaggggcacccctcaactgtcactttatggactgtctgtgcaattacgtccaccaaagacccgtgttgggggtactgaaggagaggccctgggggaccctctgaagcatttctgcctcactttatgtcatctgcttctcccctgttggggctaaggaaggagataggtggctcctaaaagaggaggccatcttctcacccaccccttcctctttggcacagctactcctggctgggggtggggccttgggggtctgggctgggcatccatggtcactgcctcagcccagccaggctgtgcctttgactttaaaataaaagtccacccagtgctgtgtgtggca

SEQ ID NO: 439939 - DNA, 2730 bp, Homo sapiens
  misc_feature (309)..(309): n is a, c, g, or t
  misc_feature (385)..(385): n is a, c, g, or t
gcaaaagatcccggattttccttaaatagaagagaaacatgctatccttctgagacttgaatgagaatgtagctatgctgggtttagggaagcagggtaaggtgataatgcagaaagttgtagttcatggcgagacaaaaagccatgtcatttgggaaaaaggttaagagcacctccaaacgatggtctgtatcacttcacaagaagtctttctcaaggcccccttctgataaagactgagatagcaggcaatcgccttgtccctgctcattggaatggaagatctgcagactgaacaaagctcaagtngttgtcactgtggaaagaaccaagggcatcttcttaagggtcaggacaggatgagaggcctgtacagcccatctgnctttcttctctccaggattctttctgattcagactgaggtgtctcgacggatcctgaagtgctcccctcccttcccccctcggatcgggcccgtggcgcaggacctgctgcagcggctgctttgtaaggatcctaagaagcgattgggcgcggggccccagggggcacaagaagtccggaaccatcccttcttccagggcctcgattgggtggctctggctgccaggaagattccagccccattccggccccaaatccgctcagagctggatgtgggcaactttgcggaggaattcactcggctggagcctgtctactcaccccctggcagccccccacctggggacccccgaatctttcagggatactcctttgtggcaccctccattctctttgaccacaacaacgcggtgatgaccgatgggctggaagcgcctggtgctggagaccggccaggtcgggcagcggtggccaggagcgctatgatgcaggactcgcccttcttccagcagtacgagctggacctgcgggagcctgcgctgggccagggcagcttttctgtgtgtcgccgctgccgccagcgccagagcggccaggagttcgcagtcaagatcctcagtcgcaggctggaggcgaacacgcagcgcgaagtggctgccctgcgcctgtgccagtcacaccccaacgtggtgaatctgcacgaggtgcatcacgaccagctgcacacgtacctggtcctggagctgctgcggggcggggagctgctggagcacatccgcaagaagcggcacttcagcgagtcggaagcaagccagatcctgcgcagcctcgtgtcggccgtgagcttcatgcacgaggaggcgggcgtggtgcaccgcgacctcaagccggagaacatcctgtacgccgacgacacgcccggggccccggtgaaaatcatcgacttcgggttcgcgcggttgcggccgcagagtcccggggtgcccatgcagacgccctgcttcacgctgcagtacgctgcccccgagctgctggcgcagcagggctacgacgagtcctgcgacctctggagcctgggcgtcattctgtacatgatgctgtcggggcaggtccccttccagggggcctctggccagggcgggcagagccaggcggccgagatcatgtgcaaaatccgcgaggggcgcttctcccttgacggggaggcctggcagggtgtatccgaggaagccaaggagctggtccgagggctcctgaccgtggaccccgccaagcggctgaagctcgagggactgcggggcagctcgtggctgcaggacggcagcgcgcgctcctcgcccccgctccggacgcccgacgtgctcgagtcctctgggcccgcagtgcgctcgggtctcaacgccaccttcatggcattcaaccggggcaagcgggagggcttcttcctgaagagcgtggagaatgcacccctggccaagcggcggaagcagaagctgcggagcgccaccgcctcccgccggggctcccctgcaccagccaacccgggccgagcccccgtcgcctccaaaggggccccccgccgagccaacggccccctgcccccctcctaatccccaccactgtgacccccttccctcataggggctgtgacctgggagcccggctcactcccggaggcctctgcctgcggctgacctgatccccaagggactgtcctttcctctcctaccccaccccactcccagacagagcagaagtatttttataagcagagaattttttatgtcttaccagatagagttgcagggaagggggggcctgctggggagtggggtttggggggccctctcccaggacactgcctcttctgggcagaaggcccctccagggggactgctccaacaggaaagagcccctcccccacttctaagcactgagttaggagtgctaactcctaaactgggaccccctaccctgttctcccctgaggccccgttcctgggaggggcacccctcaactgtcactttatggactgtctgtgcaattacgtccaccaaagacccgtgttgggggtactgaaggagaggccctgggggaccctctgaagcatttctgcctcactttatgtcatctgcttctcccctgttggggctaaggaaggagataggtggctcctaaaagaggaggccatcttctcacccaccccttcctctttggcacagctactcctggctgggggtggggccttgggggtctgggctgggcatccatggtcactgcctcagcccagccaggctgtgcctttgactttaaaataaaagtccacccagtgctgtgtgtggca

SEQ ID NO: 439940 - DNA, 4772 bp, Homo sapiens
ggcacgaggaccaaccggttgcttgctgtcccagcggcgccccctcatcaccgtcgccatgcccggaggtctgcttctcggggacgtggctcccaactttgaggccaataccaccgtcggccgcatccgtttccacgactttctgggagactcatggggcattctcttctcccaccctcgggactttaccccagtgtgcaccacagagcttggcagagctgcaaagctggcaccagaatttgccaagaggaatgttaagttgattgccctttcaatagacagtgttgaggaccatcttgcctggagcaaggatatcaatgcttacaattgtgaagagcccacagaaaagttaccttttcccatcatcgatgataggaatcgggagcttgccatcctgttgggcatgctggatccagcagagaaggatgaaaagggcatgcctgtgacagctcgtgtggtgtttgtttttggtcctgataagaagctgaagctgtctatcctctacccagctaccactggcaggaactttgatgagattctcagggtagtcatctctctccagctgacagcagaaaaaagggttgccaccccagttgattggaaggatggggatagtgtgatggtccttccaaccatccctgaagaagaagccaaaaaaacttttcccgaaaggagtcttcaccaaagagctcccatctggcaagaaatacctccgctacacaccccagccttaagtctcttggagaagttggtgctgtgagccagaggatgtcagctgccaattgtgttttcctgcagcaattccataaacacatcctggtgtcatcacagccaaggtttttaggttgctataccaatggcttattaaatgaaaatggcaaaaaaaaaaaaaaaaaaaaaaaaaaaaaaaaaaaaaaaacttggtgaaaaagagcccttgaagctggaagacgggaggtgcggggaatactgttgagttatttgaggacaaaagcatgtcttcccttcctgggtgcattggtttggatgcagcaacagctacagtggagtctgaagagattgcagagctgcaacaggcagtggttgaggaactgggtatctctatggaggaacttcggcatttcatcgatgaggaactggagaagatggattgtgtacagcaacgcaagaagcagctagcagagttagagacatgggtaatacagaaagaatctgaggtggctcacgttgaccaactctttgatgatgcatccagggcagtgactaattgtgagtctttggtgaaggacttctactccaagctgggactacaataccgggacagtagctctgaggacgaatcttcccggcctacagaaataattgagattcctgatgaagatgatgatgtcctcagtattgattcaggtgatgctgggagcagaactccaaaagaccagaagctccgtgaagctatggctgccttaagaaagtcagctcaagatgttcagaagttcatggatgctgtcaacaagaagagcagttcccaggatctgcataaaggaaccttgagtcagatgtctggagaactaagcaaagatggtgacctgatagtcagcatgcgaattctgggcaagaagagaactaagacttggcacaaaggcacccttattgccatccagacagttgggccagggaagaaatacaaggtgaaatttgacaacaaaggaaagagtctactgtcggggaaccatattgcctatgattaccaccctcctgctgacaagctgtatgtgggcagtcgggtggtcgccaaatacaaagatgggaatcaggtctggctctatgctggcattgtagctgagacaccaaacgtcaaaaacaagctcaggtttctcattttctttgatgatggctatgcttcctatgtcacacagtcggaactgtatcccatttgccggccactgaaaaagacttgggaggacatagaagacatctcctgccgtgacttcatagaggagtatgtcactgcctaccccaaccgccccatggtactgctcaagagtggccagcttatcaagactgagtgggaaggcacgtggtggaagtcccgagttgaggaggtggatggcagcctagtcaggatcctcttcctggatgacaaaagatgtgagtggatctatcgaggctctacacggctggagcccatgttcagcatgaaaacatcctcagcctctgcactggagaagaagcaaggacagctcaggacacgtccaaatatgggtgctgtgaggagcaaaggccctgttgtccagtacacacaggatctgaccggtactggaacccagttcaagccagtggaacccccacagcctacagctccacctgccccacctttcccacctgctccacctctatccccccaagcaggtgacagtgacttggaaagccagcttgcccagtcacggaagcaggtagccaaaaagagcacgtcctttcgaccaggatctgtgggctctggtcattcctcccctacatctcctgcactcagtgaaaatgtctctggtgggaaacctgggatcaaccagacatatagatcacctttaggctccacagcctctgccccagcaccctcagcactcccggcccctccagcacccccagtcttccatggcatgctggagcgggccccagcagagccctcctaccgtgctcccatggagaagcttttctacttacctcatgtctgcagctatacctgtctgtctcgagtcagacctatgaggaatgagcagtaccggggcaagaaccctctgctggtcccgttactatatgacttccggcggatgacagcccggcgtcgagttaaccgcaagatgggctttcatgttatctataagacaccttgtggtctctgccttcggacaatgcaggagatagaacgctaccttttcgagactggctgtgacttcctcttcctggagatgttctgtttggatccatatgttcttgtggaccgaaagtttcagccctataagcctttttactatattttggacatcacttatgggaaggaagatgttcccctatcctgtgtcaatgagattgacacaacccctccaccccaggtggcctacagcaaggaacgtatcccgggcaagggtgttttcattaacacaggccctgaatttctggttggctgtgactgcaaggatgggtgtcgggacaagtccaagtgtgcctgccatcaactaactatccaggctacagcctgtaccccaggaggccaaatcaaccctaactctggctaccagtacaagagactagaagagtgtctacccacaggggtatatgagtgtaacaaacgctgcaaatgtgacccaaacatgtgcacaaaccggttggtgcaacatggactacaagttcggctacagctattcaagacacagaacaagggctggggtatccgctgcttggatgacattgccaaaggctcttttgtttgtatttatgcaggcaaaatcctgacagatgactttgcagacaaggagggtctggaaatgggtgatgagtactttgcaaatctggaccatatcgagagcgtggagaacttcaaagaaggatatgagagtgatgccccctgttcctctgacagcagtggtgtagacttgaaggaccaggaagatggcaacagcggtacagaggaccctgaagagtccaatgatgatagctcagatgataacttctgtaaggatgaggacttcagcaccagttcagtgtggcggagctatgctacccggaggcagacccggggccagaaagagaacggactctctgagacaacttccaaggactcccaccccccagatcttggacccccacatattcctgttcctccctcaatccctgtaggtggctgcaatccaccttcctccgaagagacacccaagaacaaggtggcctcatggttgagctgcaatagtgtcagtgaaggtggttttgctgactctgatagccattcatccttcaagactaatgaaggtggggagggccgggctgggggaagccgaatggaggctgagaaggcctccacctcaggactaggcatcaaggatgagggagacatcaaacaggccaagaaagaggacactgacgaccgaaacaagatgtcagtagttactgaaagctctcgaaattacggttacaatccttctcctgtgaagcctgaaggacttcgccgcccacctagtaagactagtatgcatcaaagccgaagactcatggcttctgctcagtccaaccctgatgatgtcctgacactgtccagcagcacagaaagtgagggggaaagtgggaccagccgaaagcccactgctggtcagacttcggctacagcggttgacagtgatgatatccagaccatatcctctggctctgaaggggatgactttgaggacaagaagaacatgactggtccaatgaagcgtcaagtggcagtaaaatcaacccgaggctttgctcttaaatcaacccatgggattgcaattaaatcaaccaacatggcctctgtggacaagggggagagcgcacctgttcgtaagaacacacgccaattctatgatggcgaggagtcttgctacatcattgatgccaagcttgaaggcaacctgggccgctacctcaacgtgagacccctctccccacctctagatgctggattatcccatggtcctcagatttcttttaacatactctataagcccttttcttgttataaactcttgatctcaaag

SEQ ID NO: 439941 - DNA, 1395 bp, Homo sapiens
ggcacgagggccgacccctgagttaggacaaaagcatgtcttcccttcctgggtgcattggtttggatgcagcaacagctacagtggagtctgaagagattgcagagctgcaacaggcagtggttgaggaactgggtatctctatggaggaacttcggcatttcatcgatgaggaactggagaagatggattgtgtacagcaacgcaagaagcagctagcagagttagagacatgggtaatacagaaagaatctgaggtggctcacgttgaccaactctttgatgatgcatccagggcagtgactaattgtgagtctttggtgaaggacttctactccaagctgggactacaataccgggacagtagctctgaggacgaatcttcccggcctacagaaataattgagattcctgatgaagatgatgatgtcctcagtattgattcaggtgatgctgggagcagaactccaaaagaccagaagctccgtgaagctatggctgccttaagaaagtcagctcaagatgttcagaagttcatggatgctgtcaacaagaagagcagttcccaggatctgcataaaggaaccttgagtcagatgtctggagaactaagcaaagatggtgacctgatagtcagcatgcgaattctgggcaagaagagaactaagacttggcacaaaggcacccttattgccatccagacagttgggccagggaagaaatacaaggtgaaatttgacaacaaaggaaagagtctactgtcggggaaccatattgcctatgattaccaccctcctgctgacaagctgtatgtgggcagtcgggtggtcgccaaatacaaagatgggaatcaggtctggctctatgctggcattgtagctgagacaccaaacgtcaaaaacaagctcaggtttctcattttctttgatgatggctatgcttcctatgtcacacagtcggaactgtatcccatttgccggccactgaaaaagacttgggaggacatagaagacatctcctgccgtgacttcatagaggagtatgtcactgcctaccccaaccgccccatggtactgctcaagagtggccagcttatcaagactgagtgggaaggcacgtggtggaagtcccgagttgaggaggtggatggcagcctagtcaggatcctcttcctggtactgttcttctctacaattttggaggcagaggttggtggggggggaacttaagaagcagtaatgaggatggttttatagctattccatagccttcctctttcttatcctcgtatgtgttctcactgtttttggtcaaattttactttgccctttttgttgttcctctgcaggtcattgttgaaaataaattatctgaattataatacgaatctgcatg

SEQ ID NO: 439942 - DNA, 607 bp, Homo sapiens
caagctatccggttcaatagatccactcacttagatcattacctaatttttaatctttatccacaacacattataaatgatgatagcttaagaattataatagttttatggatttttttgtgctctagtgatcataccgtgattgattttattctaacctcctcccagggtatatgagtgtaacaaacgctgcaaatgtgacccaaacatgtgcacaaaccggttggtgcaacatggactacaagttcggctacagctattcaagacacagaacaagggctggggtatccgctgcttggatgacattgccaaaggctcttttgtttgtatttatgcaggttggtgataaaatataagggttgtttcctgagactgggacatggtagggaattgaaccagagacaaattgaacataagaagaaagtgcttgacatgtgaactggagtaagaggaggccagggacttctacaaagaacgtgatgagtgatgtacctgtctagctagaccagagagggacacaagtgtttcacaaataagagaatgaaaagggatgaaattttggacatggtgatatttcagagaacagacatgattatagagtccagtg

SEQ ID NO: 439943 - DNA, 517 bp, Homo sapiens
gtttttttaaaagtagggaggtattggttaaattaagggagaactcctaactctcaagttgagaagaaagaaaaacaggaagaaagtagtggactggattgtcttccctggagtgcatcgtgttgtgatccagagaagtagaagctatgataaaataatttctgtggatcatgttaaatatcataacccccagatctttctgctgtcactcttcttttataggtttctcattttctttgatgatggctatgcttcctatgtcacacagtcggaactgtatcccatttgccggccacgtgagtgttttctcccttattccttagctcagttttctcctctaccttgtatttcttcttaggacatccagttgaaaagccctagtgtttttggtatttcagtctcaaagagcataagtttggttgatgtcttttgctcccaaaggtcagtttggctcccaaaagagatacagttttattgttcatctccaggactgggtctttgtagacaaagagtgaga

SEQ ID NO: 439944 - DNA, 350 bp, Homo sapiens
agtgctacctccacaaacagagagaaaatgttcaagggaagaatccgggctgggacagaacttacttgggactacaactacgaggtgggcagtgtggaaggcaaggagctactctgttgctgtggggccattgaatgcagaggacgtcttctttagaggacagccttcttcccaacccttcttgaactgtcgtttcctcaggaactgggtcttcctgattgttgaaccctgacccgaagtctctgggctagctactccccccagctcctagttgatagaaatgggggttctggaccagatgatccctgtttgtggaggtagcactctgtttgtggagtagcaatgaatcc

SEQ ID NO: 439945 - DNA, 4507 bp, Homo sapiens
cgggcgtttcttttgcttccccttccctctttcacgcttcctcccctccccctcctcccttatcccttcgctttcgctcttttccgtcgaggccgacccctgagttgtgagtctggggtctggttggtgaaaaagagcccttgaagctggaagacgggagaggacaaaagcatgtcttcccttcctgggtgcattggtttggatgcagcaacagctacagtggagtctgaagagattgcagagctgcaacaggcagtggttgaggaactgggtatctctatggaggaacttcggcatttcatcgatgaggaactggagaagatggattgtgtacagcaacgcaagaagcagctagcagagttagagacatgggtaatacagaaagaatctgaggtggctcacgttgaccaactctttgatgatgcatccagggcagtgactaattgtgagtctttggtgaaggacttctactccaagctgggactacaataccgggacagtagctctgaggacgaatcttcccggcctacagaaataattgagattcctgatgaagatgatgatgtcctcagtattgattcaggtgatgctgggagcagaactccaaaagaccagaagctccgtgaagctatggctgccttaagaaagtcagctcaagatgttcagaagttcatggatgctgtcaacaagaagagcagttcccaggatctgcataaaggaaccttgagtcagatgtctggagaactaagcaaagatggtgacctgatagtcagcatgcgaattctgggcaagaagagaactaagacttggcacaaaggcacccttattgccatccagacagttgggccagggaagaaatacaaggtgaaatttgacaacaaaggaaagagtctactgtcggggaaccatattgcctatgattaccaccctcctgctgacaagctgtatgtgggcagtcgggtggtcgccaaatacaaagatgggaatcaggtctggctctatgctggcattgtagctgagacaccaaacgtcaaaaacaagctcaggtttctcattttctttgatgatggctatgcttcctatgtcacacagtcggaactgtatcccatttgccggccactgaaaaagacttgggaggacatagaagacatctcctgccgtgacttcatagaggagtatgtcactgcctaccccaaccgccccatggtactgctcaagagtggccagcttatcaagactgagtgggaaggcacgtggtggaagtcccgagttgaggaggtggatggcagcctagtcaggatcctcttcctggatgacaaaagatgtgagtggatctatcgaggctctacacggctggagcccatgttcagcatgaaaacatcctcagcctctgcactggagaagaagcaaggacagctcaggacacgtccaaatatgggtgctgtgaggagcaaaggccctgttgtccagtacacacaggatctgaccggtactggaacccagttcaagccagtggaacccccacagcctacagctccacctgccccacctttcccacctgctccacctctatccccccaagcaggtgacagtgacttggaaagccagcttgcccagtcacggaagcaggtagccaaaaagagcacgtcctttcgaccaggatctgtgggctctggtcattcctcccctacatctcctgcactcagtgaaaatgtctctggtgggaaacctgggatcaaccagacatatagatcacctttaggctccacagcctctgccccagcaccctcagcactcccggcccctccagcacccccagtcttccatggcatgctggagcgggccccagcagagccctcctaccgtgctcccatggagaagcttttctacttacctcatgtctgcagctatacctgtctgtctcgagtcagacctatgaggaatgagcagtaccggggcaagaaccctctgctggtcccgttactatatgacttccggcggatgacagcccggcgtcgagttaaccgcaagatgggctttcatgttatctataagacaccttgtggtctctgccttcggacaatgcaggagatagaacgctaccttttcgagactggctgtgacttcctcttcctggagatgttctgtttggatccatatgttcttgtggaccgaaagtttcagccctataagcctttttactatattttggacatcacttatgggaaggaagatgttcccctatcctgtgtcaatgagattgacacaacccctccaccccaggtggcctacagcaaggaacgtatcccgggcaagggtgttttcattaacacaggccctgaatttctggttggctgtgactgcaaggatgggtgtcgggacaagtccaagtgtgcctgccatcaactaactatccaggctacagcctgtaccccaggaggccaaatcaaccctaactctggctaccagtacaagagactagaagagtgtctacccacaggggtatatgagtgtaacaaacgctgcaaatgtgacccaaacatgtgcacaaaccggttggtgcaacatggactacaagttcggctacagctattcaagacacagaacaagggctggggtatccgctgcttggatgacattgccaaaggctcttttgtttgtatttatgcaggcaaaatcctgacagatgactttgcagacaaggagggtctggaaatgggtgatgagtactttgcaaatctggaccatatcgagagcgtggagaacttcaaagaaggatatgagagtgatgccccctgttcctctgacagcagtggtgtagacttgaaggaccaggaagatggcaacagcggtacagaggaccctgaagagtccaatgatgatagctcagatgataacttctgtaaggatgaggacttcagcaccagttcagtgtggcggagctatgctacccggaggcagacccggggccagaaagagaacggactctctgagacaacttccaaggactcccaccccccagatcttggacccccacatattcctgttcctccctcaatccctgtaggtggctgcaatccaccttcctccgaagagacacccaagaacaaggtggcctcatggttgagctgcaatagtgtcagtgaaggtggttttgctgactctgatagccattcatccttcaagactaatgaaggtggggagggccgggctgggggaagccgaatggaggctgagaaggcctccacctcaggactaggcatcaaggatgagggagacatcaaacaggccaagaaagaggacactgacgaccgaaacaagatgtcagtagttactgaaagctctcgaaattacggttacaatccttctcctgtgaagcctgaaggacttcgccgcccacctagtaagactagtatgcatcaaagccgaagactcatggcttctgctcagtccaaccctgatgatgtcctgacactgtccagcagcacagaaagtgagggggaaagtgggaccagccgaaagcccactgctggtcagacttcggctacagcggttgacagtgatgatatccagaccatatcctctggctctgaaggggatgactttgaggacaagaagaacatgactggtccaatgaagcgtcaagtggcagtaaaatcaacccgaggctttgctcttaaatcaacccatgggattgcaattaaatcaaccaacatggcctctgtggacaagggggagagcgcacctgttcgtaagaacacacgccaattctatgatggcgaggagtcttgctacatcattgatgccaagcttgaaggcaacctgggccgctacctcaaccacagttgcagccccaacctgtttgtccagaatgtcttcgtggatacccatgatcttcgcttcccctgggtggccttctttgccagcaaaagaatccgggctgggacagaacttacttgggactacaactacgaggtgggcagtgtggaaggcaaggagctactctgttgctgtggggccattgaatgcagaggacgtcttctttagaggacagccttcttcccaacccttcttgaactgtcgtttcctcaggaactgggtcttcctgattgttgaaccctgacccgaagtctctgggctagctactccccccagctcctagttgatagaaatgggggttctggaccagatgatcccttccaatgtggtgctagcaggcaggatcccttctccacctccaaaggccctaaagggtggggagagatcaccactctaacctcggcctgacatccctcccatcccatatttgtccaagtgttcctgcttctaacagactttgttcttagaatggagcctgtgtatctactatctccagtttgtattatttcttgaaagtcttttaacaatatgataaaactaagattgtggttttgtttctctctctcagcccgatactcccaattctggatctttcagtgaggtattatccccatcctcccctgtgggc

SEQ ID NO: 439946 - DNA, 4565 bp, Homo sapiens
cgggcgtttcttttgcttccccttccctctttcacgcttcctcccctccccctcctcccttatcccttcgctttcgctcttttccgtcgaggccgacccctgagttgtgagtctggggtctggttggtgaaaaagagcccttgaagctggaagacgggagaggacaaaagcatgtcttcccttcctgggtgcattggtttggatgcagcaacagctacagtggagtctgaagagattgcagagctgcaacaggcagtggttgaggaactgggtatctctatggaggaacttcggcatttcatcgatgaggaactggagaagatggattgtgtacagcaacgcaagaagcagctagcagagttagagacatgggtaatacagaaagaatctgaggtggctcacgttgaccaactctttgatgatgcatccagggcagtgactaattgtgagtctttggtgaaggacttctactccaagctgggactacaataccgggacagtagctctgaggacgaatcttcccggcctacagaaataattgagattcctgatgaagatgatgatgtcctcagtattgattcaggtgatgctgggagcagaactccaaaagaccagaagctccgtgaagctatggctgccttaagaaagtcagctcaagatgttcagaagttcatggatgctgtcaacaagaagagcagttcccaggatctgcataaaggaaccttgagtcagatgtctggagaactaagcaaagatggtgacctgatagtcagcatgcgaattctgggcaagaagagaactaagacttggcacaaaggcacccttattgccatccagacagttgggccagggaagaaatacaaggtgaaatttgacaacaaaggaaagagtctactgtcggggaaccatattgcctatgattaccaccctcctgctgacaagctgtatgtgggcagtcgggtggtcgccaaatacaaagatgggaatcaggtctggctctatgctggcattgtagctgagacaccaaacgtcaaaaacaagctcaggtttctcattttctttgatgatggctatgcttcctatgtcacacagtcggaactgtatcccatttgccggccactgaaaaagacttgggaggacatagaagacatctcctgccgtgacttcatagaggagtatgtcactgcctaccccaaccgccccatggtactgctcaagagtggccagcttatcaagactgagtgggaaggcacgtggtggaagtcccgagttgaggaggtggatggcagcctagtcaggatcctcttcctggatgacaaaagatgtgagtggatctatcgaggctctacacggctggagcccatgttcagcatgaaaacatcctcagcctctgcactggagaagaagcaaggacagctcaggacacgtccaaatatgggtgctgtgaggagcaaaggccctgttgtccagtacacacaggatctgaccggtactggaacccagttcaagccagtggaacccccacagcctacagctccacctgccccacctttcccacctgctccacctctatccccccaagcaggtgacagtgacttggaaagccagcttgcccagtcacggaagcaggtagccaaaaagagcacgtcctttcgaccaggatctgtgggctctggtcattcctcccctacatctcctgcactcagtgaaaatgtctctggtgggaaacctgggatcaaccagacatatagatcacctttaggctccacagcctctgccccagcaccctcagcactcccggcccctccagcacccccagtcttccatggcatgctggagcgggccccagcagagccctcctaccgtgctcccatggagaagcttttctacttacctcatgtctgcagctatacctgtctgtctcgagtcagacctatgaggaatgagcagtaccggggcaagaaccctctgctggtcccgttactatatgacttccggcggatgacagcccggcgtcgagttaaccgcaagatggacaatgcaggagatagaacgctaccttttcgagactggctgtgacttcctcttcctggagatgttctgtttggatccatatgttcttgtggaccgaaagtttcagccctataagcctttttactatattttggacatcacttatgggaaggaagatgttcccctatcctgtgtcaatgagattgacacaacccctccaccccaggtggcctacagcaaggaacgtatcccgggcaagggtgttttcattaacacaggccctgaatttctggttggctgtgactgcaaggatgggtgtcgggacaagtccaagtgtgcctgccatcaactaactatccaggctacagcctgtaccccaggaggccaaatcaaccctaactctggctaccagtacaagagactagaagagtgtctacccacaggggtatatgagtgtaacaaacgctgcaaatgtgacccaaacatgtgcacaaaccggttggtgcaacatggactacaagttcggctacagctattcaagacacagaacaagggctggggtatccgctgcttggatgacattgccaaaggctcttttgtttgtatttatgcaggcaaaatcctgacagatgactttgcagacaaggagggtctggaaatgggtgatgagtactttgcaaatctggaccatatcgagagcgtggagaacttcaaagaaggatatgagagtgatgccccctgttcctctgacagcagtggtgtagacttgaaggaccaggaagatggcaacagcggtacagaggaccctgaagagtccaatgatgatagctcagatgataacttctgtaaggatgaggacttcagcaccagttcagtgtggcggagctatgctacccggaggcagacccggggccagaaagagaacggactctctgagacaacttccaaggactcccaccccccagatcttggacccccacatattcctgttcctccctcaatccctgtaggtggctgcaatccaccttcctccgaagagacacccaagaacaaggtggcctcatggttgagctgcaatagtgtcagtgaaggtggttttgctgactctgatagccattcatccttcaagactaatgaaggtggggagggccgggctgggggaagccgaatggaggctgagaaggcctccacctcaggactaggcatcaaggatgagggagacatcaaacaggccaagaaagaggacactgacgaccgaaacaagatgtcagtagttactgaaagctctcgaaattacggttacaatccttctcctgtgaagcctgaaggacttcgccgcccacctagtaagactagtatgcatcaaagccgaagactcatggcttctgctcagtccaaccctgatgatgtcctgacactgtccagcagcacagaaagtgagggggaaagtgggaccagccgaaagcccactgctggtcagacttcggctacagcggttgacagtgatgatatccagaccatatcctctggctctgaaggggatgactttgaggacaagaagaacatgactggtccaatgaagcgtcaagtggcagtaaaatcaacccgaggctttgctcttaaatcaacccatgggattgcaattaaatcaaccaacatggcctctgtggacaagggggagagcgcacctgttcgtaagaacacacgccaattctatgatggcgaggagtcttgctacatcattgatgccaagcttgaaggcaacctgggccgctacctcaaccacagttgcagccccaacctgtttgtccagaatgtcttcgtggatacccatgatcttcgcttcccctgggtggccttctttgccagcaaaagaatccgggctgggacagaacttacttgggactacaactacgaggtgggcagtgtggaaggcaaggagctactctgttgctgtggggccattgaatgcagaggacgtcttctttagaggacagccttcttcccaacccttcttgaactgtcgtttcctcaggaactgggtcttcctgattgttgaaccctgacccgaagtctctgggctagctactccccccagctcctagttgatagaaatgggggttctggaccagatgatcccttccaatgtggtgctagcaggcaggatcccttctccacctccaaaggccctaaagggtggggagagatcaccactctaacctcggcctgacatccctcccatcccatatttgtccaagtgttcctgcttctaacagactttgttcttagaatggagcctgtgtatctactatctccagtttgtattatttcttgaaagtcttttaacaatatgataaaactaaaaaaaaagaaaaaaaccggcacattgtcgggaatactcgggaaaccgagaagaaccccacacaataaaatgggggtgccattccacaagcaggaagggattaaaacgacgaggtcctgcaaaacagcggttcaaaaaaaaggggggaatacgggagacgcactgtaggcataaattaacgcgaccgagg

SEQ ID NO: 439947 - DNA, 5254 bp, Homo sapiens
cgggcgtttcttttgcttccccttccctctttcacgcttcctcccctccccctcctcccttatcccttcgctttcgctcttttccgtcgaggccgacccctgagttgtgagtctggggtctggttggtgaaaaagagcccttgaagctggaagacgggagaggacaaaagcatgtcttcccttcctgggtgcattggtttggatgcagcaacagctacagtggagtctgaagagattgcagagctgcaacaggcagtggttgaggaactgggtatctctatggaggaacttcggcatttcatcgatgaggaactggagaagatggattgtgtacagcaacgcaagaagcagctagcagagttagagacatgggtaatacagaaagaatctgaggtggctcacgttgaccaactctttgatgatgcatccagggcagtgactaattgtgagtctttggtgaaggacttctactccaagctgggactacaataccgggacagtagctctgaggacgaatcttcccggcctacagaaataattgagattcctgatgaagatgatgatgtcctcagtattgattcaggtgatgctgggagcagaactccaaaagaccagaagctccgtgaagctatggctgccttaagaaagtcagctcaagatgttcagaagttcatggatgctgtcaacaagaagagcagttcccaggatctgcataaaggaaccttgagtcagatgtctggagaactaagcaaagatggtgacctgatagtcagcatgcgaattctgggcaagaagagaactaagacttggcacaaaggcacccttattgccatccagacagttgggccagggaagaaatacaaggtgaaatttgacaacaaaggaaagagtctactgtcggggaaccatattgcctatgattaccaccctcctgctgacaagctgtatgtgggcagtcgggtggtcgccaaatacaaagatgggaatcaggtctggctctatgctggcattgtagctgagacaccaaacgtcaaaaacaagctcaggtttctcattttctttgatgatggctatgcttcctatgtcacacagtcggaactgtatcccatttgccggccactgaaaaagacttgggaggacatagaagacatctcctgccgtgacttcatagaggagtatgtcactgcctaccccaaccgccccatggtactgctcaagagtggccagcttatcaagactgagtgggaaggcacgtggtggaagtcccgagttgaggaggtggatggcagcctagtcaggatcctcttcctggatgacaaaagatgtgagtggatctatcgaggctctacacggctggagcccatgttcagcatgaaaacatcctcagcctctgcactggagaagaagcaaggacagctcaggacacgtccaaatatgggtgctgtgaggagcaaaggccctgttgtccagtacacacaggatctgaccggtactggaacccagttcaagccagtggaacccccacagcctacagctccacctgccccacctttcccacctgctccacctctatccccccaagcaggtgacagtgacttggaaagccagcttgcccagtcacggaagcaggtagccaaaaagagcacgtcctttcgaccaggatctgtgggctctggtcattcctcccctacatctcctgcactcagtgaaaatgtctctggtgggaaacctgggatcaaccagacatatagatcacctttaggctccacagcctctgccccagcaccctcagcactcccggcccctccagcacccccagtcttccatggcatgctggagcgggccccagcagagccctcctaccgtgctcccatggagaagcttttctacttacctcatgtctgcagctatacctgtctgtctcgagtcagacctatgaggaatgagcagtaccggggcaagaaccctctgctggtcccgttactatatgacttccggcggatgacagcccggcgtcgagttaaccgcaagatgggctttcatgttatctataagacaccttgtggtctctgccttcggacaatgcaggagatagaacgctaccttttcgagactggctgtgacttcctcttcctggagatgttctgtttggatccatatgttcttgtggaccgaaagtttcagccctataagcctttttactatattttggacatcacttatgggaaggaagatgttcccctatcctgtgtcaatgagattgacacaacccctccaccccaggtggcctacagcaaggaacgtatcccgggcaagggtgttttcattaacacaggccctgaatttctggttggctgtgactgcaaggatgggtgtcgggacaagtccaagtgtgcctgccatcaactaactatccaggctacagcctgtaccccaggaggccaaatcaaccctaactctggctaccagtacaagagactagaagagtgtctacccacaggggtatatgagtgtaacaaacgctgcaaatgtgacccaaacatgtgcacaaaccggttggtgcaacatggactacaagttcggctacagctattcaagacacagaacaagggctggggtatccgctgcttggatgacattgccaaaggctcttttgtttgtatttatgcaggcaaaatcctgacagatgactttgcagacaaggagggtctggaaatgggtgatgagtactttgcaaatctggaccatatcgagagcgtggagaacttcaaagaaggatatgagagtgatgccccctgttcctctgacagcagtggtgtagacttgaaggaccaggaagatggcaacagcggtacagaggaccctgaagagtccaatgatgatagctcagatgataacttctgtaaggatgaggacttcagcaccagttcagtgtggcggagctatgctacccggaggcagacccggggccagaaagagaacggactctctgagacaacttccaaggactcccaccccccagatcttggacccccacatattcctgttcctccctcaatccctgtaggtggctgcaatccaccttcctccgaagagacacccaagaacaaggtggcctcatggttgagctgcaatagtgtcagtgaaggtggttttgctgactctgatagccattcatccttcaagactaatgaaggtggggagggccgggctgggggaagccgaatggaggctgagaaggcctccacctcaggactaggcatcaaggatgagggagacatcaaacaggccaagaaagaggacactgacgaccgaaacaagatgtcagtagttactgaaagctctcgaaattacggttacaatccttctcctgtgaagcctgaaggacttcgccgcccacctagtaagactagtatgcatcaaagccgaagactcatggcttctgctcagtccaaccctgatgtaagtcacctcaagcttattcagagtctaataaaggaaaatggccattgtcacctcatcaagtccttcactataattactgttaggtcttctcctacttcttctagccttgactgcgctgccttattttctttcatccagcatctaatcttcctcttgccaccgccctttcctgccaaaccgtgggtaacagcaaggacttaaaggagcccttcccatttacttctcttacttcttaccctcctgcttccccaggatgtcctgacactgtccagcagcacagaaagtgagggggaaagtgggaccagccgaaagcccactgctggtcagacttcggctacagcggttgacagtgatgatatccagaccatatcctctggctctgaaggggatgactttgaggacaagaagaacatgactggtagcctggaaaaattttgggaatggtgggaagaaatagtaagaaacttgggatagagcattttttaaggaagctaaagaagtagtgggtaaaaattcagatcctaagaattggagcatctctgggagggctttctgactccaagctaaactattgtttgacacatcctctctcatttccatttttttactctttcccctcagctcctttgtctagcagatctaattatgcttgaaaaaaaaacctgctacttaggatctttgagttccagcttattggtgtttctcagctgcaatgttgggagagaaataggggtagaatgtccattcatgatagaatgtctgttcatgagttgggatgggtcctgaccccattctccctcctgtccaggtccaatgaagcgtcaagtggcagtaaaatcaacccgaggctttgctcttaaatcaacccatgggattgcaattaaatcaaccaacatggcctctgtggacaagggggagagcgcacctgttcgtaagaacacacgccaattctatgatggcgaggagtcttgctacatcattgatgccaagcttgaaggcaacctgggccgctacctcaaccacagttgcagccccaacctgtttgtccagaatgtcttcgtggatacccatgatcttcgcttcccctgggtggccttctttgccagcaaaagaatccgggctgggacagaacttacttgggactacaactacgaggtgggcagtgtggaaggcaaggagctactctgttgctgtggggccattgaatgcagaggacgtcttctttagaggacagccttcttcccaacccttcttgaactgtcgtttcctcaggaactgggtcttcctgattgttgaaccctgacccgaagtctctgggctagctactccccccagctcctagttgatagaaatgggggttctggaccagatgatcccttccaatgtggtgctagcaggcaggatcccttctccacctccaaaggccctaaagggtggggagagatcaccactctaacctcggcctgacatccctcccatcccatatttgtccaagtgttcctgcttctaacagactttgttcttagaatggagcctgtgtatctactatctccagtttgtattatttcttgaaagtcttttaacaatatgataaaactaaaaaaaaagaaaaaaaccggcacattgtcgggaatactcgggaaaccgagaagaaccccacacaataaaatgggggtgccattccacaagcaggaagggattaaaacgacgaggtcctgcaaaacagcggttcaaaaaaaaggggggaatacgggagacgcactgtaggcataaattaacgcgaccgagg

SEQ ID NO: 439948 - DNA, 4473 bp, Homo sapiens
ggcacgagggccgacccctgagttaggacaaaagcatgtcttcccttcctgggtgcattggtttggatgcagcaacagctacagtggagtctgaagagattgcagagctgcaacaggcagtggttgaggaactgggtatctctatggaggaacttcggcatttcatcgatgaggaactggagaagatggattgtgtacagcaacgcaagaagcagctagcagagttagagacatgggtaatacagaaagaatctgaggtggctcacgttgaccaactctttgatgatgcatccagggcagtgactaattgtgagtctttggtgaaggacttctactccaagctgggactacaataccgggacagtagctctgaggacgaatcttcccggcctacagaaataattgagattcctgatgaagatgatgatgtcctcagtattgattcaggtgatgctgggagcagaactccaaaagaccagaagctccgtgaagctatggctgccttaagaaagtcagctcaagatgttcagaagttcatggatgctgtcaacaagaagagcagttcccaggatctgcataaaggaaccttgagtcagatgtctggagaactaagcaaagatggtgacctgatagtcagcatgcgaattctgggcaagaagagaactaagacttggcacaaaggcacccttattgccatccagacagttgggccagggaagaaatacaaggtgaaatttgacaacaaaggaaagagtctactgtcggggaaccatattgcctatgattaccaccctcctgctgacaagctgtatgtgggcagtcgggtggtcgccaaatacaaagatgggaatcaggtctggctctatgctggcattgtagctgagacaccaaacgtcaaaaacaagctcaggtttctcattttctttgatgatggctatgcttcctatgtcacacagtcggaactgtatcccatttgccggccactgaaaaagacttgggaggacatagaagacatctcctgccgtgacttcatagaggagtatgtcactgcctaccccaaccgccccatggtactgctcaagagtggccagcttatcaagactgagtgggaaggcacgtggtggaagtcccgagttgaggaggtggatggcagcctagtcaggatcctcttcctggatgacaaaagatgtgagtggatctatcgaggctctacacggctggagcccatgttcagcatgaaaacatcctcagcctctgcactggagaagaagcaaggacagctcaggacacgtccaaatatgggtgctgtgaggagcaaaggccctgttgtccagtacacacaggatctgaccggtactggaacccagttcaagccagtggaacccccacagcctacagctccacctgccccacctttcccacctgctccacctctatccccccaagcaggtgacagtgacttggaaagccagcttgcccagtcacggaagcaggtagccaaaaagagcacgtcctttcgaccaggatctgtgggctctggtcattcctcccctacatctcctgcactcagtgaaaatgtctctggtgggaaacctgggatcaaccagacatatagatcacctttaggctccacagcctctgccccagcaccctcagcactcccggcccctccagcacccccagtcttccatggcatgctggagcgggccccagcagagccctcctaccgtgctcccatggagaagcttttctacttacctcatgtctgcagctatacctgtctgtctcgagtcagacctatgaggaatgagcagtaccggggcaagaaccctctgctggtcccgttactatatgacttccggcggatgacagcccggcgtcgagttaaccgcaagatgggctttcatgttatctataagacaccttgtggtctctgccttcggacaatgcaggagatagaacgctaccttttcgagactggctgtgacttcctcttcctggagatgttctgtttggatccatatgttcttgtggaccgaaagtttcagccctataagcctttttactatattttggacatcacttatgggaaggaagatgttcccctatcctgtgtcaatgagattgacacaacccctccaccccaggtggcctacagcaaggaacgtatcccgggcaagggtgttttcattaacacaggccctgaatttctggttggctgtgactgcaaggatgggtgtcgggacaagtccaagtgtgcctgccatcaactaactatccaggctacagcctgtaccccaggaggccaaatcaaccctaactctggctaccagtacaagagactagaagagtgtctacccacaggggtatatgagtgtaacaaacgctgcaaatgtgacccaaacatgtgcacaaaccggttggtgcaacatggactacaagttcggctacagctattcaagacacagaacaagggctggggtatccgctgcttggatgacattgccaaaggctcttttgtttgtatttatgcaggcaaaatcctgacagatgactttgcagacaaggagggtctggaaatgggtgatgagtactttgcaaatctggaccatatcgagagcgtggagaacttcaaagaaggatatgagagtgatgccccctgttcctctgacagcagtggtgtagacttgaaggaccaggaagatggcaacagcggtacagaggaccctgaagagtccaatgatgatagctcagatgataacttctgtaaggatgaggacttcagcaccagttcagtgtggcggagctatgctacccggaggcagacccggggccagaaagagaacggactctctgagacaacttccaaggactcccaccccccagatcttggacccccacatattcctgttcctccctcaatccctgtaggtggctgcaatccaccttcctccgaagagacacccaagaacaaggtggcctcatggttgagctgcaatagtgtcagtgaaggtggttttgctgactctgatagccattcatccttcaagactaatgaaggtggggagggccgggctgggggaagccgaatggaggctgagaaggcctccacctcaggactaggcatcaaggatgagggagacatcaaacaggccaagaaagaggacactgacgaccgaaacaagatgtcagtagttactgaaagctctcgaaattacggttacaatccttctcctgtgaagcctgaaggacttcgccgcccacctagtaagactagtatgcatcaaagccgaagactcatggcttctgctcagtccaaccctgatgatgtcctgacactgtccagcagcacagaaagtgagggggaaagtgggaccagccgaaagcccactgctggtcagacttcggctacagcggttgacagtgatgatatccagaccatatcctctggctctgaaggggatgactttgaggacaagaagaacatgactggtccaatgaagcgtcaagtggcagtaaaatcaacccgaggctttgctcttaaatcaacccatgggattgcaattaaatcaaccaacatggcctctgtggacaagggggagagcgcacctgttcgtaagaacacacgccaattctatgatggcgaggagtcttgctacatcattgatgccaagcttgaaggcaacctgggccgctacctcaaccacagttgcagccccaacctgtttgtccagaatgtcttcgtggatacccatgatcttcgcttcccctgggtggccttctttgccagcaaaagaatccgggctgggacagaacttacttgggactacaactacgaggtgggcagtgtggaaggcaaggagctactctgttgctgtggggccattgaatgcagaggacgtcttctttagaggacagccttcttcccaacccttcttgaactgtcgtttcctcaggaactgggtcttcctgattgttgaaccctgacccgaagtctctgggctagctactccccccagctcctagttgatagaaatgggggttctggaccagatgatcccttccaatgtggtgctagcaggcaggatcccttctccacctccaaaggccctaaagggtggggagagatcaccactctaacctcggcctgacatccctcccatcccatatttgtccaagtgttcctgcttctaacagactttgttcttagaatggagcctgtgtatctactatctccagtttgtattatttcttgaaagtcttttaacaatatgataaaactaaaaaaaaagaaaaaaaccggcacattgtcgggaatactcgggaaaccgagaagaaccccacacaataaaatgggggtgccattccacaagcaggaagggattaaaacgacgaggtcctgcaaaacagcggttcaaaaaaaaggggggaatacgggagacgcactgtaggcataaattaacgcgaccgagg

SEQ ID NO: 439949 - DNA, 3031 bp, Homo sapiens
ttattcatcacgggcggcgttttatgcctagttgcggcccctggcctcaatgtagccaaaaagagcacgtcctttcgaccaggatctgtgggctctggtcattcctcccctacatctcctgcactcagtgaaaatgtctctggtgggaaacctgggatcaaccagacatatagatcacctttaggctccacagcctctgccccagcaccctcagcactcccggcccctccagcacccccagtcttccatggcatgctggagcgggccccagcagagccctcctaccgtgctcccatggagaagcttttctacttacctcatgtctgcagctatacctgtctgtctcgagtcagacctatgaggaatgagcagtaccggggcaagaaccctctgctggtcccgttactatatgacttccggcggatgacagcccggcgtcgagttaaccgcaagatgggctttcatgttatctataagacaccttgtggtctctgccttcggacaatgcaggagatagaacgctaccttttcgagactggctgtgacttcctcttcctggagatgttctgtttggatccatatgttcttgtggaccgaaagtttcagccctataagcctttttactatattttggacatcacttatgggaaggaagatgttcccctatcctgtgtcaatgagattgacacaacccctccaccccaggtggcctacagcaaggaacgtatcccgggcaagggtgttttcattaacacaggccctgaatttctggttggctgtgactgcaaggatgggtgtcgggacaagtccaagtgtgcctgccatcaactaactatccaggctacagcctgtaccccaggaggccaaatcaaccctaactctggctaccagtacaagagactagaagagtgtctacccacaggggtatatgagtgtaacaaacgctgcaaatgtgacccaaacatgtgcacaaaccggttggtgcaacatggactacaagttcggctacagctattcaagacacagaacaagggctggggtatccgctgcttggatgacattgccaaaggctcttttgtttgtatttatgcaggcaaaatcctgacagatgactttgcagacaaggagggtctggaaatgggtgatgagtactttgcaaatctggaccatatcgagagcgtggagaacttcaaagaaggatatgagagtgatgccccctgttcctctgacagcagtggtgtagacttgaaggaccaggaagatggcaacagcggtacagaggaccctgaagagtccaatgatgatagctcagatgataacttctgtaaggatgaggacttcagcaccagttcagtgtggcggagctatgctacccggaggcagacccggggccagaaagagaacggactctctgagacaacttccaaggactcccaccccccagatcttggacccccacatattcctgttcctccctcaatccctgtaggtggctgcaatccaccttcctccgaagagacacccaagaacaaggtggcctcatggttgagctgcaatagtgtcagtgaaggtggttttgctgactctgatagccattcatccttcaagactaatgaaggtggggagggccgggctgggggaagccgaatggaggctgagaaggcctccacctcaggactaggcatcaaggatgagggagacatcaaacaggccaagaaagaggacactgacgaccgaaacaagatgtcagtagttactgaaagctctcgaaattacggttacaatccttctcctgtgaagcctgaaggacttcgccgcccacctagtaagactagtatgcatcaaagccgaagactcatggcttctgctcagtccaaccctgatgatgtcctgacactgtccagcagcacagaaagtgagggggaaagtgggaccagccgaaagcccactgctggtcagacttcggctacagcggttgacagtgatgatatccagaccatatcctctggctctgaaggggatgactttgaggacaagaagaacatgactggtccaatgaagcgtcaagtggcagtaaaatcaacccgaggctttgctcttaaatcaacccatgggattgcaattaaatcaaccaacatggcctctgtggacaagggggagagcgcacctgttcgtaagaacacacgccaattctatgatggcgaggagtcttgctacatcattgatgccaagcttgaaggcaacctgggccgctacctcaaccacagttgcagccccaacctgtttgtccagaatgtcttcgtggatacccatgatcttcgcttcccctgggtggccttctttgccagcaaaagaatccgggctgggacagaacttacttgggactacaactacgaggtgggcagtgtggaaggcaaggagctactctgttgctgtggggccattgaatgcagaggacgtcttctttagaggacagccttcttcccaacccttcttgaactgtcgtttcctcaggaactgggtcttcctgattgttgaaccctgacccgaagtctctgggctagctactccccccagctcctagttgatagaaatgggggttctggaccagatgatcccttccaatgtggtgctagcaggcaggatcccttctccacctccaaaggccctaaagggtggggagagatcaccactctaacctcggcctgacatccctcccatcccatatttgtccaagtgttcctgcttctaacagactttgttcttagaatggagcctgtgtatctactatctccagtttgtattatttcttgaaagtcttttaacaatatgataaaactaaaaaaaaagaaaaaaaccggcacattgtcgggaatactcgggaaaccgagaagaaccccacacaataaaatgggggtgccattccacaagcaggaagggattaaaacgacgaggtcctgcaaaacagcggttcaaaaaaaaggggggaatacgggagacgcactgtaggcataaattaacgcgaccgagg

SEQ ID NO: 439950 - DNA, 4593 bp, Homo sapiens
cgggcgtttcttttgcttccccttccctctttcacgcttcctcccctccccctcctcccttatcccttcgctttcgctcttttccgtcgaggccgacccctgagttgtgagtctggggtctggttggtgaaaaagagcccttgaagctggaagacgggagaggacaaaagcatgtcttcccttcctgggtgcattggtttggatgcagcaacagctacagtggagtctgaagagattgcagagctgcaacaggcagtggttgaggaactgggtatctctatggaggaacttcggcatttcatcgatgaggaactggagaagatggattgtgtacagcaacgcaagaagcagctagcagagttagagacatgggtaatacagaaagaatctgaggtggctcacgttgaccaactctttgatgatgcatccagggcagtgactaattgtgagtctttggtgaaggacttctactccaagctgggactacaataccgggacagtagctctgaggacgaatcttcccggcctacagaaataattgagattcctgatgaagatgatgatgtcctcagtattgattcaggtgatgctgggagcagaactccaaaagaccagaagctccgtgaagctatggctgccttaagaaagtcagctcaagatgttcagaagttcatggatgctgtcaacaagaagagcagttcccaggatctgcataaaggaaccttgagtcagatgtctggagaactaagcaaagatggtgacctgatagtcagcatgcgaattctgggcaagaagagaactaagacttggcacaaaggcacccttattgccatccagacagttgggccagggaagaaatacaaggtgaaatttgacaacaaaggaaagagtctactgtcggggaaccatattgcctatgattaccaccctcctgctgacaagctgtatgtgggcagtcgggtggtcgccaaatacaaagatgggaatcaggtctggctctatgctggcattgtagctgagacaccaaacgtcaaaaacaagctcaggtttctcattttctttgatgatggctatgcttcctatgtcacacagtcggaactgtatcccatttgccggccactgaaaaagacttgggaggacatagaagacatctcctgccgtgacttcatagaggagtatgtcactgcctaccccaaccgccccatggtactgctcaagagtggccagcttatcaagactgagtgggaaggcacgtggtggaagtcccgagttgaggaggtggatggcagcctagtcaggatcctcttcctggatgacaaaagatgtgagtggatctatcgaggctctacacggctggagcccatgttcagcatgaaaacatcctcagcctctgcactggagaagaagcaaggacagctcaggacacgtccaaatatgggtgctgtgaggagcaaaggccctgttgtccagtacacacaggatctgaccggtactggaacccagttcaagccagtggaacccccacagcctacagctccacctgccccacctttcccacctgctccacctctatccccccaagcaggtgacagtgacttggaaagccagcttgcccagtcacggaagcaggtagccaaaaagagcacgtcctttcgaccaggatctgtgggctctggtcattcctcccctacatctcctgcactcagtgaaaatgtctctggtgggaaacctgggatcaaccagacatatagatcacctttaggctccacagcctctgccccagcaccctcagcactcccggcccctccagcacccccagtcttccatggcatgctggagcgggccccagcagagccctcctaccgtgctcccatggagaagcttttctacttacctcatgtctgcagctatacctgtctgtctcgagtcagacctatgaggaatgagcagtaccggggcaagaaccctctgctggtcccgttactatatgacttccggcggatgacagcccggcgtcgagttaaccgcaagatgggctttcatgttatctataagacaccttgtggtctctgccttcggacaatgcaggagatagaacgctaccttttcgagactggctgtgacttcctcttcctggagatgttctgtttggatccatatgttcttgtggaccgaaagtttcagccctataagcctttttactatattttggacatcacttatgggaaggaagatgttcccctatcctgtgtcaatgagattgacacaacccctccaccccaggtggcctacagcaaggaacgtatcccgggcaagggtgttttcattaacacaggccctgaatttctggttggctgtgactgcaaggatgggtgtcgggacaagtccaagtgtgcctgccatcaactaactatccaggctacagcctgtaccccaggaggccaaatcaaccctaactctggctaccagtacaagagactagaagagtgtctacccacaggggtatatgagtgtaacaaacgctgcaaatgtgacccaaacatgtgcacaaaccggttggtgcaacatggactacaagttcggctacagctattcaagacacagaacaagggctggggtatccgctgcttggatgacattgccaaaggctcttttgtttgtatttatgcaggcaaaatcctgacagatgactttgcagacaaggagggtctggaaatgggtgatgagtactttgcaaatctggaccatatcgagagcgtggagaacttcaaagaaggatatgagagtgatgccccctgttcctctgacagcagtggtgtagacttgaaggaccaggaagatggcaacagcggtacagaggaccctgaagagtccaatgatgatagctcagatgataacttctgtaaggatgaggacttcagcaccagttcagtgtggcggagctatgctacccggaggcagacccggggccagaaagagaacggactctctgagacaacttccaaggactcccaccccccagatcttggacccccacatattcctgttcctccctcaatccctgtaggtggctgcaatccaccttcctccgaagagacacccaagaacaaggtggcctcatggttgagctgcaatagtgtcagtgaaggtggttttgctgactctgatagccattcatccttcaagactaatgaaggtggggagggccgggctgggggaagccgaatggaggctgagaaggcctccacctcaggactaggcatcaaggatgagggagacatcaaacaggccaagaaagaggacactgacgaccgaaacaagatgtcagtagttactgaaagctctcgaaattacggttacaatccttctcctgtgaagcctgaaggacttcgccgcccacctagtaagactagtatgcatcaaagccgaagactcatggcttctgctcagtccaaccctgatgtaagtcacctcaagcttattcagagtctaataaaggaaaatggccattgtcacctcatcaagtccttcactataattactgttaggtcttctcctacttcttctagccttgactgcgctgccttattttctttcatccagcatctaatcttcctcttgccaccgccctttcctgccaaaccgtgggtaacagcaaggacttaaaggagcccttcccatttacttctcttacttcttaccctcctgcttccccaggatgtcctgacactgtccagcagcacagaaagtgagggggaaagtgggaccagccgaaagcccactgctggtcagacttcggctacagcggttgacagtgatgatatccagaccatatcctctggctctgaaggggatgactttgaggacaagaagaacatgactggtagcctggaaaaattttgggaatggtgggaagaaatagtaagaaacttgggatagagcattttttaaggaagctaaagaagtagtgggtaaaaattcagatcctaagaattggagcatctctgggagggctttctgactccaagctaaactattgtttgacacatcctctctcatttccatttttttactctttcccctcagctcctttgtctagcagatctaattatgcttgaaaaaaaaacctgctacttaggatctttgagttccagcttattggtgtttctcagctgcaatgttgggagagaaataggggtagaatgtccattcatgatagaatgtctgttcatgagttgggatgggtcctgaccccattctccctcctgtccaggtccaatgaagcgtcaagtggcagtaaaatcaacccgaggctttgctcttaaatcaacccatgggattgcaattaaatcaaccaacatggcctctgtggacaagggggagagcgcacctgttcgtaagaacacacgccaattctatgatggcgaggagtcttgctacatcattgatgccaagcttgaaggcaacctgggccgctacctcaacgtgagacccctctccccacctctagatgctggattatcccatggtcctcagatttcttttaacatactctataagcccttttcttgttataaactcttgatctcaaag

SEQ ID NO: 439951 - DNA, 3601 bp, Homo sapiens
cgggcgtttcttttgcttccccttccctctttcacgcttcctcccctccccctcctcccttatcccttcgctttcgctcttttccgtcgaggccgacccctgagttgtgagtctggggtctggttggtgaaaaagagcccttgaagctggaagacgggagaggacaaaagcatgtcttcccttcctgggtgcattggtttggatgcagcaacagctacagtggagtctgaagagattgcagagctgcaacaggcagtggttgaggaactgggtatctctatggaggaacttcggcatttcatcgatgaggaactggagaagatggattgtgtacagcaacgcaagaagcagctagcagagttagagacatgggtaatacagaaagaatctgaggtggctcacgttgaccaactctttgatgatgcatccagggcagtgactaattgtgagtctttggtgaaggacttctactccaagctgggactacaataccgggacagtagctctgaggacgaatcttcccggcctacagaaataattgagattcctgatgaagatgatgatgtcctcagtattgattcaggtgatgctgggagcagaactccaaaagaccagaagctccgtgaagctatggctgccttaagaaagtcagctcaagatgttcagaagttcatggatgctgtcaacaagaagagcagttcccaggatctgcataaaggaaccttgagtcagatgtctggagaactaagcaaagatggtgacctgatagtcagcatgcgaattctgggcaagaagagaactaagacttggcacaaaggcacccttattgccatccagacagttgggccagggaagaaatacaaggtgaaatttgacaacaaaggaaagagtctactgtcggggaaccatattgcctatgattaccaccctcctgctgacaagctgtatgtgggcagtcgggtggtcgccaaatacaaagatgggaatcaggtctggctctatgctggcattgtagctgagacaccaaacgtcaaaaacaagctcaggtttctcattttctttgatgatggctatgcttcctatgtcacacagtcggaactgtatcccatttgccggccactgaaaaagacttgggaggacatagaagacatctcctgccgtgacttcatagaggagtatgtcactgcctaccccaaccgccccatggtactgctcaagagtggccagcttatcaagactgagtgggaaggcacgtggtggaagtcccgagttgaggaggtggatggcagcctagtcaggatcctcttcctggatgacaaaagatgtgagtggatctatcgaggctctacacggctggagcccatgttcagcatgaaaacatcctcagcctctgcactggagaagaagcaaggacagctcaggacacgtccaaatatgggtgctgtgaggagcaaaggccctgttgtccagtacacacaggatctgaccggtactggaacccagttcaagccagtggaacccccacagcctacagctccacctgccccacctttcccacctgctccacctctatccccccaagcaggtgacagtgacttggaaagccagcttgcccagtcacggaagcaggtagccaaaaagagcacgtcctttcgaccaggatctgtgggctctggtcattcctcccctacatctcctgcactcagtgaaaatgtctctggtgggaaacctgggatcaaccagacatatagatcacctttaggctccacagcctctgccccagcaccctcagcactcccggcccctccagcacccccagtcttccatggcatgctggagcgggccccagcagagccctcctaccgtgctcccatggagaagcttttctacttacctcatgtctgcagctatacctgtctgtctcgagtcagacctatgaggaatgagcagtaccggggcaagaaccctctgctggtcccgttactatatgacttccggcggatgacagcccggcgtcgagttaaccgcaagatgggctttcatgttatctataagacaccttgtggtctctgccttcggacaatgcaggagatagaacgctaccttttcgagactggctgtgacttcctcttcctggagatgttctgtttggatccatatgttcttgtggaccgaaagtttcagccctataagcctttttactatattttggacatcacttatgggaaggaagatgttcccctatcctgtgtcaatgagattgacacaacccctccaccccaggtggcctacagcaaggaacgtatcccgggcaagggtgttttcattaacacaggccctgaatttctggttggctgtgactgcaaggatgggtgtcgggacaagtccaagtgtgcctgccatcaactaactatccaggctacagcctgtaccccaggaggccaaatcaaccctaactctggctaccagtacaagagactagaagagtgtctacccacaggggtatatgagtgtaacaaacgctgcaaatgtgacccaaacatgtgcacaaaccggttggtgcaacatggactacaagttcggctacagctattcaagacacagaacaagggctggggtatccgctgcttggatgacattgccaaaggctcttttgtttgtatttatgcaggcaaaatcctgacagatgactttgcagacaaggagggtctggaaatgggtgatgagtactttgcaaatctggaccatatcgagagcgtggagaacttcaaagaaggatatgagagtgatgccccctgttcctctgacagcagtggtgtagacttgaaggaccaggaagatggcaacagcggtacagaggaccctgaagagtccaatgatgatagctcagatgataacttctgtaaggatgaggacttcagcaccagttcagtgtggcggagctatgctacccggaggcagacccggggccagaaagagaacggactctctgagacaacttccaaggactcccaccccccagatcttggacccccacatattcctgttcctccctcaatccctgtaggtggctgcaatccaccttcctccgaagagacacccaagaacaaggtggcctcatggttgagctgcaatagtgtcagtgaaggtggttttgctgactctgatagccattcatccttcaagactaatgaaggtggggagggccgggctgggggaagccgaatggaggctgagaaggcctccacctcaggactaggcatcaaggatgagggagacatcaaacaggccaagaaagaggtaagcagtggcagaacactctgagagctatggctttaactttggtgcagtaacaatgcagtctcaccatgagtctttgcatgtagattattctacttgatggatatttctgtggccacctcgttatctctccccctaactagcacattcctagtgtttgtttaaagaaccaaattattgaccgggcacagtggctcacacctgtaatcccaacactttgggaggccgaggcaggtggataacttgaagttcaggagttggagaccatcctggccaacatggtgaaaccccgtctctacta

SEQ ID NO: 439952 - DNA, 3607 bp, Homo sapiens
cgggcgtttcttttgcttccccttccctctttcacgcttcctcccctccccctcctcccttatcccttcgctttcgctcttttccgtcgaggccgacccctgagttgtgagtctggggtctggttggtgaaaaagagcccttgaagctggaagacgggagaggacaaaagcatgtcttcccttcctgggtgcattggtttggatgcagcaacagctacagtggagtctgaagagattgcagagctgcaacaggcagtggttgaggaactgggtatctctatggaggaacttcggcatttcatcgatgaggaactggagaagatggattgtgtacagcaacgcaagaagcagctagcagagttagagacatgggtaatacagaaagaatctgaggtggctcacgttgaccaactctttgatgatgcatccagggcagtgactaattgtgagtctttggtgaaggacttctactccaagctgggactacaataccgggacagtagctctgaggacgaatcttcccggcctacagaaataattgagattcctgatgaagatgatgatgtcctcagtattgattcaggtgatgctgggagcagaactccaaaagaccagaagctccgtgaagctatggctgccttaagaaagtcagctcaagatgttcagaagttcatggatgctgtcaacaagaagagcagttcccaggatctgcataaaggaaccttgagtcagatgtctggagaactaagcaaagatggtgacctgatagtcagcatgcgaattctgggcaagaagagaactaagacttggcacaaaggcacccttattgccatccagacagttgggccagggaagaaatacaaggtgaaatttgacaacaaaggaaagagtctactgtcggggaaccatattgcctatgattaccaccctcctgctgacaagctgtatgtgggcagtcgggtggtcgccaaatacaaagatgggaatcaggtctggctctatgctggcattgtagctgagacaccaaacgtcaaaaacaagctcaggtttctcattttctttgatgatggctatgcttcctatgtcacacagtcggaactgtatcccatttgccggccactgaaaaagacttgggaggacatagaagacatctcctgccgtgacttcatagaggagtatgtcactgcctaccccaaccgccccatggtactgctcaagagtggccagcttatcaagactgagtgggaaggcacgtggtggaagtcccgagttgaggaggtggatggcagcctagtcaggatcctcttcctggatgacaaaagatgtgagtggatctatcgaggctctacacggctggagcccatgttcagcatgaaaacatcctcagcctctgcactggagaagaagcaaggacagctcaggacacgtccaaatatgggtgctgtgaggagcaaaggccctgttgtccagtacacacaggatctgaccggtactggaacccagttcaagccagtggaacccccacagcctacagctccacctgccccacctttcccacctgctccacctctatccccccaagcaggtgacagtgacttggaaagccagcttgcccagtcacggaagcaggtagccaaaaagagcacgtcctttcgaccaggatctgtgggctctggtcattcctcccctacatctcctgcactcagtgaaaatgtctctggtgggaaacctgggatcaaccagacatatagatcacctttaggctccacagcctctgccccagcaccctcagcactcccggcccctccagcacccccagtcttccatggcatgctggagcgggccccagcagagccctcctaccgtgctcccatggagaagcttttctacttacctcatgtctgcagctatacctgtctgtctcgagtcagacctatgaggaatgagcagtaccggggcaagaaccctctgctggtcccgttactatatgacttccggcggatgacagcccggcgtcgagttaaccgcaagatgggctttcatgttatctataagacaccttgtggtctctgccttcggacaatgcaggagatagaacgctaccttttcgagactggctgtgacttcctcttcctggagatgttctgtttggatccatatgttcttgtggaccgaaagtttcagccctataagcctttttactatattttggacatcacttatgggaaggaagatgttcccctatcctgtgtcaatgagattgacacaacccctccaccccaggtggcctacagcaaggaacgtatcccgggcaagggtgttttcattaacacaggccctgaatttctggttggctgtgactgcaaggatgggtgtcgggacaagtccaagtgtgcctgccatcaactaactatccaggctacagcctgtaccccaggaggccaaatcaaccctaactctggctaccagtacaagagactagaagagtgtctacccacaggggtatatgagtgtaacaaacgctgcaaatgtgacccaaacatgtgcacaaaccggttggtgcaacatggactacaagttcggctacagctattcaagacacagaacaagggctggggtatccgctgcttggatgacattgccaaaggctcttttgtttgtatttatgcaggcaaaatcctgacagatgactttgcagacaaggagggtctggaaatgggtgatgagtactttgcaaatctggaccatatcgagagcgtggagaacttcaaagaaggatatgagagtgatgccccctgttcctctgacagcagtggtgtagacttgaaggaccaggaagatggcaacagcggtacagaggaccctgaagagtccaatgatgatagctcagatgataacttctgtaaggatgaggacttcagcaccagttcagtgtggcggagctatgctacccggaggcagacccggggccagaaagagaacggactctctgagacaacttccaaggactcccaccccccagatcttggacccccacatattcctgttcctccctcaatccctgtaggtggctgcaatccaccttcctccgaagagacacccaagaacaaggtggcctcatggttgagctgcaatagtgtcagtgaaggtggttttgctgactctgatagccattcatccttcaagactaatgaaggtggggagggccgggctgggggaagccgaatggaggctgagaaggcctccacctcaggactaggcatcaaggatgagggagacatcaaacaggccaagaaagaggtaagcagtggcagaacactctgagagctatggctttaactttggtgcagtaacaatgcagtctcaccatgagtctttgcatgtagattattctacttgatggatatttctgtggccacctcgttatctctccccctaactagcacattcctagtgtttgtttaaagaaccaaattattgaccagccaccgcacccggcctcctgaattaacattttctaaagatgcttctggcgtgctatcctgaaagctgccagaggtgtcttggctgcattggtggtaataaaattcatactcaaatttgaaaa

SEQ ID NO: 439953 - DNA, 805 bp, Homo sapiens
cctggttcttatttgatcctgtccttaaacctacagcacagttgcagccccaacctgtttgtccagaatgtcttcgtggatacccatgatcttcgcttcccctgggtggccttctttgccagcaaaagaatccgggctgggacagaacttacttgggactacaactacgaggtgggcagtgtggaaggcaaggagctactctgttgctgtggggccattgaatgcagaggacgtcttctttagaggacagccttcttcccaacccttcttgaactgtcgtttcctcaggaactgggtcttcctgattgttgaaccctgacccgaagtctctgggctagctactccccccagctcctagttgatagaaatgggggttctggaccagatgatcccttccaatgtggtgctagcaggcaggatcccttctccacctccaaaggccctaaagggtggggagagatcaccactctaacctcggcctgacatccctcccatcccatatttgtccaagtgttcctgcttctaacagactttgttcttagaatggagcctgtgtatctactatctccagtttgtattatttcttgaaagtcttttaacaatatgataaaactaaaaaaaaagaaaaaaaccggcacattgtcgggaatactcgggaaaccgagaagaaccccacacaataaaatgggggtgccattccacaagcaggaagggattaaaacgacgaggtcctgcaaaacagcggttcaaaaaaaaggggggaatacgggagacgcactgtaggcataaattaacgcgaccgagg

SEQ ID NO: 439954 - DNA, 658 bp, Homo sapiens
gtcagtcttggtgacagtgacattgaaggtgggggcccaccggtgctctggtacgaagatccatgctaaattccccatcctgcagcagtgagtcccggatcaccgaacatttctggccccctgcatgccacccagaatgcatgcggcgcccaggatgcatgctgtggggccattgaatgcagaggacgtcttctttagaggacagccttcttcccaacccttcttgaactgtcgtttcctcaggaactgggtcttcctgattgttgaaccctgacccgaagtctctgggctagctactccccccagctcctagttgatagaaatgggggttctggaccagatgatcccttccaatgtggtgctagcaggcaggatcccttctccacctccaaaggccctaaagggtggggagagatcaccactctaacctcggcctgacatccctcccatcccatatttgtccaagtgttcctgcttctaacagactttgttcttagaatggagcctgtgtatctactatctccagtttgtattatttcttgaaagtcttttaacaatatgataaaactaagattgtggttttgtttctctctctcagcccgatactcccaattctggatctttcagtgaggtattatccccatcctcccctgtgggc

SEQ ID NO: 439955 - DNA, 462 bp, Homo sapiens
tcctgccctcaagcgaccctcctgcctcggcctctaaaagtgctgagattacaggtgtaagccactgtgccagcccaaaacattattttcagtagctctctactgcttaatgaatgttctccatgccgtctcaaactcttaaatctttttcaggagtgttagcgtacagcagaagataagaactcttaaaaatctcagcatcagattctggagaatagggagggagaacatggaatatttgaatagaataacaggcagcagagtaggaattagttttattagggaactgaaattctctattgattgattgtagttataaggactccaatttaatttgttttctgttccatgcagaggacaaaagcatgtcttcccttcctgggtgcattggtttggatgcagcaacagctacagtggagtctgaagagattgcagagctgcaacaggcagtggttgaggaac

SEQ ID NO: 439956 - DNA, 529 bp, Homo sapiens
ttatttgatcctgtccttaaacctacagcacagttgcagccccaacctgtttgtccagaatgtcttcgtggatacccatgatcttcgcttcccctgggtggccttctttgccagcaagtaaggagtcaggaaaggggatgactggggaggggcaaggaccactgaagttctaagggcccctcctccattcatgatccaactccacctacatattcagtaaccccaagtgcctgggttatctgctgtctttgccacacaccatccttttcttcctcttcagaagaatccgggctgggacagaacttacttgggactacaactacgaggtgggcagtgtggaaggcaaggagctactctgttgctgtggggccattgaatgcagaggacgtcttctttagaggacagccttcttcccaacccttcttgaactgtcgtttcctcaggaactgggtcttcctgattgttgaaccctgacccgaagtctctgggctagctactccccccagctcctagttgatagaaatggggg

SEQ ID NO: 439957 - DNA, 389 bp, Homo sapiens
agcctaggcaaaaagagcgaaactgtctcaaaaaaaaaaagagaaatagagatgttatcagtcagtgaagagtaaccagggagtttcattgtccaggtttggtagggcaagggaagatctttcttgaatcatctttagcttcaggagcacagctgtttgaaagatgagagaaatggcttagctacctggagggttaattataaaacagaggtcctgttgccttccgatctgatcacttgcatctcatttgcagatcacctttaggctccacagcctctgccccagcaccctcagcactcccggcccctccagcacccccagtcttccatggcatgctggagcgggccccagcagagccctcctaccgtgctcccatggagaagcttttc

SEQ ID NO: 439958 - DNA, 4609 bp, Homo sapiens
cgggcgtttcttttgcttccccttccctctttcacgcttcctcccctccccctcctcccttatcccttcgctttcgctcttttccgtcgaggccgacccctgagttgtgagtctggggtctggttggtgaaaaagagcccttgaagctggaagacgggagaggacaaaagcatgtcttcccttcctgggtgcattggtttggatgcagcaacagctacagtggagtctgaagagattgcagagctgcaacaggcagtggttgaggaactgggtatctctatggaggaacttcggcatttcatcgatgaggaactggagaagatggattgtgtacagcaacgcaagaagcagctagcagagttagagacatgggtaatacagaaagaatctgaggtggctcacgttgaccaactctttgatgatgcatccagggcagtgactaattgtgagtctttggtgaaggacttctactccaagctgggactacaataccgggacagtagctctgaggacgaatcttcccggcctacagaaataattgagattcctgatgaagatgatgatgtcctcagtattgattcaggtgatgctgggagcagaactccaaaagaccagaagctccgtgaagctatggctgccttaagaaagtcagctcaagatgttcagaagttcatggatgctgtcaacaagaagagcagttcccaggatctgcataaaggaaccttgagtcagatgtctggagaactaagcaaagatggtgacctgatagtcagcatgcgaattctgggcaagaagagaactaagacttggcacaaaggcacccttattgccatccagacagttgggccagggaagaaatacaaggtgaaatttgacaacaaaggaaagagtctactgtcggggaaccatattgcctatgattaccaccctcctgctgacaagctgtatgtgggcagtcgggtggtcgccaaatacaaagatgggaatcaggtctggctctatgctggcattgtagctgagacaccaaacgtcaaaaacaagctcaggtttctcattttctttgatgatggctatgcttcctatgtcacacagtcggaactgtatcccatttgccggccactgaaaaagacttgggaggacatagaagacatctcctgccgtgacttcatagaggagtatgtcactgcctaccccaaccgccccatggtactgctcaagagtggccagcttatcaagactgagtgggaaggcacgtggtggaagtcccgagttgaggaggtggatggcagcctagtcaggatcctcttcctggatgacaaaagatgtgagtggatctatcgaggctctacacggctggagcccatgttcagcatgaaaacatcctcagcctctgcactggagaagaagcaaggacagctcaggacacgtccaaatatgggtgctgtgaggagcaaaggccctgttgtccagtacacacaggatctgaccggtactggaacccagttcaagccagtggaacccccacagcctacagctccacctgccccacctttcccacctgctccacctctatccccccaagcaggtgacagtgacttggaaagccagcttgcccagtcacggaagcaggtagccaaaaagagcacgtcctttcgaccaggatctgtgggctctggtcattcctcccctacatctcctgcactcagtgaaaatgtctctggtgggaaacctgggatcaaccagacatatagatcacctttaggctccacagcctctgccccagcaccctcagcactcccggcccctccagcacccccagtcttccatggcatgctggagcgggccccagcagagccctcctaccgtgctcccatggagaagcttttctacttacctcatgtctgcagctatacctgtctgtctcgagtcagacctatgaggaatgagcagtaccggggcaagaaccctctgctggtcccgttactatatgacttccggcggatgacagcccggcgtcgagttaaccgcaagatgggctttcatgttatctataagacaccttgtggtctctgccttcggacaatgcaggagatagaacgctaccttttcgagactggctgtgacttcctcttcctggagatgttctgtttggatccatatgttcttgtggaccgaaagtttcagccctataagcctttttactatattttggacatcacttatgggaaggaagatgttcccctatcctgtgtcaatgagattgacacaacccctccaccccaggtggcctacagcaaggaacgtatcccgggcaagggtgttttcattaacacaggccctgaatttctggttggctgtgactgcaaggatgggtgtcgggacaagtccaagtgtgcctgccatcaactaactatccaggctacagcctgtaccccaggaggccaaatcaaccctaactctggctaccagtacaagagactagaagagtgtctacccacaggggtatatgagtgtaacaaacgctgcaaatgtgacccaaacatgtgcacaaaccggttggtgcaacatggactacaagttcggctacagctattcaagacacagaacaagggctggggtatccgctgcttggatgacattgccaaaggctcttttgtttgtatttatgcaggcaaaatcctgacagatgactttgcagacaaggagggtctggaaatgggtgatgagtactttgcaaatctggaccatatcgagagcgtggagaacttcaaagaaggatatgagagtgatgccccctgttcctctgacagcagtggtgtagacttgaaggaccaggaagatggcaacagcggtacagaggaccctgaagagtccaatgatgatagctcagatgataacttctgtaaggatgaggacttcagcaccagttcagtgtggcggagctatgctacccggaggcagacccggggccagaaagagaacggactctctgagacaacttccaaggactcccaccccccagatcttggacccccacatattcctgttcctccctcaatccctgtaggtggctgcaatccaccttcctccgaagagacacccaagaacaaggtggcctcatggttgagctgcaatagtgtcagtgaaggtggttttgctgactctgatagccattcatccttcaagactaatgaaggtggggagggccgggctgggggaagccgaatggaggctgagaaggcctccacctcaggactaggcatcaaggatgagggagacatcaaacaggccaagaaagaggacactgacgaccgaaacaagatgtcagtagttactgaaagctctcgaaattacggttacaatccttctcctgtgaagcctgaaggacttcgccgcccacctagtaagactagtatgcatcaaagccgaagactcatggcttctgctcagtccaaccctgatgatgtcctgacactgtccagcagcacagaaagtgagggggaaagtgggaccagccgaaagcccactgctggtcagacttcggctacagcggttgacagtgatgatatccagaccatatcctctggctctgaaggggatgactttgaggacaagaagaacatgactggtccaatgaagcgtcaagtggcagtaaaatcaacccgaggctttgctcttaaatcaacccatgggattgcaattaaatcaaccaacatggcctctgtggacaagggggagagcgcacctgttcgtaagaacacacgccaattctatgatggcgaggagtcttgctacatcattgatgccaagcttgaaggcaacctgggccgctacctcaaccacagttgcagccccaacctgtttgtccagaatgtcttcgtggatacccatgatcttcgcttcccctgggtggccttctttgccagcaaaagaatccgggctgggacagaacttacttgggactacaactacgaggtgggcagtgtggaaggcaaggagctactctgttgctgtggggccattgaatgcagaggacgtcttctttagaggacagccttcttcccaacccttcttgaactgtcgtttcctcaggaactgggtcttcctgattgttgaaccctgacccgaagtctctgggctagctactccccccagctcctagttgatagaaatgggggttctggaccagatgatcccttccaatgtggtgctagcaggcaggatcccttctccacctccaaaggccctaaagggtggggagagatcaccactctaacctcggcctgacatccctcccatcccatatttgtccaagtgttcctgcttctaacagactttgttcttagaatggagcctgtgtatctactatctccagtttgtattatttcttgaaagtcttttaacaatatgataaaactaaaaaaaaagaaaaaaaccggcacattgtcgggaatactcgggaaaccgagaagaaccccacacaataaaatgggggtgccattccacaagcaggaagggattaaaacgacgaggtcctgcaaaacagcggttcaaaaaaaaggggggaatacgggagacgcactgtaggcataaattaacgcgaccgagg

SEQ ID NO: 439959 - DNA, 5099 bp, Homo sapiens
cgggcgtttcttttgcttccccttccctctttcacgcttcctcccctccccctcctcccttatcccttcgctttcgctcttttccgtcgaggccgacccctgagttgtgagtctggggtctggttggtgaaaaagagcccttgaagctggaagacgggagaggacaaaagcatgtcttcccttcctgggtgcattggtttggatgcagcaacagctacagtggagtctgaagagattgcagagctgcaacaggcagtggttgaggaactgggtatctctatggaggaacttcggcatttcatcgatgaggaactggagaagatggattgtgtacagcaacgcaagaagcagctagcagagttagagacatgggtaatacagaaagaatctgaggtggctcacgttgaccaactctttgatgatgcatccagggcagtgactaattgtgagtctttggtgaaggacttctactccaagctgggactacaataccgggacagtagctctgaggacgaatcttcccggcctacagaaataattgagattcctgatgaagatgatgatgtcctcagtattgattcaggtgatgctgggagcagaactccaaaagaccagaagctccgtgaagctatggctgccttaagaaagtcagctcaagatgttcagaagttcatggatgctgtcaacaagaagagcagttcccaggatctgcataaaggaaccttgagtcagatgtctggagaactaagcaaagatggtgacctgatagtcagcatgcgaattctgggcaagaagagaactaagacttggcacaaaggcacccttattgccatccagacagttgggccagggaagaaatacaaggtgaaatttgacaacaaaggaaagagtctactgtcggggaaccatattgcctatgattaccaccctcctgctgacaagctgtatgtgggcagtcgggtggtcgccaaatacaaagatgggaatcaggtctggctctatgctggcattgtagctgagacaccaaacgtcaaaaacaagctcaggtttctcattttctttgatgatggctatgcttcctatgtcacacagtcggaactgtatcccatttgccggccactgaaaaagacttgggaggacatagaagacatctcctgccgtgacttcatagaggagtatgtcactgcctaccccaaccgccccatggtactgctcaagagtggccagcttatcaagactgagtgggaaggcacgtggtggaagtcccgagttgaggaggtggatggcagcctagtcaggatcctcttcctggatgacaaaagatgtgagtggatctatcgaggctctacacggctggagcccatgttcagcatgaaaacatcctcagcctctgcactggagaagaagcaaggacagctcaggacacgtccaaatatgggtgctgtgaggagcaaaggccctgttgtccagtacacacaggatctgaccggtactggaacccagttcaagccagtggaacccccacagcctacagctccacctgccccacctttcccacctgctccacctctatccccccaagcaggtgacagtgacttggaaagccagcttgcccagtcacggaagcaggtagccaaaaagagcacgtcctttcgaccaggatctgtgggctctggtcattcctcccctacatctcctgcactcagtgaaaatgtctctggtgggaaacctgggatcaaccagacatatagatcacctttaggctccacagcctctgccccagcaccctcagcactcccggcccctccagcacccccagtcttccatggcatgctggagcgggccccagcagagccctcctaccgtgctcccatggagaagcttttctacttacctcatgtctgcagctatacctgtctgtctcgagtcagacctatgaggaatgagcagtaccggggcaagaaccctctgctggtcccgttactatatgacttccggcggatgacagcccggcgtcgagttaaccgcaagatgggctttcatgttatctataagacaccttgtggtctctgccttcggacaatgcaggagatagaacgctaccttttcgagactggctgtgacttcctcttcctggagatgttctgtttggatccatatgttcttgtggaccgaaagtttcagccctataagcctttttactatattttggacatcacttatgggaaggaagatgttcccctatcctgtgtcaatgagattgacacaacccctccaccccaggtggcctacagcaaggaacgtatcccgggcaagggtgttttcattaacacaggccctgaatttctggttggctgtgactgcaaggatgggtgtcgggacaagtccaagtgtgcctgccatcaactaactatccaggctacagcctgtaccccaggaggccaaatcaaccctaactctggctaccagtacaagagactagaagagtgtctacccacaggggtatatgagtgtaacaaacgctgcaaatgtgacccaaacatgtgcacaaaccggttggtgcaacatggactacaagttcggctacagctattcaagacacagaacaagggctggggtatccgctgcttggatgacattgccaaaggctcttttgtttgtatttatgcaggcaaaatcctgacagatgactttgcagacaaggagggtctggaaatgggtgatgagtactttgcaaatctggaccatatcgagagcgtggagaacttcaaagaaggatatgagagtgatgccccctgttcctctgacagcagtggtgtagacttgaaggaccaggaagatggcaacagcggtacagaggaccctgaagagtccaatgatgatagctcagatgataacttctgtaaggatgaggacttcagcaccagttcagtgtggcggagctatgctacccggaggcagacccggggccagaaagagaacggactctctgagacaacttccaaggactcccaccccccagatcttggacccccacatattcctgttcctccctcaatccctgtaggtggctgcaatccaccttcctccgaagagacacccaagaacaaggtggcctcatggttgagctgcaatagtgtcagtgaaggtggttttgctgactctgatagccattcatccttcaagactaatgaaggtggggagggccgggctgggggaagccgaatggaggctgagaaggcctccacctcaggactaggcatcaaggatgagggagacatcaaacaggccaagaaagaggacactgacgaccgaaacaagatgtcagtagttactgaaagctctcgaaattacggttacaatccttctcctgtgaagcctgaaggacttcgccgcccacctagtaagactagtatgcatcaaagccgaagactcatggcttctgctcagtccaaccctgatgatgtcctgacactgtccagcagcacagaaagtgagggggaaagtgggaccagccgaaagcccactgctggtcagacttcggctacagcggttgacagtgatgatatccagaccatatcctctggctctgaaggggatgactttgaggacaagaagaacatgactggtccaatgaagcgtcaagtggcagtaaaatcaacccgaggctttgctcttaaatcaacccatgggattgcaattaaatcaaccaacatggcctctgtggacaagggggagagcgcacctgttcgtaagaacacacgccaattctatgatggcgaggagtcttgctacatcattgatgccaagcttgaaggcaacctgggccgctacctcaaccacagttgcagccccaacctgtttgtccagaatgtcttcgtggatacccatgatcttcgcttcccctgggtggccttctttgccagcaaaagaatccgggctgggacagaacttacttgggactacaactacgaggtgggcagtgtggaaggcaaggagctactctgttgctgtggggccattgaatgcagaggacgtcttctttagaggacagccttcttcccaacccttcttgaactgtcgtttcctcaggaactgggtcttcctgattgttgaaccctgacccgaagtctctgggctagctactccccccagctcctagttgatagaaatgggggttctggaccagatgatcccttccaatgtggtgctagcaggcaggatcccttctccacctccaaaggccctaaagggtggggagagatcaccactctaacctcggcctgacatccctcccatcccatatttgtccaagtgttcctgcttctaacagactttgttcttagaatggagcctgtgtatctactatctccagtttgtattatttcttgaaagtcttttaacaatatgataaaactaaaaaaaaaaaaaaaaaaaaaaaaacaaacaaaaaaaaaaaaaacaaacaaaaaaaaaacgcagacggcgagcagcgcgagagaagacgaagaacgagaagaaaggctcgacgaagacacgacgacgagaagcggaggaggagcggcccacaccaccggagggcgcccgcgcgccacagcggcgcgagacgcgcgcgaccgcggcggacagacaggcggcgccacccaacacaacacaggcacgggagagaccatacgtaacacaagaagaagacagacaagccggaagcgacgggagaagaagaaaccacagacgcagaccccggagaagcagcgacgagccggacaggccgagaagaaagaacgaacacacgccgacaagcccgcgcgcacccagacaacccgagaagtaggccgcacgacggcgaccacgacagcgaaaagaccaacgacacaaaggaaaaagagaagcaggcggagggcggagggcgggaacacgagaggacagacaagaacagcagagaacgcaacagacaacgcagcgtaacgagcagagaccaaggccaaaaatacgacgacagcagagggagagaacgacagcagcggacgacagcgaaccaaacggaagagacggaggagcgcggaagcaagcaagcccccagggcagcaacgagggaggaa

SEQ ID NO: 439960 - DNA, 4864 bp, Homo sapiens
cgggcgtttcttttgcttccccttccctctttcacgcttcctcccctccccctcctcccttatcccttcgctttcgctcttttccgtcgaggccgacccctgagttgtgagtctggggtctggttggtgaaaaagagcccttgaagctggaagacgggagaggacaaaagcatgtcttcccttcctgggtgcattggtttggatgcagcaacagctacagtggagtctgaagagattgcagagctgcaacaggcagtggttgaggaactgggtatctctatggaggaacttcggcatttcatcgatgaggaactggagaagatggattgtgtacagcaacgcaagaagcagctagcagagttagagacatgggtaatacagaaagaatctgaggtggctcacgttgaccaactctttgatgatgcatccagggcagtgactaattgtgagtctttggtgaaggacttctactccaagctgggactacaataccgggacagtagctctgaggacgaatcttcccggcctacagaaataattgagattcctgatgaagatgatgatgtcctcagtattgattcaggtgatgctgggagcagaactccaaaagaccagaagctccgtgaagctatggctgccttaagaaagtcagctcaagatgttcagaagttcatggatgctgtcaacaagaagagcagttcccaggatctgcataaaggaaccttgagtcagatgtctggagaactaagcaaagatggtgacctgatagtcagcatgcgaattctgggcaagaagagaactaagacttggcacaaaggcacccttattgccatccagacagttgggccagggaagaaatacaaggtgaaatttgacaacaaaggaaagagtctactgtcggggaaccatattgcctatgattaccaccctcctgctgacaagctgtatgtgggcagtcgggtggtcgccaaatacaaagatgggaatcaggtctggctctatgctggcattgtagctgagacaccaaacgtcaaaaacaagctcaggtttctcattttctttgatgatggctatgcttcctatgtcacacagtcggaactgtatcccatttgccggccactgaaaaagacttgggaggacatagaagacatctcctgccgtgacttcatagaggagtatgtcactgcctaccccaaccgccccatggtactgctcaagagtggccagcttatcaagactgagtgggaaggcacgtggtggaagtcccgagttgaggaggtggatggcagcctagtcaggatcctcttcctggatgacaaaagatgtgagtggatctatcgaggctctacacggctggagcccatgttcagcatgaaaacatcctcagcctctgcactggagaagaagcaaggacagctcaggacacgtccaaatatgggtgctgtgaggagcaaaggccctgttgtccagtacacacaggatctgaccggtactggaacccagttcaagccagtggaacccccacagcctacagctccacctgccccacctttcccacctgctccacctctatccccccaagcaggtgacagtgacttggaaagccagcttgcccagtcacggaagcaggtagccaaaaagagcacgtcctttcgaccaggatctgtgggctctggtcattcctcccctacatctcctgcactcagtgaaaatgtctctggtgggaaacctgggatcaaccagacatatagatcacctttaggctccacagcctctgccccagcaccctcagcactcccggcccctccagcacccccagtcttccatggcatgctggagcgggccccagcagagccctcctaccgtgctcccatggagaagcttttctacttacctcatgtctgcagctatacctgtctgtctcgagtcagacctatgaggaatgagcagtaccggggcaagaaccctctgctggtcccgttactatatgacttccggcggatgacagcccggcgtcgagttaaccgcaagatgggctttcatgttatctataagacaccttgtggtctctgccttcggacaatgcaggagatagaacgctaccttttcgagactggctgtgacttcctcttcctggagatgttctgtttggatccatatgttcttgtggaccgaaagtttcagccctataagcctttttactatattttggacatcacttatgggaaggaagatgttcccctatcctgtgtcaatgagattgacacaacccctccaccccaggtggcctacagcaaggaacgtatcccgggcaagggtgttttcattaacacaggccctgaatttctggttggctgtgactgcaaggatgggtgtcgggacaagtccaagtgtgcctgccatcaactaactatccaggctacagcctgtaccccaggaggccaaatcaaccctaactctggctaccagtacaagagactagaagagtgtctacccacaggggtatatgagtgtaacaaacgctgcaaatgtgacccaaacatgtgcacaaaccggttggtgcaacatggactacaagttcggctacagctattcaagacacagaacaagggctggggtatccgctgcttggatgacattgccaaaggctcttttgtttgtatttatgcaggcaaaatcctgacagatgactttgcagacaaggagggtctggaaatgggtgatgagtactttgcaaatctggaccatatcgagagcgtggagaacttcaaagaaggatatgagagtgatgccccctgttcctctgacagcagtggtgtagacttgaaggaccaggaagatggcaacagcggtacagaggaccctgaagagtccaatgatgatagctcagatgataacttctgtaaggatgaggacttcagcaccagttcagtgtggcggagctatgctacccggaggcagacccggggccagaaagagaacggactctctgagacaacttccaaggactcccaccccccagatcttggacccccacatattcctgttcctccctcaatccctgtaggtggctgcaatccaccttcctccgaagagacacccaagaacaaggtggcctcatggttgagctgcaatagtgtcagtgaaggtggttttgctgactctgatagccattcatccttcaagactaatgaaggtggggagggccgggctgggggaagccgaatggaggctgagaaggcctccacctcaggactaggcatcaaggatgagggagacatcaaacaggccaagaaagaggacactgacgaccgaaacaagatgtcagtagttactgaaagctctcgaaattacggttacaatccttctcctgtgaagcctgaaggacttcgccgcccacctagtaagactagtatgcatcaaagccgaagactcatggcttctgctcagtccaaccctgatgtaagtcacctcaagcttattcagagtctaataaaggaaaatggccattgtcacctcatcaagtccttcactataattactgttaggtcttctcctacttcttctagccttgactgcgctgccttattttctttcatccagcatctaatcttcctcttgccaccgccctttcctgccaaaccgtgggtaacagcaaggacttaaaggagcccttcccatttacttctcttacttcttaccctcctgcttccccaggatgtcctgacactgtccagcagcacagaaagtgagggggaaagtgggaccagccgaaagcccactgctggtcagacttcggctacagcggttgacagtgatgatatccagaccatatcctctggctctgaaggggatgactttgaggacaagaagaacatgactggtccaatgaagcgtcaagtggcagtaaaatcaacccgaggctttgctcttaaatcaacccatgggattgcaattaaatcaaccaacatggcctctgtggacaagggggagagcgcacctgttcgtaagaacacacgccaattctatgatggcgaggagtcttgctacatcattgatgccaagcttgaaggcaacctgggccgctacctcaaccacagttgcagccccaacctgtttgtccagaatgtcttcgtggatacccatgatcttcgcttcccctgggtggccttctttgccagcaaaagaatccgggctgggacagaacttacttgggactacaactacgaggtgggcagtgtggaaggcaaggagctactctgttgctgtggggccattgaatgcagaggacgtcttctttagaggacagccttcttcccaacccttcttgaactgtcgtttcctcaggaactgggtcttcctgattgttgaaccctgacccgaagtctctgggctagctactccccccagctcctagttgatagaaatgggggttctggaccagatgatcccttccaatgtggtgctagcaggcaggatcccttctccacctccaaaggccctaaagggtggggagagatcaccactctaacctcggcctgacatccctcccatcccatatttgtccaagtgttcctgcttctaacagactttgttcttagaatggagcctgtgtatctactatctccagtttgtattatttcttgaaagtcttttaacaatatgataaaactaaaaaaaaagaaaaaaaccggcacattgtcgggaatactcgggaaaccgagaagaaccccacacaataaaatgggggtgccattccacaagcaggaagggattaaaacgacgaggtcctgcaaaacagcggttcaaaaaaaaggggggaatacgggagacgcactgtaggcataaattaacgcgaccgagg

SEQ ID NO: 439961 - DNA, 3609 bp, Homo sapiens
agagttccaagttttaatatggtgcttttaagaagagagccaccggtctcagcttataattacattttcacaaattaatccaaaattttacgtatgaataaaaaggagtaaaatcttttccctatcaagacatgccctacctgccctctcagttctacttcttccttgaaacagagtatgtcactgcctaccccaaccgccccatggtactgctcaagagtggccagcttatcaagactgagtgggaaggcacgtggtggaagtcccgagttgaggaggtggatggcagcctagtcaggatcctcttcctggatgacaaaagatgtgagtggatctatcgaggctctacacggctggagcccatgttcagcatgaaaacatcctcagcctctgcactggagaagaagcaaggacagctcaggacacgtccaaatatgggtgctgtgaggagcaaaggccctgttgtccagtacacacaggatctgaccggtactggaacccagttcaagccagtggaacccccacagcctacagctccacctgccccacctttcccacctgctccacctctatccccccaagcaggtgacagtgacttggaaagccagcttgcccagtcacggaagcaggtagccaaaaagagcacgtcctttcgaccaggatctgtgggctctggtcattcctcccctacatctcctgcactcagtgaaaatgtctctggtgggaaacctgggatcaaccagacatatagatcacctttaggctccacagcctctgccccagcaccctcagcactcccggcccctccagcacccccagtcttccatggcatgctggagcgggccccagcagagccctcctaccgtgctcccatggagaagcttttctacttacctcatgtctgcagctatacctgtctgtctcgagtcagacctatgaggaatgagcagtaccggggcaagaaccctctgctggtcccgttactatatgacttccggcggatgacagcccggcgtcgagttaaccgcaagatgggctttcatgttatctataagacaccttgtggtctctgccttcggacaatgcaggagatagaacgctaccttttcgagactggctgtgacttcctcttcctggagatgttctgtttggatccatatgttcttgtggaccgaaagtttcagccctataagcctttttactatattttggacatcacttatgggaaggaagatgttcccctatcctgtgtcaatgagattgacacaacccctccaccccaggtggcctacagcaaggaacgtatcccgggcaagggtgttttcattaacacaggccctgaatttctggttggctgtgactgcaaggatgggtgtcgggacaagtccaagtgtgcctgccatcaactaactatccaggctacagcctgtaccccaggaggccaaatcaaccctaactctggctaccagtacaagagactagaagagtgtctacccacaggggtatatgagtgtaacaaacgctgcaaatgtgacccaaacatgtgcacaaaccggttggtgcaacatggactacaagttcggctacagctattcaagacacagaacaagggctggggtatccgctgcttggatgacattgccaaaggctcttttgtttgtatttatgcaggcaaaatcctgacagatgactttgcagacaaggagggtctggaaatgggtgatgagtactttgcaaatctggaccatatcgagagcgtggagaacttcaaagaaggatatgagagtgatgccccctgttcctctgacagcagtggtgtagacttgaaggaccaggaagatggcaacagcggtacagaggaccctgaagagtccaatgatgatagctcagatgataacttctgtaaggatgaggacttcagcaccagttcagtgtggcggagctatgctacccggaggcagacccggggccagaaagagaacggactctctgagacaacttccaaggactcccaccccccagatcttggacccccacatattcctgttcctccctcaatccctgtaggtggctgcaatccaccttcctccgaagagacacccaagaacaaggtggcctcatggttgagctgcaatagtgtcagtgaaggtggttttgctgactctgatagccattcatccttcaagactaatgaaggtggggagggccgggctgggggaagccgaatggaggctgagaaggcctccacctcaggactaggcatcaaggatgagggagacatcaaacaggccaagaaagaggacactgacgaccgaaacaagatgtcagtagttactgaaagctctcgaaattacggttacaatccttctcctgtgaagcctgaaggacttcgccgcccacctagtaagactagtatgcatcaaagccgaagactcatggcttctgctcagtccaaccctgatgatgtcctgacactgtccagcagcacagaaagtgagggggaaagtgggaccagccgaaagcccactgctggtcagacttcggctacagcggttgacagtgatgatatccagaccatatcctctggctctgaaggggatgactttgaggacaagaagaacatgactggtccaatgaagcgtcaagtggcagtaaaatcaacccgaggctttgctcttaaatcaacccatgggattgcaattaaatcaaccaacatggcctctgtggacaagggggagagcgcacctgttcgtaagaacacacgccaattctatgatggcgaggagtcttgctacatcattgatgccaagcttgaaggcaacctgggccgctacctcaaccacagttgcagccccaacctgtttgtccagaatgtcttcgtggatacccatgatcttcgcttcccctgggtggccttctttgccagcaaaagaatccgggctgggacagaacttacttgggactacaactacgaggtgggcagtgtggaaggcaaggagctactctgttgctgtggggccattgaatgcagaggacgtcttctttagaggacagccttcttcccaacccttcttgaactgtcgtttcctcaggaactgggtcttcctgattgttgaaccctgacccgaagtctctgggctagctactccccccagctcctagttgatagaaatgggggttctggaccagatgatcccttccaatgtggtgctagcaggcaggatcccttctccacctccaaaggccctaaagggtggggagagatcaccactctaacctcggcctgacatccctcccatcccatatttgtccaagtgttcctgcttctaacagactttgttcttagaatggagcctgtgtatctactatctccagtttgtattatttcttgaaagtcttttaacaatatgataaaactaaaaaaaaagaaaaaaaccggcacattgtcgggaatactcgggaaaccgagaagaaccccacacaataaaatgggggtgccattccacaagcaggaagggattaaaacgacgaggtcctgcaaaacagcggttcaaaaaaaaggggggaatacgggagacgcactgtaggcataaattaacgcgaccgagg

SEQ ID NO: 439962 - DNA, 2107 bp, Homo sapiens
cttaaacctggaagccaaaagttccattaacccaaaatcccccccccccccccccccctgggggaaaaaaaaaaatccatctggaaaaaaaaaaaaaaaaaagcaaacaaaaaaaaaaactaataggtccccataaccctagaaggcctttaattctcttcattctcaggcaaaatcctgacagatgactttgcagacaaggagggtctggaaatgggtgatgagtactttgcaaatctggaccatatcgagagcgtggagaacttcaaagaaggatatgagagtgatgccccctgttcctctgacagcagtggtgtagacttgaaggaccaggaagatggcaacagcggtacagaggaccctgaagagtccaatgatgatagctcagatgataacttctgtaaggatgaggacttcagcaccagttcagtgtggcggagctatgctacccggaggcagacccggggccagaaagagaacggactctctgagacaacttccaaggactcccaccccccagatcttggacccccacatattcctgttcctccctcaatccctgtaggtggctgcaatccaccttcctccgaagagacacccaagaacaaggtggcctcatggttgagctgcaatagtgtcagtgaaggtggttttgctgactctgatagccattcatccttcaagactaatgaaggtggggagggccgggctgggggaagccgaatggaggctgagaaggcctccacctcaggactaggcatcaaggatgagggagacatcaaacaggccaagaaagaggacactgacgaccgaaacaagatgtcagtagttactgaaagctctcgaaattacggttacaatccttctcctgtgaagcctgaaggacttcgccgcccacctagtaagactagtatgcatcaaagccgaagactcatggcttctgctcagtccaaccctgatgatgtcctgacactgtccagcagcacagaaagtgagggggaaagtgggaccagccgaaagcccactgctggtcagacttcggctacagcggttgacagtgatgatatccagaccatatcctctggctctgaaggggatgactttgaggacaagaagaacatgactggtccaatgaagcgtcaagtggcagtaaaatcaacccgaggctttgctcttaaatcaacccatgggattgcaattaaatcaaccaacatggcctctgtggacaagggggagagcgcacctgttcgtaagaacacacgccaattctatgatggcgaggagtcttgctacatcattgatgccaagcttgaaggcaacctgggccgctacctcaaccacagttgcagccccaacctgtttgtccagaatgtcttcgtggatacccatgatcttcgcttcccctgggtggccttctttgccagcaaaagaatccgggctgggacagaacttacttgggactacaactacgaggtgggcagtgtggaaggcaaggagctactctgttgctgtggggccattgaatgcagaggacgtcttctttagaggacagccttcttcccaacccttcttgaactgtcgtttcctcaggaactgggtcttcctgattgttgaaccctgacccgaagtctctgggctagctactccccccagctcctagttgatagaaatgggggttctggaccagatgatcccttccaatgtggtgctagcaggcaggatcccttctccacctccaaaggccctaaagggtggggagagatcaccactctaacctcggcctgacatccctcccatcccatatttgtccaagtgttcctgcttctaacagactttgttcttagaatggagcctgtgtatctactatctccagtttgtattatttcttgaaagtcttttaacaatatgataaaactaaaaaaaaagaaaaaaaccggcacattgtcgggaatactcgggaaaccgagaagaaccccacacaataaaatgggggtgccattccacaagcaggaagggattaaaacgacgaggtcctgcaaaacagcggttcaaaaaaaaggggggaatacgggagacgcactgtaggcataaattaacgcgaccgagg

SEQ ID NO: 439963 - DNA, 1166 bp, Homo sapiens
catctgctgagtccgtttagaagcatttgcggtggacgatggaggggcccgactcgtcgtactcctgcttgctaatccacatctgctggaaggtggacagtgaggccaggatggagccaccgatccacaccgagtacttgcgctctgggggtgcgatgatcttgaggacaagaagaacatgactggtccaatgaagcgtcaagtggcagtaaaatcaacccgaggctttgctcttaaatcaacccatgggattgcaattaaatcaaccaacatggcctctgtggacaagggggagagcgcacctgttcgtaagaacacacgccaattctatgatggcgaggagtcttgctacatcattgatgccaagcttgaaggcaacctgggccgctacctcaaccacagttgcagccccaacctgtttgtccagaatgtcttcgtggatacccatgatcttcgcttcccctgggtggccttctttgccagcaaaagaatccgggctgggacagaacttacttgggactacaactacgaggtgggcagtgtggaaggcaaggagctactctgttgctgtggggccattgaatgcagaggacgtcttctttagaggacagccttcttcccaacccttcttgaactgtcgtttcctcaggaactgggtcttcctgattgttgaaccctgacccgaagtctctgggctagctactccccccagctcctagttgatagaaatgggggttctggaccagatgatcccttccaatgtggtgctagcaggcaggatcccttctccacctccaaaggccctaaagggtggggagagatcaccactctaacctcggcctgacatccctcccatcccatatttgtccaagtgttcctgcttctaacagactttgttcttagaatggagcctgtgtatctactatctccagtttgtattatttcttgaaagtcttttaacaatatgataaaactaaaaaaaaagaaaaaaaccggcacattgtcgggaatactcgggaaaccgagaagaaccccacacaataaaatgggggtgccattccacaagcaggaagggattaaaacgacgaggtcctgcaaaacagcggttcaaaaaaaaggggggaatacgggagacgcactgtaggcataaattaacgcgaccgagg

SEQ ID NO: 439964 - DNA, 1531 bp, Homo sapiens
cgggcgtttcttttgcttccccttccctctttcacgcttcctcccctccccctcctcccttatcccttcgctttcgctcttttccgtcgaggccgacccctgagttgtgagtctggggtctggttggtgaaaaagagcccttgaagctggaagacgggagaggacaaaagcatgtcttcccttcctgggtgcattggtttggatgcagcaacagctacagtggagtctgaagagattgcagagctgcaacaggcagtggttgaggaactgggtatctctatggaggaacttcggcatttcatcgatgaggaactggagaagatggattgtgtacagcaacgcaagaagcagctagcagagttagagacatgggtaatacagaaagaatctgaggtggctcacgttgaccaactctttgatgatgcatccagggcagtgactaattgtgagtctttggtgaaggacttctactccaagctgggactacaataccgggacagtagctctgaggacgaatcttcccggcctacagaaataattgagattcctgatgaagatgatgatgtcctcagtattgattcaggtgatgctgggagcagaactccaaaagaccagaagctccgtgaagctatggctgccttaagaaagtcagctcaagatgttcagaagttcatggatgctgtcaacaagaagagcagttcccaggatctgcataaaggaaccttgagtcagatgtctggagaactaagcaaagatggtgacctgatagtcagcatgcgaattctgggcaagaagagaactaagacttggcacaaaggcacccttattgccatccagacagttgggccagggaagaaatacaaggtgaaatttgacaacaaaggaaagagtctactgtcggggaaccatattgcctatgattaccaccctcctgctgacaagctgtatgtgggcagtcgggtggtcgccaaatacaaagatgggaatcaggtctggctctatgctggcattgtagctgagacaccaaacgtcaaaaacaagctcaggtttctcattttctttgatgatggctatgcttcctatgtcacacagtcggaactgtatcccatttgccggccactgaaaaagacttgggaggacatagaagacatctcctgccgtgacttcatagaggagtatgtcactgcctaccccaaccgccccatggtactgctcaagagtggccagcttatcaagactgagtgggaaggcacgtggtggaagtcccgagttgaggaggtggatggcagcctagtcaggatcctcttcctggtactgttcttctctacaattttggaggcagaggttggtggggggggaacttaagaagcagtaatgaggatggttttatagctattccatagccttcctctttcttatcctcgtatgtgttctcactgtttttggtcaaattttactttgccctttttgttgttcctctgcaggtcattgttgaaaataaattatctgaattataatacgaatctgcatg

SEQ ID NO: 439965 - DNA, 1460 bp, Homo sapiens
cgggcgtttcttttgcttccccttccctctttcacgcttcctcccctccccctcctcccttatcccttcgctttcgctcttttccgtcgaggccgacccctgagttgtgagtctggggtctggttggtgaaaaagagcccttgaagctggaagacgggagaggacaaaagcatgtcttcccttcctgggtgcattggtttggatgcagcaacagctacagtggagtctgaagagattgcagagctgcaacaggcagtggttgaggaactgggtatctctatggaggaacttcggcatttcatcgatgaggaactggagaagatggattgtgtacagcaacgcaagaagcagctagcagagttagagacatgggtaatacagaaagaatctgaggtggctcacgttgaccaactctttgatgatgcatccagggcagtgactaattgtgagtctttggtgaaggacttctactccaagctgggactacaataccgggacagtagctctgaggacgaatcttcccggcctacagaaataattgagattcctgatgaagatgatgatgtcctcagtattgattcaggtgatgctgggagcagaactccaaaagaccagaagctccgtgaagctatggctgccttaagaaagtcagctcaagatgttcagaagttcatggatgctgtcaacaagaagagcagttcccaggatctgcataaaggttagggtcaagaaatacctgggtacagatgggaggtgaattcttacagagattttgtcttaagtcttatgtctgctaattgtttgtgacatgccagactcagtatccttagtagttatgaaatcccagttacattgatggtgatttttccagtctgtgatggttttatctcaatacctctttagcgtcctacatttaggctgtttccatcctcatgactgcttccaggtggagattagggagaagagaatcactcagactcttgttacaaaaaggtttgaggccaggtgtggtggctcatatctgtaattctagcagctttgggaggctgaggcaggaggatcacttgaggcccagcattaaagaccagcctcggcaacatagtgaaaccccatctctacaaaaaaaaatgtttaaaaattctccagatgggccaggcacggtggctcacgcctgtaatcccagcactttgggaggccgaggtgggcggatcacaaggtcaggagttcgacaccagcctgaccaacatggtgaaactctgtctctattaaaaatacaaaaattagccaggcgtggtggcgcacgcctgtaatctcagctactcaggagcccgaggcaggagaatcgcttgaacccggaaggtgaaggttgcagtgagccgagatcatgccactgcactccagcctgggcaacagaacgagactccatctcaaaaaaaaaaaaaaaaattggccgggcacag

SEQ ID NO: 439966 - DNA, 871 bp, Homo sapiens
ttaaatgctgatgggggggagatataaataataagagacaaacctatcttcaaaaagactagtaatgtgaaataaacatttgcatgaaacagtaggattgaagaataagaacaaaagagcactacgtgtgagaagctcacttgaaagtcccaaattgaaataaacactgttttgatgagaaggggcctcctttttaatattctttccatgtggaatcatcagcagtaaagagatctatagatctggaagcagaagagctggctggatggaggggactttgctgacatcccctctgaaaaataaggtcagaagagtgggcccagggggagggtgattttcatgatccgtggcatttcattacccttgtaaacagatactggagctgtgctcatagccaaactggaaaactagattatttagcaggttttctttccatagctgagccataatcttcccttaggagagatactgtatcttatccttgatggtacagtcagtgcctagaactgaaaaactactcaataaatggatttgttgttttgtgataaggatgatgtcttcttactttgcccaagcctggaaagtaggccaaatatataatagagtttctttcatcttcccagctcgagagtcaggatgtctcagatttaacaacagttgaaagggaagactcatcattacttaatcctgcagccaaaaaactgaaaatagataccaaagaaaagaaagagaaaaagcagaaagtagatgaagatgagattcagaagatgcagtaagtcactttcttatcattccccatttcgaggctctcacttgaccacacaaatttaataaatttttcttggtgtttaaattttcttttataaactca

SEQ ID NO: 439967 - DNA, 1580 bp, Homo sapiens
caggagagcggtaggggtgatgtcatcgctgcgcgacgacaggaagtaagatcctggcctgtgcagctcgggtttccgagcttctgcctcaggcatctccgcgatctcctctcccctccaatcctatccgtgatggacgatgcccacgagtcgccctccgacaaaggtggagagacaggggagtcggatgagacggccgctgtgcccggggacccgggggctaccgacaccgatggaatcccagaggaaactgacggagacgcagatgtggacttgaaagaagctgcagcggaggaaggcgagctcgagagtcaggatgtctcagatttaacaacagttgaaagggaagactcatcattacttaatcctgcagccaaaaaactgaaaatagataccaaagaaaagaaagagaaaaagcagaaagtagatgaagatgagattcagaagatgcaaatcctggtttcttctttttctgaggagcagctgaaccgttatgaaatgtatcgccgctcagctttccctaaggcagccatcaaaaggctgatccagtccatcactggcacctctgtgtctcagaatgttgttattgctatgtctggtatttccaaggttttcgtcggggaggtggtagaagaagcactggatgtgtgtgagaagtggggagaaatgccaccactacaacccaaacatatgagggaagccgttagaaggttaaagtcaaaaggacagatccctaactcgaagcacaaaaaaatcatcttcttctagaccaaagtctagaaaggcctatgttactgacggaagaagtattggttccagacttcctataagactgtctgcattggtgctttagtatctcaggcctccaaggattccatgatgattttaatgtctttctcaaaactctgatatttgtcacacctagaaagtatgtagcctgattgatacttgccttgactaaattttgggacctcttggggcattttgaagtatttaactgtcttgaccagttggaagaagatacgtgggccataagcatcttctggacaggggaactgctttcagagagaaaacctttccaagagagttttgttttgttttggtttcgttttgtttgagatagggtcttgctctatcacctaggctggagtgcagcggcatgactgcagccttgaactcctgggcttaagtgaccctcccacctcagtctcctgagtagctaggactacaggcacacactactgtgcccagctaacttatttttattttttatggagatggggtcttgctttgttgcccaggctggtcgtgaactcctggcttcaagcagtcctcctgcctcagcctcctaaagtgctgagggctttaatggtttcacattgaagcctgaagttgctaagacttaggttgtttcttatatctggttttaagtagatgaaacaaccagaaacttttacttgtgatactctaccatgaaggatgcggtaatggcaggaatagcagaataattggtgcttgtaaacatttaagattctcctgtggattttggtgagtgatcattaaactgttttccaacttgc

SEQ ID NO: 439968 - DNA, 1548 bp, Homo sapiens
  misc_feature (30)..(30): n is a, c, g, or t
ggctaggtacgaggctggtgtgaatcggcngaggctcgggtttccgagcttctgcctcaggcatctccgcgatctcctctcccctccaatcctatccgtgatggacgatgcccacgagtcgccctccgacaaaggtggagagacaggggagtcggatgagacggccgctgtgcccggggacccgggggctaccgacaccgatggaatcccagaggaaactgacggagacgcagatgtggacttgaaagaagctgcagcggaggaaggcgagctcgagagtcaggatgtctcagatttaacaacagttgaaagggaagactcatcattacttaatcctgcagccaaaaaactgaaaatagataccaaagaaaagaaagagaaaaagcagaaagtagatgaagatgagattcagaagatgcaaatcctggtttcttctttttctgaggagcagctgaaccgttatgaaatgtatcgccgctcagctttccctaaggcagccatcaaaaggctgatccagtccatcactggcacctctgtgtctcagaatgttgttattgctatgtctggtatttccaaggttttcgtcggggaggtggtagaagaagcactggatgtgtgtgagaagtggggagaaatgccaccactacaacccaaacatatgagggaagccgttagaaggttaaagtcaaaaggacagatccctaactcgaagcacaaaaaaatcatcttcttctagaccaaagtctagaaaggcctatgttactgacggaagaagtattggttccagacttcctataagactgtctgcattggtgctttagtatctcaggcctccaaggattccatgatgattttaatgtctttctcaaaactctgatatttgtcacacctagaaagtatgtagcctgattgatacttgccttgactaaattttgggacctcttggggcattttgaagtatttaactgtcttgaccagttggaagaagatacgtgggccataagcatcttctggacaggggaactgctttcagagagaaaacctttccaagagagttttgttttgttttggtttcgttttgtttgagatagggtcttgctctatcacctaggctggagtgcagcggcatgactgcagccttgaactcctgggcttaagtgaccctcccacctcagtctcctgagtagctaggactacaggcacacactactgtgcccagctaacttatttttattttttatggagatggggtcttgctttgttgcccaggctggtcgtgaactcctggcttcaagcagtcctcctgcctcagcctcctaaagtgctgagggctttaatggtttcacattgaagcctgaagttgctaagacttaggttgtttcttatatctggttttaagtagatgaaacaaccagaaacttttacttgtgatactctaccatgaaggatgcggtaatggcaggaatagcagaataattggtgcttgtaaacatttaagattctcctgtggattttggtgagtgatcattaaactgttttccaacttgc

SEQ ID NO: 439969 - DNA, 1900 bp, Homo sapiens
ttaaatgctgatgggggggagatataaataataagagacaaacctatcttcaaaaagactagtaatgtgaaataaacatttgcatgaaacagtaggattgaagaataagaacaaaagagcactacgtgtgagaagctcacttgaaagtcccaaattgaaataaacactgttttgatgagaaggggcctcctttttaatattctttccatgtggaatcatcagcagtaaagagatctatagatctggaagcagaagagctggctggatggaggggactttgctgacatcccctctgaaaaataaggtcagaagagtgggcccagggggagggtgattttcatgatccgtggcatttcattacccttgtaaacagatactggagctgtgctcatagccaaactggaaaactagattatttagcaggttttctttccatagctgagccataatcttcccttaggagagatactgtatcttatccttgatggtacagtcagtgcctagaactgaaaaactactcaataaatggatttgttgttttgtgataaggatgatgtcttcttactttgcccaagcctggaaagtaggccaaatatataatagagtttctttcatcttcccagctcgagagtcaggatgtctcagatttaacaacagttgaaagggaagactcatcattacttaatcctgcagccaaaaaactgaaaatagataccaaagaaaagaaagagaaaaagcagaaagtagatgaagatgagattcagaagatgcaaatcctggtttcttctttttctgaggagcagctgaaccgttatgaaatgtatcgccgctcagctttccctaaggcagccatcaaaaggctgatccagtccatcactggcacctctgtgtctcagaatgttgttattgctatgtctggtatttccaaggttttcgtcggggaggtggtagaagaagcactggatgtgtgtgagaagtggggagaaatgccaccactacaacccaaacatatgagggaagccgttagaaggttaaagtcaaaaggacagatccctaactcgaagcacaaaaaaatcatcttcttctagaccaaagtctagaaaggcctatgttactgacggaagaagtattggttccagacttcctataagactgtctgcattggtgctttagtatctcaggcctccaaggattccatgatgattttaatgtctttctcaaaactctgatatttgtcacacctagaaagtatgtagcctgattgatacttgccttgactaaattttgggacctcttggggcattttgaagtatttaactgtcttgaccagttggaagaagatacgtgggccataagcatcttctggacaggggaactgctttcagagagaaaacctttccaagagagttttgttttgttttggtttcgttttgtttgagatagggtcttgctctatcacctaggctggagtgcagcggcatgactgcagccttgaactcctgggcttaagtgaccctcccacctcagtctcctgagtagctaggactacaggcacacactactgtgcccagctaacttatttttattttttatggagatggggtcttgctttgttgcccaggctggtcgtgaactcctggcttcaagcagtcctcctgcctcagcctcctaaagtgctgagggctttaatggtttcacattgaagcctgaagttgctaagacttaggttgtttcttatatctggttttaagtagatgaaacaaccagaaacttttacttgtgatactctaccatgaaggatgcggtaatggcaggaatagcagaataattggtgcttgtaaacatttaagattctcctgtggattttggtgagtgatcattaaactgttttccaacttgc

SEQ ID NO: 439970 - DNA, 1483 bp, Homo sapiens
caggagagcggtaggggtgatgtcatcgctgcgcgacgacaggaagtaagatcctggcctgtgcagctcgggtttccgagcttctgcctcaggcatctccgcgatctcctctcccctccaatcctatccgtgatggacgatgcccacgagtcgccctccgacaaaggtggagagacaggggagtcggatgagacggccgctgtgcccggggacccgggggctaccgacaccgatggaatcccagaggaaactgacggagacgcagatgtggacttgaaagaagctgcagcggaggaaggcgagctcgagagtcaggatgtctcagatttaacaacagttgaaagggaagactcatcattacttaatcctgcagccaaaaaactgaaaatagataccaaagaaaagaaagagaaaaagcagaaagtagatgaagatgagattcagaagatgcaaatcctggtttcttctttttctgaggagcagctgaaccgttatgaaatgtatcgccgctcagctttccctaaggcagccatcaaaaggcactggatgtgtgtgagaagtggggagaaatgccaccactacaacccaaacatatgagggaagccgttagaaggttaaagtcaaaaggacagatccctaactcgaagcacaaaaaaatcatcttcttctagaccaaagtctagaaaggcctatgttactgacggaagaagtattggttccagacttcctataagactgtctgcattggtgctttagtatctcaggcctccaaggattccatgatgattttaatgtctttctcaaaactctgatatttgtcacacctagaaagtatgtagcctgattgatacttgccttgactaaattttgggacctcttggggcattttgaagtatttaactgtcttgaccagttggaagaagatacgtgggccataagcatcttctggacaggggaactgctttcagagagaaaacctttccaagagagttttgttttgttttggtttcgttttgtttgagatagggtcttgctctatcacctaggctggagtgcagcggcatgactgcagccttgaactcctgggcttaagtgaccctcccacctcagtctcctgagtagctaggactacaggcacacactactgtgcccagctaacttatttttattttttatggagatggggtcttgctttgttgcccaggctggtcgtgaactcctggcttcaagcagtcctcctgcctcagcctcctaaagtgctgagggctttaatggtttcacattgaagcctgaagttgctaagacttaggttgtttcttatatctggttttaagtagatgaaacaaccagaaacttttacttgtgatactctaccatgaaggatgcggtaatggcaggaatagcagaataattggtgcttgtaaacatttaagattctcctgtggattttggtgagtgatcattaaactgttttccaacttgc

SEQ ID NO: 439971 - DNA, 1741 bp, Homo sapiens
tctaataccattctttttttaatagtggtctgatttatgaaaaatgttatctatgaaaataatatttccttagttaataatgaaggttgtttcccccatgttgattgaccattggtattttggtaaatttcctgttcatgtactttgttcattttcaaaaattgacatggcccctttattcatttgaaagaattatacattaggagtattaactgtttccacatattttgcagatatttcccctaaatctgttaatgttgaaaactactggtttgattataaatttgtatattaaatttttaccatcagtgtgaaattcaataagatagagttatggagatagtgtctaatgctgcaaacagtctgtgtagtacgatacagtgacccagtgttgttctttttgttaacaggtaagaaaagaagtttttgttttacgttttctcaaattcctttggagtagaagtgttttatcttcattcctcaaggcaccaagcctaatgccattgacccctttaagaattcgtttttgaattgtctgaaacttttattgacttcataatatcttgagtattcgttcttataagttaacttagttacctggatctttgtttagaatcctggtttcttctttttctgaggagcagctgaaccgttatgaaatgtatcgccgctcagctttccctaaggcagccatcaaaaggctgatccagtccatcactggcacctctgtgtctcagaatgttgttattgctatgtctggtatttccaaggttttcgtcggggaggtggtagaagaagcactggatgtgtgtgagaagtggggagaaatgccaccactacaacccaaacatatgagggaagccgttagaaggttaaagtcaaaaggacagatccctaactcgaagcacaaaaaaatcatcttcttctagaccaaagtctagaaaggcctatgttactgacggaagaagtattggttccagacttcctataagactgtctgcattggtgctttagtatctcaggcctccaaggattccatgatgattttaatgtctttctcaaaactctgatatttgtcacacctagaaagtatgtagcctgattgatacttgccttgactaaattttgggacctcttggggcattttgaagtatttaactgtcttgaccagttggaagaagatacgtgggccataagcatcttctggacaggggaactgctttcagagagaaaacctttccaagagagttttgttttgttttggtttcgttttgtttgagatagggtcttgctctatcacctaggctggagtgcagcggcatgactgcagccttgaactcctgggcttaagtgaccctcccacctcagtctcctgagtagctaggactacaggcacacactactgtgcccagctaacttatttttattttttatggagatggggtcttgctttgttgcccaggctggtcgtgaactcctggcttcaagcagtcctcctgcctcagcctcctaaagtgctgagggctttaatggtttcacattgaagcctgaagttgctaagacttaggttgtttcttatatctggttttaagtagatgaaacaaccagaaacttttacttgtgatactctaccatgaaggatgcggtaatggcaggaatagcagaataattggtgcttgtaaacatttaagattctcctgtggattttggtgagtgatcattaaactgttttccaacttgc

SEQ ID NO: 439972 - DNA, 1091 bp, Homo sapiens
ttaggctaggtacgaggctgggtgtgcttccctaaggcagccatcaaaaggctgatccagtccatcactggcacctctgtgtctcagaatgttgttattgctatgtctggtatttccaaggttttcgtcggggaggtggtagaagaagcactggatgtgtgtgagaagtggggagaaatgccaccactacaacccaaacatatgagggaagccgttagaaggttaaagtcaaaaggacagatccctaactcgaagcacaaaaaaatcatcttcttctagaccaaagtctagaaaggcctatgttactgacggaagaagtattggttccagacttcctataagactgtctgcattggtgctttagtatctcaggcctccaaggattccatgatgattttaatgtctttctcaaaactctgatatttgtcacacctagaaagtatgtagcctgattgatacttgccttgactaaattttgggacctcttggggcattttgaagtatttaactgtcttgaccagttggaagaagatacgtgggccataagcatcttctggacaggggaactgctttcagagagaaaacctttccaagagagttttgttttgttttggtttcgttttgtttgagatagggtcttgctctatcacctaggctggagtgcagcggcatgactgcagccttgaactcctgggcttaagtgaccctcccacctcagtctcctgagtagctaggactacaggcacacactactgtgcccagctaacttatttttattttttatggagatggggtcttgctttgttgcccaggctggtcgtgaactcctggcttcaagcagtcctcctgcctcagcctcctaaagtgctgagggctttaatggtttcacattgaagcctgaagttgctaagacttaggttgtttcttatatctggttttaagtagatgaaacaaccagaaacttttacttgtgatactctaccatgaaggatgcggtaatggcaggaatagcagaataattggtgcttgtaaacatttaagattctcctgtggattttggtgagtgatcattaaactgttttccaacttgc

SEQ ID NO: 439973 - DNA, 904 bp, Homo sapiens
  misc_feature (30)..(30): n is a, c, g, or t
ggctaggtacgaggctggtgtgaatcggcngagggttaaagtcaaaaggacagatccctaactcgaagcacaaaaaaatcatcttcttctagaccaaagtctagaaaggcctatgttactgacggaagaagtattggttccagacttcctataagactgtctgcattggtgctttagtatctcaggcctccaaggattccatgatgattttaatgtctttctcaaaactctgatatttgtcacacctagaaagtatgtagcctgattgatacttgccttgactaaattttgggacctcttggggcattttgaagtatttaactgtcttgaccagttggaagaagatacgtgggccataagcatcttctggacaggggaactgctttcagagagaaaacctttccaagagagttttgttttgttttggtttcgttttgtttgagatagggtcttgctctatcacctaggctggagtgcagcggcatgactgcagccttgaactcctgggcttaagtgaccctcccacctcagtctcctgagtagctaggactacaggcacacactactgtgcccagctaacttatttttattttttatggagatggggtcttgctttgttgcccaggctggtcgtgaactcctggcttcaagcagtcctcctgcctcagcctcctaaagtgctgagggctttaatggtttcacattgaagcctgaagttgctaagacttaggttgtttcttatatctggttttaagtagatgaaacaaccagaaacttttacttgtgatactctaccatgaaggatgcggtaatggcaggaatagcagaataattggtgcttgtaaacatttaagattctcctgtggattttggtgagtgatcattaaactgttttccaacttgc

SEQ ID NO: 439974 - DNA, 384 bp, Homo sapiens
  misc_feature (30)..(30): n is a, c, g, or t
ggctaggtacgaggctggtgtgaatcggcngaggctcgggtttccgagcttctgcctcaggcatctccgcgatctcctctcccctccaatcctatccgtgatggacgatgcccacgagtcgccctccgacaaaggtggagagacaggggagtcggatgagacggccgctgtgcccggggacccgggggctaccgacaccgatggaatcccagaggaaactgacggagacgcagatgtggacttgaaagaagctgcagcggaggaaggcgaggcaggaagagatgtactgatgaggctgaaggaatacccagagattgtgttactggctgctcgccgggcttctggttagtccctaacaagttacgagaactcgaactcaccaga

SEQ ID NO: 439975 - DNA, 1700 bp, Homo sapiens
caggagagcggtaggggtgatgtcatcgctgcgcgacgacaggaagtaagatcctggcctgtgcagctcgggtttccgagcttctgcctcaggcatctccgcgatctcctctcccctccaatcctatccgtgatggacgatgcccacgagtcgccctccgacaaaggtggagagacaggggagtcggatgagacggccgctgtgcccggggacccgggggctaccgacaccgatggaatcccagaggaaactgacggagacgcagatgtggacttgaaagaagctgcagcggaggaaggcgagctcgagagtcaggatgtctcagatttaacaacagttgaaagggaagactcatcattacttaatcctgcagccaaaaaactgaaaatagataccaaagaaaagaaagagaaaaagcagaaagtagatgaagatgagattcagaagatgcaaatcctggtttcttctttttctgaggagcagctgaaccgttatgaaatgtatcgccgctcagctttccctaaggcagccatcaaaaggctgatccagtccatcactggcacctctgtgtctcagaatgttgttattgctatgtctggtatttccaaggttttcgtcggggaggtggtagaagaagcactggatgtgtgtgagaagtggggagaaatgccaccactacaacccaaacatatgagggaagccgttagaaggttaaagtcaaaaggacagatccctaactcgaagcacaaaaaaatcatcttcttctagaccaaagtctagaaaggcctatgttactgacggaagaagtattggttccagacttcctataagactgtctgcattggtgctttagtatctcaggcctccaaggattccatgatgattttaatgtctttctcaaaactctgatatttgtcacacctagaaagtatgtagcctgattgatacttgccttgactaaattttgggacctcttggggcattttgaagtatttaactgtcttgaccagttggaagaagatacgtgggccataagcatcttctggacaggggaactgctttcagagagaaaacctttccaagagagttttgttttgttttggtttcgttttgtttgagatagggtcttgctctatcacctaggctggagtgcagcggcatgactgcagccttgaactcctgggcttaagtgaccctcccacctcagtctcctgagtagctaggactacaggcacacactactgtgcccagctaacttatttttattttttatggagatggggtcttgctttgttgcccaggctggtcgtgaactcctggcttcaagcagtcctcctgcctcagcctcctaaagtgctgagggctttaatggtttcacattgaagcctgaagttgctaagacttaggttgtttcttatatctggttttaagtagatgaaacaaccagaaacttttacttgtgatactctaccatgaaggatgcggtaatggcaggaatagcagaataattggtgcttgtaaacatttaagattctcctgtggattttggtgagtgatcattaaactgttttccaacttgcaaaaacacaaccaaccaaacctcccggcccttctttgcgggggacaaagtaaacggccccggcacgttccggccccgctttgtaaggggatgcgccccaaggggcgtatcgaacggtcgc

SEQ ID NO: 439976 - DNA, 2557 bp, Homo sapiens
caggagagcggtaggggtgatgtcatcgctgcgcgacgacaggaagtaagatcctggcctgtgcagctcgggtttccgagcttctgcctcaggcatctccgcgatctcctctcccctccaatcctatccgtgatggacgatgcccacgagtcgccctccgacaaaggtggagagacaggggagtcggatgagacggccgctgtgcccggggacccgggggctaccgacaccgatggaatcccagaggaaactgacggagacgcagatgtggacttgaaagaagctgcagcggaggaaggcgagctcgagagtcaggatgtctcagatttaacaacagttgaaagggaagactcatcattacttaatcctgcagccaaaaaactgaaaatagataccaaagaaaagaaagagaaaaagcagaaagtagatgaagatgagattcagaagatgcaaatcctggtttcttctttttctgaggagcagctgaaccgttatgaaatgtatcgccgctcagctttccctaaggcagccatcaaaaggctgatccagtccatcactggcacctctgtgtctcagaatgttgttattgctatgtctggtatttccaaggttttcgtcggggaggtggtagaagaaggtgagtagtgttggttacaaatactggattgtacctgtggtggtcttatttttaagaatatctacacaaaggagcttattaaagcacctatgggagttctcatttgcacttgaagttgaccaagtggggagccctttatttaggagaacatgactgttattccttgcaagtttcaataacagatggtaaggaaccatctgggaaatcccctccctgattcctttcctcagcccagggtgaaagaagtagactttgtattttctgcagtggactttgctcatttctgctgccaaaagtaaagatacaagaaaagcaatcacaggggtgacctgtgtgggatggtgagttgtccctaatgttgtgatccctaggaactgcctgacccctttattgagtaaaaagcctggctgtttcccattgctactctagctggtgaaattttttttttttttttgagcaggagatatatacttttaaattattattattttttgagacagggtctcactctgtcacccaggctggagtgccttgatcatgcgatcacagctcactgtaacagttagctcctgggctcgggtgattctcctgcctcagtctgagtagttgagaccacaggtgcgcaccaccacccctggctaactttttaattttttgtagagacaaggtttggccatgttgcccaggttggtctcgaactcctaggctcaagcaatcctcccaccttggcctccctaactgctgggattataggcatgagccacagcatatggcctataggaaatatattttaaactgttgtctatgataaagcctgttatgagacgttatactaatattctcttaaaaaggaaaaatgtctgtttatttccttagcaagcttaagaaaagttaacaagaattacaggactcaaaaggattatgtgattagtaaattattgtgtgataatcagactttctccttaccctctgtttagcactggatgtgtgtgagaagtggggagaaatgccaccactacaacccaaacatatgagggaagccgttagaaggttaaagtcaaaaggacagatccctaactcgaagcacaaaaaaatcatcttcttctagaccaaagtctagaaaggcctatgttactgacggaagaagtattggttccagacttcctataagactgtctgcattggtgctttagtatctcaggcctccaaggattccatgatgattttaatgtctttctcaaaactctgatatttgtcacacctagaaagtatgtagcctgattgatacttgccttgactaaattttgggacctcttggggcattttgaagtatttaactgtcttgaccagttggaagaagatacgtgggccataagcatcttctggacaggggaactgctttcagagagaaaacctttccaagagagttttgttttgttttggtttcgttttgtttgagatagggtcttgctctatcacctaggctggagtgcagcggcatgactgcagccttgaactcctgggcttaagtgaccctcccacctcagtctcctgagtagctaggactacaggcacacactactgtgcccagctaacttatttttattttttatggagatggggtcttgctttgttgcccaggctggtcgtgaactcctggcttcaagcagtcctcctgcctcagcctcctaaagtgctgagggctttaatggtttcacattgaagcctgaagttgctaagacttaggttgtttcttatatctggttttaagtagatgaaacaaccagaaacttttacttgtgatactctaccatgaaggatgcggtaatggcaggaatagcagaataattggtgcttgtaaacatttaagattctcctgtggattttggtgagtgatcattaaactgttttccaacttgc

SEQ ID NO: 439977 - DNA, 1507 bp, Homo sapiens
caggagagcggtaggggtgatgtcatcgctgcgcgacgacaggaagtaagatcctggcctgtgcagctcgggtttccgagcttctgcctcaggcatctccgcgatctcctctcccctccaatcctatccgtgatggacgatgcccacgagtcgccctccgacaaaggtggagagacaggggagtcggatgagacggccgctgtgcccggggacccgggggctaccgacaccgatggaatcccagaggaaactgacggagacgcagatgtggacttgaaagaagctgcagcggaggaaggcgagctcgagagtcaggatgtctcagatttaacaacagttgaaagggaagactcatcattacttaatcctgcagccaaaaaactgaaaatagataccaaagaaaagaaagagaaaaagcagaaagtagatgaagatgagattcagaagatgcaaatcctggtttcttctttttctgaggagcagctgaaccgttatgaaatgtatcgccgctcagctttccctaaggcagccatcaaaaggactttctccttaccctctgtttagcactggatgtgtgtgagaagtggggagaaatgccaccactacaacccaaacatatgagggaagccgttagaaggttaaagtcaaaaggacagatccctaactcgaagcacaaaaaaatcatcttcttctagaccaaagtctagaaaggcctatgttactgacggaagaagtattggttccagacttcctataagactgtctgcattggtgctttagtatctcaggcctccaaggattccatgatgattttaatgtctttctcaaaactctgatatttgtcacacctagaaagtatgtagcctgattgatacttgccttgactaaattttgggacctcttggggcattttgaagtatttaactgtcttgaccagttggaagaagatacgtgggccataagcatcttctggacaggggaactgctttcagagagaaaacctttccaagagagttttgttttgttttggtttcgttttgtttgagatagggtcttgctctatcacctaggctggagtgcagcggcatgactgcagccttgaactcctgggcttaagtgaccctcccacctcagtctcctgagtagctaggactacaggcacacactactgtgcccagctaacttatttttattttttatggagatggggtcttgctttgttgcccaggctggtcgtgaactcctggcttcaagcagtcctcctgcctcagcctcctaaagtgctgagggctttaatggtttcacattgaagcctgaagttgctaagacttaggttgtttcttatatctggttttaagtagatgaaacaaccagaaacttttacttgtgatactctaccatgaaggatgcggtaatggcaggaatagcagaataattggtgcttgtaaacatttaagattctcctgtggattttggtgagtgatcattaaactgttttccaacttgc

SEQ ID NO: 439978 - DNA, 5053 bp, Homo sapiens
atgaggacacttgggacttgcctggcgactttggccggacttttgctaactgcggcgggcgagacgttctcaggtggctgcctctttgatgagccgtatagcacatgtggatatagtcaatctgaaggtgatgacttcaattgggagcaagtgaacaccttgactaaaccgacttctgatccatggatgccatcaggttctttcatgctggtgaatgcctctgggagacctgaggggcagagagcccacctgctcttaccccaacttaaagaaaatgacacccactgcatcgattttcactattttgtgtccagcaagagtaattctcctccggggttactcaatgtctacgtgaaggtcaataacgggccactggggaatcctatctggaatatatctggagacccaacacgtacatggaacagggcagaactggccattagtactttctggcctaacttttatcaggtgatttttgaagtgataacttctggacatcaaggctatctcgctatcgatgaggtgaaggtgttaggacatccatgtaccaggactcctcacttcctgcggattcagaatgtggaagttaatgctggccagtttgctaccttccagtgcagtgccatcggcaggaccgtggcaggagacaggctctggttacagggcattgatgtgcgagatgctcctctgaaggaaatcaaggtgaccagctcccgacgcttcattgcttcatttaatgttgtgaataccaccaaacgagatgctggaaagtaccgctgcatgattcgcactgaaggaggtgttggaatatcaaactatgcagagttggtagttaaagaaccacccgttcctattgccccacctcagctcgcctctgtaggagccacctacctgtggatacagctcaacgccaactccatcaatggggatgggcccattgtggcccgagaggtggagtactgcacggccagtgggagctggaatgaccggcagccagtcgattccacgagctataaaattggacaccttgacccagatacagaatatgagattagtgtgctcctgaccaggccaggggagggtggcactggctctcctggtccagctctcaggacaagaacaaagtgtgctgatcccatgcgaggcccaagaaaactagaagtagtggaggtcaaatctcggcaaatcactatccgctgggagccatttggatataatgtaactcgttgccacagttataatctcactgtccactactgttaccaagttggaggacaagaacaagtgcgagaagaagtaagctgggatacagaaaattcacaccctcaacacacgatcactaacctgtcaccatacaccaatgtcagtgtgaaactgatcctcatgaacccagagggccggaaggaaagccaagaactcatagtgcagacagatgaagacctcccaggtgctgttcccactgaatccatacaaggaagtacctttgaagagaagatatttcttcagtggagagaaccaactcaaacatatggtgtaatcactttatatgagatcacctacaaagcagtcagttcctttgacccagaaatagatttatccaatcagagtggaagagtttcaaagctgggaaatgaaacccattttctgttttttggactgtatccggggaccacatactcctttaccatccgagctagcacagctaagggttttgggcctccagcaacaaaccagttcaccaccaaaatatcagcaccctctatgccagcttatgaacttgagacacctttgaatcaaactgacaataccgtgacagtcatgctgaaacctgcccacagcagaggagcacctgtcagtgtctatcaaatagttgttgaggaagaacgtcctcgaagaactaaaaagacgacagaaatcttaaagtgctacccagtgccaattcacttccagaatgcttctctgctgaactcacagtactactttgctgcagaatttcctgcagacagcctccaagctgcgcagccttttacaattggtgataataagacatataatggatactggaacactccccttctcccctataaaagctacagaatttatttccaagctgctagtagagccaatggggaaaccaaaatagactgtgtccaagtggccacaaaaggagctgccactccgaaaccagtcccagaacccgagaaacagacagaccatacagttaaaattgctggagtcatcgcgggcatcttgctgttcgtgattatatttcttggagttgtgttggtaatgaagaaaaggaaactggccaagaagcggaaagagaccatgagcagcacccgacaggagatgactgtgatggtgaactcaatggacaagagctatgctgagcagggcacaaactgcgacgaggctttctcattcatggacacgcacaatctgaatgggagatctgtgtcttcaccatcgtccttcacaatgaaaacaaatacactgagcacatcggtgcctaattcctattacccagatgaaacccacacaatggccagcgataccagcagcctggtgcagtcccatacttacaagaagcgagagccggccgacgtgccctatcagactgggcagctccaccccgccatccgggtggcagacctccttcagcacatcacacagatgaagtgtgcggagggctacggcttcaaggaggaatacgagagcttctttgaagggcagtctgcaccatgggactcggctaagaaagatgagaacagaatgaagaacagatacgggaatatcattgcatacgatcattcccgagtgaggctgcagacaatagaaggagacacaaactcagactatatcaatggcaattatatcgatggttatcatcgacccaatcattacattgctacccaagggccaatgcaggaaaccatctatgacttctggaggatggtgtggcacgaaaacactgcaagtatcatcatggtgaccaatcttgtggaagtgggaagggtcaaatgctgcaaatactggccagatgacacagagatatataaagacattaaagttaccctaatagaaacagaactactggcagaatatgtgataagaacatttgctgttgaaaagagaggtgtgcatgaaatccgagagatcagacagtttcacttcactggctggccggatcatggggtcccctaccatgccaccggcctgctgggattcgtgcggcaagtcaagtccaagagcccgcccagtgcaggcccactggtggtgcactgcagtgctggtgcagggaggactggctgtttcatcgtcattgatatcatgttggacatggccgaaagggaaggggtcgtagacatctacaactgcgtcagggagctgcggtcacggagggtgaacatggtgcaaacagaggagcagtatgtgtttatccacgatgcgatcctggaagcctgtctttgtggggacacctctgtgcctgcttcccaagttaggtctctgtattatgacatgaacaaactggatccacagacaaactcaagccagattaaagaggaattccggacgctaaacatggtgacaccaacgctgcgagtagaggactgcagcatcgcactgttgccccggaaccatgagaaaaaccggtgcatggacatcctgcccccagaccgctgcctgcccttcctcatcaccatcgatggggagagcagcaactacatcaatgctgccctcatggacagctataaacagccttcagcttttatagtcacccagcatcctttgccaaacacagtgaaagacttttggagactggtcctggattatcactgcacatccgtagttatgctaaatgatgtggatcctgcccagttgtgtccacagtactggccagaaaacggagtacacagacacggccccatccaggtggaatttgtctctgctgacctggaagaggacatcatcagcaggatattccgcatttacaatgccgccagaccccaagatggatatcggatggtgcagcaattccagttcctgggctggccgatgtacagggacacaccagtgtctaagcgctccttcttgaagctcattcgccaggtggacaagtggcaagaggaatacaatggcggggaaggccgcaccgttgtgcactgcttgaacgggggaggccgcagtgggacgttctgcgccatcagcatcgtatgtgagatgctccggcaccagagaaccgtggatgtctttcacgctgtgaagacactgaggaacaacaagcccaacatggtcgacctcctggatcagtacaagttctgctacgaggtggccctggaatacttgaattctggctgatggtgtaaacagctctgcaaacaatccctttcataccacaaagccaagacgttccatggtatttgtgcaaaagagatgaagacttctcaatatgcttattttgctttgcataattggctctttttaagagcccaagaaagtgtttctaaaattgcttgcactgcccaatcccagtaatgctgctgcctgacagaaacacacacacagccacagttgccaaatcccgtactccttgccaccggcttcctagagcagcgtagacagctggtaaactgaagagcacaactatattcttatgaaggaatttgtacctttggggtattattttgtggcccgtgaccctcgttattgttacagctgagtgtatgtttttgttctgtggagaatgctatctggcattatggtaatatattattttaggtaatatttgtactttaacatgttgcataatatatgcttatgtagctttccaggactaacagataaatgtgtaatgaacaaagatatgttgtatgagtcgtcgtttctgtcagatttgtattgtttccaagggaaaagcttgggggaggactcagttcacaaaatgcaaaactcaacgatcagattcacggacccagagcttttccatgtgtttatattgtaaatatttttgatttcatcaaattatttattcattaaaagaaatttttgtgaa

SEQ ID NO: 439979 - DNA, 5302 bp, Homo sapiens
agcgggtgctgtggcccaatcctgtgcgtgtctcctcttcagggctcctgccggagcatgcttctctaatcttaccatttatcactgacccttcggtgaaactctcttctgtttaaatttaccaggtacactttgtaatacttgggaccaagaatttgaagatagtaatcagacaaatcaaacaactagtagtagtggagagacacgtagccctacaggaaggggtagaattatcattaaaaacacagacaaaaccagagactgcctgaaaaacatgatacctgatgaactggaaaggatccaaagtaggctctatgggcaggtggctgcctctttgatgagccgtatagcacatgtggatatagtcaatctgaaggtgatgacttcaattgggagcaagtgaacaccttgactaaaccgacttctgatccatggatgccatcaggttctttcatgctggtgaatgcctctgggagacctgaggggcagagagcccacctgctcttaccccaacttaaagaaaatgacacccactgcatcgattttcactattttgtgtccagcaagagtaattctcctccggggttactcaatgtctacgtgaaggtcaataacgggccactggggaatcctatctggaatatatctggagacccaacacgtacatggaacagggcagaactggccattagtactttctggcctaacttttatcaggtgatttttgaagtgataacttctggacatcaaggctatctcgctatcgatgaggtgaaggtgttaggacatccatgtaccaggactcctcacttcctgcggattcagaatgtggaagttaatgctggccagtttgctaccttccagtgcagtgccatcggcaggaccgtggcaggagacaggctctggttacagggcattgatgtgcgagatgctcctctgaaggaaatcaaggtgaccagctcccgacgcttcattgcttcatttaatgttgtgaataccaccaaacgagatgctggaaagtaccgctgcatgattcgcactgaaggaggtgttggaatatcaaactatgcagagttggtagttaaagaaccacccgttcctattgccccacctcagctcgcctctgtaggagccacctacctgtggatacagctcaacgccaactccatcaatggggatgggcccattgtggcccgagaggtggagtactgcacggccagtgggagctggaatgaccggcagccagtcgattccacgagctataaaattggacaccttgacccagatacagaatatgagattagtgtgctcctgaccaggccaggggagggtggcactggctctcctggtccagctctcaggacaagaacaaagtgtgctgatcccatgcgaggcccaagaaaactagaagtagtggaggtcaaatctcggcaaatcactatccgctgggagccatttggatataatgtaactcgttgccacagttataatctcactgtccactactgttaccaagttggaggacaagaacaagtgcgagaagaagtaagctgggatacagaaaattcacaccctcaacacacgatcactaacctgtcaccatacaccaatgtcagtgtgaaactgatcctcatgaacccagagggccggaaggaaagccaagaactcatagtgcagacagatgaagacctcccaggtgctgttcccactgaatccatacaaggaagtacctttgaagagaagatatttcttcagtggagagaaccaactcaaacatatggtgtaatcactttatatgagatcacctacaaagcagtcagttcctttgacccagaaatagatttatccaatcagagtggaagagtttcaaagctgggaaatgaaacccattttctgttttttggactgtatccggggaccacatactcctttaccatccgagctagcacagctaagggttttgggcctccagcaacaaaccagttcaccaccaaaatatcagcaccctctatgccagcttatgaacttgagacacctttgaatcaaactgacaataccgtgacagtcatgctgaaacctgcccacagcagaggagcacctgtcagtgtctatcaaatagttgttgaggaagaacgtcctcgaagaactaaaaagacgacagaaatcttaaagtgctacccagtgccaattcacttccagaatgcttctctgctgaactcacagtactactttgctgcagaatttcctgcagacagcctccaagctgcgcagccttttacaattggtgataataagacatataatggatactggaacactccccttctcccctataaaagctacagaatttatttccaagctgctagtagagccaatggggaaaccaaaatagactgtgtccaagtggccacaaaaggagctgccactccgaaaccagtcccagaacccgagaaacagacagaccatacagttaaaattgctggagtcatcgcgggcatcttgctgttcgtgattatatttcttggagttgtgttggtaatgaagaaaaggaaactggccaagaagcggaaagagaccatgagcagcacccgacaggagatgactgtgatggtgaactcaatggacaagagctatgctgagcagggcacaaactgcgacgaggctttctcattcatggacacgcacaatctgaatgggagatctgtgtcttcaccatcgtccttcacaatgaaaacaaatacactgagcacatcggtgcctaattcctattacccagatgaaacccacacaatggccagcgataccagcagcctggtgcagtcccatacttacaagaagcgagagccggccgacgtgccctatcagactgggcagctccaccccgccatccgggtggcagacctccttcagcacatcacacagatgaagtgtgcggagggctacggcttcaaggaggaatacgagagcttctttgaagggcagtctgcaccatgggactcggctaagaaagatgagaacagaatgaagaacagatacgggaatatcattgcatacgatcattcccgagtgaggctgcagacaatagaaggagacacaaactcagactatatcaatggcaattatatcgatggttatcatcgacccaatcattacattgctacccaagggccaatgcaggaaaccatctatgacttctggaggatggtgtggcacgaaaacactgcaagtatcatcatggtgaccaatcttgtggaagtgggaagggtcaaatgctgcaaatactggccagatgacacagagatatataaagacattaaagttaccctaatagaaacagaactactggcagaatatgtgataagaacatttgctgttgaaaagagaggtgtgcatgaaatccgagagatcagacagtttcacttcactggctggccggatcatggggtcccctaccatgccaccggcctgctgggattcgtgcggcaagtcaagtccaagagcccgcccagtgcaggcccactggtggtgcactgcagtgctggtgcagggaggactggctgtttcatcgtcattgatatcatgttggacatggccgaaagggaaggggtcgtagacatctacaactgcgtcagggagctgcggtcacggagggtgaacatggtgcaaacagaggagcagtatgtgtttatccacgatgcgatcctggaagcctgtctttgtggggacacctctgtgcctgcttcccaagttaggtctctgtattatgacatgaacaaactggatccacagacaaactcaagccagattaaagaggaattccggacgctaaacatggtgacaccaacgctgcgagtagaggactgcagcatcgcactgttgccccggaaccatgagaaaaaccggtgcatggacatcctgcccccagaccgctgcctgcccttcctcatcaccatcgatggggagagcagcaactacatcaatgctgccctcatggacagctataaacagccttcagcttttatagtcacccagcatcctttgccaaacacagtgaaagacttttggagactggtcctggattatcactgcacatccgtagttatgctaaatgatgtggatcctgcccagttgtgtccacagtactggccagaaaacggagtacacagacacggccccatccaggtggaatttgtctctgctgacctggaagaggacatcatcagcaggatattccgcatttacaatgccgccagaccccaagatggatatcggatggtgcagcaattccagttcctgggctggccgatgtacagggacacaccagtgtctaagcgctccttcttgaagctcattcgccaggtggacaagtggcaagaggaatacaatggcggggaaggccgcaccgttgtgcactgcttgaacgggggaggccgcagtgggacgttctgcgccatcagcatcgtatgtgagatgctccggcaccagagaaccgtggatgtctttcacgctgtgaagacactgaggaacaacaagcccaacatggtcgacctcctggatcagtacaagttctgctacgaggtggccctggaatacttgaattctggctgatggtgtaaacagctctgcaaacaatccctttcataccacaaagccaagacgttccatggtatttgtgcaaaagagatgaagacttctcaatatgcttattttgctttgcataattggctctttttaagagcccaagaaagtgtttctaaaattgcttgcactgcccaatcccagtaatgctgctgcctgacagaaacacacacacagccacagttgccaaatcccgtactccttgccaccggcttcctagagcagcgtagacagctggtaaactgaagagcacaactatattcttatgaaggaatttgtacctttggggtattattttgtggcccgtgaccctcgttattgttacagctgagtgtatgtttttgttctgtggagaatgctatctggcattatggtaatatattattttaggtaatatttgtactttaacatgttgcataatatatgcttatgtagctttccaggactaacagataaatgtgtaatgaacaaagatatgttgtatgagtcgtcgtttctgtcagatttgtattgtttccaagggaaaagcttgggggaggactcagttcacaaaatgcaaaactcaacgatcagattcacggacccagagcttttccatgtgtttatattgtaaatatttttgatttcatcaaattatttattcattaaaagaaatttttgtgaa

SEQ ID NO: 439980 - DNA, 5353 bp, Homo sapiens
agcgggtgctgtggcccaatcctgtgcgtgtctcctcttcagggctcctgccggagcatgcttctctaatcttaccatttatcactgacccttcggtgaaactctcttctgtttaaatttaccaggtacactttgtaatacttgggaccaagaatttgaagatagtaatcagacaaatcaaacaactagtagtagtggagagacacgtagccctacaggaaggggtagaattatcattaaaaacacagacaaaaccagagactgcctgaaaaacatgatacctgatgaactggaaaggatccaaagtaggctctatgggcaggtggctgcctctttgatgagccgtatagcacatgtggatatagtcaatctgaaggtgatgacttcaattgggagcaagtgaacaccttgactaaaccgacttctgatccatggatgccatcaggttctttcatgctggtgaatgcctctgggagacctgaggggcagagagcccacctgctcttaccccaacttaaagaaaatgacacccactgcatcgattttcactattttgtgtccagcaagagtaattctcctccggggttactcaatgtctacgtgaaggtcaataacgggccactggggaatcctatctggaatatatctggagacccaacacgtacatggaacagggcagaactggccattagtactttctggcctaacttttatcaggtgatttttgaagtgataacttctggacatcaaggctatctcgctatcgatgaggtgaaggtgttaggacatccatgtaccaggactcctcacttcctgcggattcagaatgtggaagttaatgctggccagtttgctaccttccagtgcagtgccatcggcaggaccgtggcaggagacaggctctggttacagggcattgatgtgcgagatgctcctctgaaggaaatcaaggtgaccagctcccgacgcttcattgcttcatttaatgttgtgaataccaccaaacgagatgctggaaagtaccgctgcatgattcgcactgaaggaggtgttggaatatcaaactatgcagagttggtagttaaagaaccacccgttcctattgccccacctcagctcgcctctgtaggagccacctacctgtggatacagctcaacgccaactccatcaatggggatgggcccattgtggcccgagaggtggagtactgcacggccagtgggagctggaatgaccggcagccagtcgattccacgagctataaaattggacaccttgacccagatacagaatatgagattagtgtgctcctgaccaggccaggggagggtggcactggctctcctggtccagctctcaggacaagaacaaagtgtgctgatcccatgcgaggcccaagaaaactagaagtagtggaggtcaaatctcggcaaatcactatccgctgggagccatttggatataatgtaactcgttgccacagttataatctcactgtccactactgttaccaagttggaggacaagaacaagtgcgagaagaagtaagctgggatacagaaaattcacaccctcaacacacgatcactaacctgtcaccatacaccaatgtcagtgtgaaactgatcctcatgaacccagagggccggaaggaaagccaagaactcatagtgcagacagatgaagacctcccaggtgctgttcccactgaatccatacaaggaagtacctttgaagagaagatatttcttcagtggagagaaccaactcaaacatatggtgtaatcactttatatgagatcacctacaaagcagtcagttcctttgacccagaaatagatttatccaatcagagtggaagagtttcaaagctgggaaatgaaacccattttctgttttttggactgtatccggggaccacatactcctttaccatccgagctagcacagctaagggttttgggcctccagcaacaaaccagttcaccaccaaaatatcagcaccctctatgccagcttatgaacttgagacacctttgaatcaaactgacaataccgtgacagtcatgctgaaacctgcccacagcagaggagcacctgtcagtgtctatcaaatagttgttgaggaagaacgtcctcgaagaactaaaaagacgacagaaatcttaaagtgctacccagtgccaattcacttccagaatgcttctctgctgaactcacagtactactttgctgcagaatttcctgcagacagcctccaagctgcgcagccttttacaattggtgataataagacatataatggatactggaacactccccttctcccctataaaagctacagaatttatttccaagctgctagtagagccaatggggaaaccaaaatagactgtgtccaagtggccacaaaaggagctgccactccgaaaccagtcccagaacccgagaaacagacagaccatacagttaaaattgctggagtcatcgcgggcatcttgctgttcgtgattatatttcttggagttgtgttggtaatgaagaaaaggaaactggccaagaagcggaaagagaccatgagcagcacccgacaggagatgactgtgatggtgaactcaatggacaagagctatgctgagcagggcacaaactgcgacgaggctttctcattcatggacacgcacaatctgaatgggagatctgtgtcttcaccatcgtccttcacaatgaaaacaaatacactgagcacatcggtgcctaattcctattacccagatgaaacccacacaatggccagcgataccagcagcctggtgcagtcccatacttacaagaagcgagagccggccgacgtgccctatcagactgggcagctccaccccgccatccgggtggcagacctccttcagcacatcacacagatgaagtgtgcggagggctacggcttcaaggaggaatacgagagcttctttgaagggcagtctgcaccatgggactcggctaagaaagatgagaacagaatgaagaacagatacgggaatatcattgcatacgatcattcccgagtgaggctgcagacaatagaaggagacacaaactcagactatatcaatggcaattatatcgatggttatcatcgacccaatcattacattgctacccaagggccaatgcaggaaaccatctatgacttctggaggatggtgtggcacgaaaacactgcaagtatcatcatggtgaccaatcttgtggaagtgggaagggtcaaatgctgcaaatactggccagatgacacagagatatataaagacattaaagttaccctaatagaaacagaactactggcagaatatgtgataagaacatttgctgttgaaaagggaggggccggaggtgaagcaaactgcagtccatccagagaagtgtcacagagaggtgtgcatgaaatccgagagatcagacagtttcacttcactggctggccggatcatggggtcccctaccatgccaccggcctgctgggattcgtgcggcaagtcaagtccaagagcccgcccagtgcaggcccactggtggtgcactgcagtgctggtgcagggaggactggctgtttcatcgtcattgatatcatgttggacatggccgaaagggaaggggtcgtagacatctacaactgcgtcagggagctgcggtcacggagggtgaacatggtgcaaacagaggagcagtatgtgtttatccacgatgcgatcctggaagcctgtctttgtggggacacctctgtgcctgcttcccaagttaggtctctgtattatgacatgaacaaactggatccacagacaaactcaagccagattaaagaggaattccggacgctaaacatggtgacaccaacgctgcgagtagaggactgcagcatcgcactgttgccccggaaccatgagaaaaaccggtgcatggacatcctgcccccagaccgctgcctgcccttcctcatcaccatcgatggggagagcagcaactacatcaatgctgccctcatggacagctataaacagccttcagcttttatagtcacccagcatcctttgccaaacacagtgaaagacttttggagactggtcctggattatcactgcacatccgtagttatgctaaatgatgtggatcctgcccagttgtgtccacagtactggccagaaaacggagtacacagacacggccccatccaggtggaatttgtctctgctgacctggaagaggacatcatcagcaggatattccgcatttacaatgccgccagaccccaagatggatatcggatggtgcagcaattccagttcctgggctggccgatgtacagggacacaccagtgtctaagcgctccttcttgaagctcattcgccaggtggacaagtggcaagaggaatacaatggcggggaaggccgcaccgttgtgcactgcttgaacgggggaggccgcagtgggacgttctgcgccatcagcatcgtatgtgagatgctccggcaccagagaaccgtggatgtctttcacgctgtgaagacactgaggaacaacaagcccaacatggtcgacctcctggatcagtacaagttctgctacgaggtggccctggaatacttgaattctggctgatggtgtaaacagctctgcaaacaatccctttcataccacaaagccaagacgttccatggtatttgtgcaaaagagatgaagacttctcaatatgcttattttgctttgcataattggctctttttaagagcccaagaaagtgtttctaaaattgcttgcactgcccaatcccagtaatgctgctgcctgacagaaacacacacacagccacagttgccaaatcccgtactccttgccaccggcttcctagagcagcgtagacagctggtaaactgaagagcacaactatattcttatgaaggaatttgtacctttggggtattattttgtggcccgtgaccctcgttattgttacagctgagtgtatgtttttgttctgtggagaatgctatctggcattatggtaatatattattttaggtaatatttgtactttaacatgttgcataatatatgcttatgtagctttccaggactaacagataaatgtgtaatgaacaaagatatgttgtatgagtcgtcgtttctgtcagatttgtattgtttccaagggaaaagcttgggggaggactcagttcacaaaatgcaaaactcaacgatcagattcacggacccagagcttttccatgtgtttatattgtaaatatttttgatttcatcaaattatttattcattaaaagaaatttttgtgaa

SEQ ID NO: 439981 - DNA, 3354 bp, Homo sapiens
atcaccagaattaacaatgaatctttcagcaccacactcaatttcaattggaaacactgctcagtcttcacctttatttaggatgaatgtttttggttttgttttcctttttttcttcttcagttgatctatccaagatctcagccaaaccttgcaactgtgtcatagttagaaatccaactgcctgactagagcttgtttaagggaaaagaattcagaatattcagcaccttgctatgttttttttttctttttttccttttctttttgttgttgttagaacaaagttgagacaatttgatatactgatggggattcttcttgctagcctagcttcagtctggcttttttttccctcatgcatgctgacctggaaatcctcctttgccttagctgcgataatcgtgactcagcttacaacaccttacattcgcatcgcccccgctgcaggcgacggccaactaacaggagctgccactccgaaaccagtcccagaacccgagaaacagacagaccatacagttaaaattgctggagtcatcgcgggcatcttgctgttcgtgattatatttcttggagttgtgttggtaatgaagaaaaggaaactggccaagaagcggaaagagaccatgagcagcacccgacaggagatgactgtgatggtgaactcaatggacaagagctatgctgagcagggcacaaactgcgacgaggctttctcattcatggacacgcacaatctgaatgggagatctgtgtcttcaccatcgtccttcacaatgaaaacaaatacactgagcacatcggtgcctaattcctattacccagatgaaacccacacaatggccagcgataccagcagcctggtgcagtcccatacttacaagaagcgagagccggccgacgtgccctatcagactgggcagctccaccccgccatccgggtggcagacctccttcagcacatcacacagatgaagtgtgcggagggctacggcttcaaggaggaatacgagagcttctttgaagggcagtctgcaccatgggactcggctaagaaagatgagaacagaatgaagaacagatacgggaatatcattgcatacgatcattcccgagtgaggctgcagacaatagaaggagacacaaactcagactatatcaatggcaattatatcgatggttatcatcgacccaatcattacattgctacccaagggccaatgcaggaaaccatctatgacttctggaggatggtgtggcacgaaaacactgcaagtatcatcatggtgaccaatcttgtggaagtgggaagggtcaaatgctgcaaatactggccagatgacacagagatatataaagacattaaagttaccctaatagaaacagaactactggcagaatatgtgataagaacatttgctgttgaaaagagaggtgtgcatgaaatccgagagatcagacagtttcacttcactggctggccggatcatggggtcccctaccatgccaccggcctgctgggattcgtgcggcaagtcaagtccaagagcccgcccagtgcaggcccactggtggtgcactgcagtgctggtgcagggaggactggctgtttcatcgtcattgatatcatgttggacatggccgaaagggaaggggtcgtagacatctacaactgcgtcagggagctgcggtcacggagggtgaacatggtgcaaacagaggagcagtatgtgtttatccacgatgcgatcctggaagcctgtctttgtggggacacctctgtgcctgcttcccaagttaggtctctgtattatgacatgaacaaactggatccacagacaaactcaagccagattaaagaggaattccggacgctaaacatggtgacaccaacgctgcgagtagaggactgcagcatcgcactgttgccccggaaccatgagaaaaaccggtgcatggacatcctgcccccagaccgctgcctgcccttcctcatcaccatcgatggggagagcagcaactacatcaatgctgccctcatggacagctataaacagccttcagcttttatagtcacccagcatcctttgccaaacacagtgaaagacttttggagactggtcctggattatcactgcacatccgtagttatgctaaatgatgtggatcctgcccagttgtgtccacagtactggccagaaaacggagtacacagacacggccccatccaggtggaatttgtctctgctgacctggaagaggacatcatcagcaggatattccgcatttacaatgccgccagaccccaagatggatatcggatggtgcagcaattccagttcctgggctggccgatgtacagggacacaccagtgtctaagcgctccttcttgaagctcattcgccaggtggacaagtggcaagaggaatacaatggcggggaaggccgcaccgttgtgcactgcttgaacgggggaggccgcagtgggacgttctgcgccatcagcatcgtatgtgagatgctccggcaccagagaaccgtggatgtctttcacgctgtgaagacactgaggaacaacaagcccaacatggtcgacctcctggatcagtacaagttctgctacgaggtggccctggaatacttgaattctggctgatggtgtaaacagctctgcaaacaatccctttcataccacaaagccaagacgttccatggtatttgtgcaaaagagatgaagacttctcaatatgcttattttgctttgcataattggctctttttaagagcccaagaaagtgtttctaaaattgcttgcactgcccaatcccagtaatgctgctgcctgacagaaacacacacacagccacagttgccaaatcccgtactccttgccaccggcttcctagagcagcgtagacagctggtaaactgaagagcacaactatattcttatgaaggaatttgtacctttggggtattattttgtggcccgtgaccctcgttattgttacagctgagtgtatgtttttgttctgtggagaatgctatctggcattatggtaatatattattttaggtaatatttgtactttaacatgttgcataatatatgcttatgtagctttccaggactaacagataaatgtgtaatgaacaaagatatgttgtatgagtcgtcgtttctgtcagatttgtattgtttccaagggaaaagcttgggggaggactcagttcacaaaatgcaaaactcaacgatcagattcacggacccagagcttttccatgtgtttatattgtaaatatttttgatttcatcaaattatttattcattaaaagaaatttttgtgaa

SEQ ID NO: 439982 - DNA, 2044 bp, Homo sapiens
tactgccctcaaaaacatacactccgctgtaacaataacgagggtcacgggccacaaaatattaccctaatagaaacagaactactggcagaatatgtgataagaacatttgctgttgaaaagagaggtgtgcatgaaatccgagagatcagacagtttcacttcactggctggccggatcatggggtcccctaccatgccaccggcctgctgggattcgtgcggcaagtcaagtccaagagcccgcccagtgcaggcccactggtggtgcactgcagtgctggtgcagggaggactggctgtttcatcgtcattgatatcatgttggacatggccgaaagggaaggggtcgtagacatctacaactgcgtcagggagctgcggtcacggagggtgaacatggtgcaaacagaggagcagtatgtgtttatccacgatgcgatcctggaagcctgtctttgtggggacacctctgtgcctgcttcccaagttaggtctctgtattatgacatgaacaaactggatccacagacaaactcaagccagattaaagaggaattccggacgctaaacatggtgacaccaacgctgcgagtagaggactgcagcatcgcactgttgccccggaaccatgagaaaaaccggtgcatggacatcctgcccccagaccgctgcctgcccttcctcatcaccatcgatggggagagcagcaactacatcaatgctgccctcatggacagctataaacagccttcagcttttatagtcacccagcatcctttgccaaacacagtgaaagacttttggagactggtcctggattatcactgcacatccgtagttatgctaaatgatgtggatcctgcccagttgtgtccacagtactggccagaaaacggagtacacagacacggccccatccaggtggaatttgtctctgctgacctggaagaggacatcatcagcaggatattccgcatttacaatgccgccagaccccaagatggatatcggatggtgcagcaattccagttcctgggctggccgatgtacagggacacaccagtgtctaagcgctccttcttgaagctcattcgccaggtggacaagtggcaagaggaatacaatggcggggaaggccgcaccgttgtgcactgcttgaacgggggaggccgcagtgggacgttctgcgccatcagcatcgtatgtgagatgctccggcaccagagaaccgtggatgtctttcacgctgtgaagacactgaggaacaacaagcccaacatggtcgacctcctggatcagtacaagttctgctacgaggtggccctggaatacttgaattctggctgatggtgtaaacagctctgcaaacaatccctttcataccacaaagccaagacgttccatggtatttgtgcaaaagagatgaagacttctcaatatgcttattttgctttgcataattggctctttttaagagcccaagaaagtgtttctaaaattgcttgcactgcccaatcccagtaatgctgctgcctgacagaaacacacacacagccacagttgccaaatcccgtactccttgccaccggcttcctagagcagcgtagacagctggtaaactgaagagcacaactatattcttatgaaggaatttgtacctttggggtattattttgtggcccgtgaccctcgttattgttacagctgagtgtatgtttttgttctgtggagaatgctatctggcattatggtaatatattattttaggtaatatttgtactttaacatgttgcataatatatgcttatgtagctttccaggactaacagataaatgtgtaatgaacaaagatatgttgtatgagtcgtcgtttctgtcagatttgtattgtttccaagggaaaagcttgggggaggactcagttcacaaaatgcaaaactcaacgatcagattcacggacccagagcttttccatgtgtttatattgtaaatatttttgatttcatcaaattatttattcattaaaagaaatttttgtgaa

SEQ ID NO: 439983 - DNA, 5332 bp, Homo sapiens
agcgggtgctgtggcccaatcctgtgcgtgtctcctcttcagggctcctgccggagcatgcttctctaatcttaccatttatcactgacccttcggtgaaactctcttctgtttaaatttaccaggtacactttgtaatacttgggaccaagaatttgaagatagtaatcagacaaatcaaacaactagtagtagtggagagacacgtagccctacaggaaggggtagaattatcattaaaaacacagacaaaaccagagactgcctgaaaaacatgatacctgatgaactggaaaggatccaaagtaggctctatgggcaggtggctgcctctttgatgagccgtatagcacatgtggatatagtcaatctgaaggtgatgacttcaattgggagcaagtgaacaccttgactaaaccgacttctgatccatggatgccatcaggttctttcatgctggtgaatgcctctgggagacctgaggggcagagagcccacctgctcttaccccaacttaaagaaaatgacacccactgcatcgattttcactattttgtgtccagcaagagtaattctcctccggggttactcaatgtctacgtgaaggtcaataacgggccactggggaatcctatctggaatatatctggagacccaacacgtacatggaacagggcagaactggccattagtactttctggcctaacttttatcaggtgatttttgaagtgataacttctggacatcaaggctatctcgctatcgatgaggtgaaggtgttaggacatccatgtaccaggactcctcacttcctgcggattcagaatgtggaagttaatgctggccagtttgctaccttccagtgcagtgccatcggcaggaccgtggcaggagacaggctctggttacagggcattgatgtgcgagatgctcctctgaaggaaatcaaggtgaccagctcccgacgcttcattgcttcatttaatgttgtgaataccaccaaacgagatgctggaaagtaccgctgcatgattcgcactgaaggaggtgttggaatatcaaactatgcagagttggtagttaaagaaccacccgttcctattgccccacctcagctcgcctctgtaggagccacctacctgtggatacagctcaacgccaactccatcaatggggatgggcccattgtggcccgagaggtggagtactgcacggccagtgggagctggaatgaccggcagccagtcgattccacgagctataaaattggacaccttgacccagatacagaatatgagattagtgtgctcctgaccaggccaggggagggtggcactggctctcctggtccagctctcaggacaagaacaaagtgtgctgatcccatgcgaggcccaagaaaactagaagtagtggaggtcaaatctcggcaaatcactatccgctgggagccatttggatataatgtaactcgttgccacagttataatctcactgtccactactgttaccaagttggaggacaagaacaagtgcgagaagaagtaagctgggatacagaaaattcacaccctcaacacacgatcactaacctgtcaccatacaccaatgtcagtgtgaaactgatcctcatgaacccagagggccggaaggaaagccaagaactcatagtgcagacagatgaagacctcccaggtgctgttcccactgaatccatacaaggaagtacctttgaagagaagatatttcttcagtggagagaaccaactcaaacatatggtgtaatcactttatatgagatcacctacaaagcagtcagttcctttgacccagaaatagatttatccaatcagagtggaagagtttcaaagctgggaaatgaaacccattttctgttttttggactgtatccggggaccacatactcctttaccatccgagctagcacagctaagggttttgggcctccagcaacaaaccagttcaccaccaaaatatcagcaccctctatgccagcttatgaacttgagacacctttgaatcaaactgacaataccgtgacagtcatgctgaaacctgcccacagcagaggagcacctgtcagtgtctatcaaatagttgttgaggaagaacgtcctcgaagaactaaaaagacgacagaaatcttaaagtgctacccagtgccaattcacttccagaatgcttctctgctgaactcacagtactactttgctgcagaatttcctgcagacagcctccaagctgcgcagccttttacaattggtgataataagacatataatggatactggaacactccccttctcccctataaaagctacagaatttatttccaagctgctagtagagccaatggggaaaccaaaatagactgtgtccaagtggccacaaaaggagctgccactccgaaaccagtcccagaacccgagaaacagacagaccatacagttaaaattgctggagtcatcgcgggcatcttgctgttcgtgattatatttcttggagttgtgttggtaatgaagaaaaggaaactggccaagaagcggaaagagaccatgagcagcacccgacaggagatgactgtgatggtgaactcaatggacaagagctatgctgagcagggcacaaactgcgacgaggctttctcattcatggacacgcacaatctgaatgggagatctgtgtcttcaccatcgtccttcacaatgaaaacaaatacactgagcacatcggtgcctaattcctattacccagatgaaacccacacaatggccagcgataccagcagcctggtgcagtcccatacttacaagaagcgagagccggccgacgtgccctatcagactgggcagctccaccccgccatccgggtggcagacctccttcagcacatcacacagatgaagtgtgcggagggctacggcttcaaggaggaatacgagagcttctttgaagggcagtctgcaccatgggactcggctaagaaagatgagaacagaatgaagaacagatacgggaatatcattgcatacgatcattcccgagtgaggctgcagacaatagaaggagacacaaactcagactatatcaatggcaattatatcgatggttatcatcgacccaatcattacattgctacccaagggccaatgcaggaaaccatctatgacttctggaggatggtgtggcacgaaaacactgcaagtatcatcatggtgaccaatcttgtggaagtgggaagggtcaaatgctgcaaatactggccagatgacacagagatatataaagacattaaagttaccctaatagaaacagaactactggcagaatatgtgataagaacatttgctgttgaaaagagaggtgtgcatgaaatccgagagatcagacagtttcacttcactggctggccggatcatggggtcccctaccatgccaccggcctgctgggattcgtgcggcaagtcaagtccaagagcccgcccagtgcaggcccactggtggtgcactgcagtgctggtgcagggaggactggctgtttcatcgtcattgatatcatgttggacatggccgaaagggaaggggtcgtagacatctacaactgcgtcagggagctgcggtcacggagggtgaacatggtgcaaacagaggagcagtatgtgtttatccacgatgcgatcctggaagcctgtctttgtggggacacctctgtgcctgcttcccaagttaggtctctgtattatgacatgaacaaactggatccacagacaaactcaagccagattaaagaggaattccggacgctaaacatggtgacaccaacgctgcgagtagaggactgcagcatcgcactgttgccccggaaccatgagaaaaaccggtgcatggacatcctgcccccagaccgctgcctgcccttcctcatcaccatcgatggggagagcagcaactacatcaatgctgccctcatggacagctataaacagccttcagcttttatagtcacccagcatcctttgccaaacacagtgaaagacttttggagactggtcctggattatcactgcacatccgtagttatgctaaatgatgtggatcctgcccagttgtgtccacagtactggccagaaaacggagtacacagacacggccccatccaggtggaatttgtctctgctgacctggaagaggacatcatcagcaggatattccgcatttacaatgccgccagaccccaagatggatatcggatggtgcagcaattccagttcctgggctggccgatgtacagggacacaccagtgtctaagcgctccttcttgaagctcattcgccaggtggacaagtggcaagaggaatacaatggcggggaaggccgcaccgttgtgcactgcttgaacgggggaggccgcagtgggacgttctgcgccatcagcatcgtatgtgagatgctccggcaccagagaaccgtggatgtctttcacgctgtgaagacactgaggaacaacaagcccaacatggtcgacctcctggatcagtacaagttctgctacgaggtggccctggaatacttgaattctggctgatggtgtaaacagctctgcaaacaatccctttcataccacaaagccaagacgttccatggtatttgtgcaaaagagatgaagacttctcaatatgcttattttgctttgcataattggctctttttaagagcccaagaaagtgtttctaaaattgcttgcactgcccaatcccagtaatgctgctgcctgacagaaacacacacacagccacagttgccaaatcccgtactccttgccaccggcttcctagagcagcgtagacagctggtaaactgaagagcacaactatattcttatgaaggaatttgtacctttggggtattattttgtggcccgtgaccctcgttattgttacagctgagtgtatgtttttgttctgtggagaatgctatctggcattatggtaatatattattttaggtaatatttgtactttaacatgttgcataatatatgcttatgtagctttccaggactaacagataaatgtgtaatgaacaaagatatgttgtatgagtcgtcgtttctgtcagatttgtattttttccatgtgtttatattgtaaatatttttgatttcatcaaattatttattcattaaaagaaatttttgtgaagcacagtgagtgacaatcatttttcttaaggcctggaaacgattttctgtatgatgttactttatgtgaattctcatctcaataaatgatgacccgtgagcagccgtg

SEQ ID NO: 439984 - DNA, 1842 bp, Homo sapiens
tgtggtggtttgtattgggtccgattggttttaatcaatctgtgtaatatttggcattgcaccccagtctcctagcacttgagcccttggaccgtgtttctctctggaggaactgtctccactctcttgatgatgtggggctaaaattgataccgtctttcctccttctctggttctctaaagttagtaactcgttccatctccttctccaggagcagtatgtgtttatccacgatgcgatcctggaagcctgtctttgtggggacacctctgtgcctgcttcccaagttaggtctctgtattatgacatgaacaaactggatccacagacaaactcaagccagattaaagaggaattccggacgctaaacatggtgacaccaacgctgcgagtagaggactgcagcatcgcactgttgccccggaaccatgagaaaaaccggtgcatggacatcctgcccccagaccgctgcctgcccttcctcatcaccatcgatggggagagcagcaactacatcaatgctgccctcatggacagctataaacagccttcagcttttatagtcacccagcatcctttgccaaacacagtgaaagacttttggagactggtcctggattatcactgcacatccgtagttatgctaaatgatgtggatcctgcccagttgtgtccacagtactggccagaaaacggagtacacagacacggccccatccaggtggaatttgtctctgctgacctggaagaggacatcatcagcaggatattccgcatttacaatgccgccagaccccaagatggatatcggatggtgcagcaattccagttcctgggctggccgatgtacagggacacaccagtgtctaagcgctccttcttgaagctcattcgccaggtggacaagtggcaagaggaatacaatggcggggaaggccgcaccgttgtgcactgcttgaacgggggaggccgcagtgggacgttctgcgccatcagcatcgtatgtgagatgctccggcaccagagaaccgtggatgtctttcacgctgtgaagacactgaggaacaacaagcccaacatggtcgacctcctggatcagtacaagttctgctacgaggtggccctggaatacttgaattctggctgatggtgtaaacagctctgcaaacaatccctttcataccacaaagccaagacgttccatggtatttgtgcaaaagagatgaagacttctcaatatgcttattttgctttgcataattggctctttttaagagcccaagaaagtgtttctaaaattgcttgcactgcccaatcccagtaatgctgctgcctgacagaaacacacacacagccacagttgccaaatcccgtactccttgccaccggcttcctagagcagcgtagacagctggtaaactgaagagcacaactatattcttatgaaggaatttgtacctttggggtattattttgtggcccgtgaccctcgttattgttacagctgagtgtatgtttttgttctgtggagaatgctatctggcattatggtaatatattattttaggtaatatttgtactttaacatgttgcataatatatgcttatgtagctttccaggactaacagataaatgtgtaatgaacaaagatatgttgtatgagtcgtcgtttctgtcagatttgtattgtttccaagggaaaagcttgggggaggactcagttcacaaaatgcaaaactcaacgatcagattcacggacccagagcttttccatgtgtttatattgtaaatatttttgatttcatcaaattatttattcattaaaagaaatttttgtgaa

SEQ ID NO: 439985 - DNA, 254 bp, Homo sapiens
gcggagttccttcatcccttcagtggattcaggatttcaagagtctgagtaggagcttatcataaagtgtctgacagtgcatacatcagaagggtttattggataaagatgcaatctgagtccatctgctccagatattttatcactttctcattcttttgcagatcacctacaaagcagtcagttcctttgacccagaaatagatttatccaatcagagtggaagagtttcaaagctgggaaatgaaacccat

SEQ ID NO: 439986 - DNA, 5161 bp, Homo sapiens
atgaggacacttgggacttgcctggcgactttggccggacttttgctaactgcggcgggcgagacgttctcaggtggctgcctctttgatgagccgtatagcacatgtggatatagtcaatctgaaggtgatgacttcaattgggagcaagtgaacaccttgactaaaccgacttctgatccatggatgccatcaggttctttcatgctggtgaatgcctctgggagacctgaggggcagagagcccacctgctcttaccccaacttaaagaaaatgacacccactgcatcgattttcactattttgtgtccagcaagagtaattctcctccggggttactcaatgtctacgtgaaggtcaataacgggccactggggaatcctatctggaatatatctggagacccaacacgtacatggaacagggcagaactggccattagtactttctggcctaacttttatcaggtgatttttgaagtgataacttctggacatcaaggctatctcgctatcgatgaggtgaaggtgttaggacatccatgtaccaggactcctcacttcctgcggattcagaatgtggaagttaatgctggccagtttgctaccttccagtgcagtgccatcggcaggaccgtggcaggagacaggctctggttacagggcattgatgtgcgagatgctcctctgaaggaaatcaaggtgaccagctcccgacgcttcattgcttcatttaatgttgtgaataccaccaaacgagatgctggaaagtaccgctgcatgattcgcactgaaggaggtgttggaatatcaaactatgcagagttggtagttaaagaaccacccgttcctattgccccacctcagctcgcctctgtaggagccacctacctgtggatacagctcaacgccaactccatcaatggggatgggcccattgtggcccgagaggtggagtactgcacggccagtgggagctggaatgaccggcagccagtcgattccacgagctataaaattggacaccttgacccagatacagaatatgagattagtgtgctcctgaccaggccaggggagggtggcactggctctcctggtccagctctcaggacaagaacaaagtgtgctgatcccatgcgaggcccaagaaaactagaagtagtggaggtcaaatctcggcaaatcactatccgctgggagccatttggatataatgtaactcgttgccacagttataatctcactgtccactactgttaccaagttggaggacaagaacaagtgcgagaagaagtaagctgggatacagaaaattcacaccctcaacacacgatcactaacctgtcaccatacaccaatgtcagtgtgaaactgatcctcatgaacccagagggccggaaggaaagccaagaactcatagtgcagacagatgaagacctcccaggtgctgttcccactgaatccatacaaggaagtacctttgaagagaagatatttcttcagtggagagaaccaactcaaacatatggtgtaatcactttatatgagatcacctacaaagcagtcagttcctttgacccagaaatagatttatccaatcagagtggaagagtttcaaagctgggaaatgaaacccattttctgttttttggactgtatccggggaccacatactcctttaccatccgagctagcacagctaagggttttgggcctccagcaacaaaccagttcaccaccaaaatatcagcaccctctatgccagcttatgaacttgagacacctttgaatcaaactgacaataccgtgacagtcatgctgaaacctgcccacagcagaggagcacctgtcagtgtctatcaaatagttgttgaggaagaacgtcctcgaagaactaaaaagacgacagaaatcttaaagtgctacccagtgccaattcacttccagaatgcttctctgctgaactcacagtactactttgctgcagaatttcctgcagacagcctccaagctgcgcagccttttacaattggtgataataagacatataatggatactggaacactccccttctcccctataaaagctacagaatttatttccaagctgctagtagagccaatggggaaaccaaaatagactgtgtccaagtggccacaaaaggagctgccactccgaaaccagtcccagaacccgagaaacagacagaccatacagttaaaattgctggagtcatcgcgggcatcttgctgttcgtgattatatttcttggagttgtgttggtaatgaagaaaaggaaactggccaagaagcggaaagagaccatgagcagcacccgacaggagatgactgtgatggtgaactcaatggacaagagctatgctgagcagggcacaaactgcgacgaggctttctcattcatggacacgcacaatctgaatgggagatctgtgtcttcaccatcgtccttcacaatgaaaacaaatacactgagcacatcggtgcctaattcctattacccagatgaaacccacacaatggccagcgataccagcagcctggtgcagtcccatacttacaagaagcgagagccggccgacgtgccctatcagactgggcagctccaccccgccatccgggtggcagacctccttcagcacatcacacagatgaagtgtgcggagggctacggcttcaaggaggaatacgagagcttctttgaagggcagtctgcaccatgggactcggctaagaaagatgagaacagaatgaagaacagatacgggaatatcattgcatacgatcattcccgagtgaggctgcagacaatagaaggagacacaaactcagactatatcaatggcaattatatcgatggttatcatcgacccaatcattacattgctacccaagggccaatgcaggaaaccatctatgacttctggaggatggtgtggcacgaaaacactgcaagtatcatcatggtgaccaatcttgtggaagtgggaagggtcaaatgctgcaaatactggccagatgacacagagatatataaagacattaaagttaccctaatagaaacagaactactggcagaatatgtgataagaacatttgctgttgaaaagagaggtgtgcatgaaatccgagagatcagacagtttcacttcactggctggccggatcatggggtcccctaccatgccaccggcctgctgggattcgtgcggcaagtcaagtccaagagcccgcccagtgcaggcccactggtggtgcactgcagtgctggtgcagggaggactggctgtttcatcgtcattgatatcatgttggacatggccgaaagggaaggggtcgtagacatctacaactgcgtcagggagctgcggtcacggagggtgaacatggtgcaaacagaggagcagtatgtgtttatccacgatgcgatcctggaagcctgtctttgtggggacacctctgtgcctgcttcccaagttaggtctctgtattatgacatgaacaaactggatccacagacaaactcaagccagattaaagaggaattccggacgctaaacatggtgacaccaacgctgcgagtagaggactgcagcatcgcactgttgccccggaaccatgagaaaaaccggtgcatggacatcctgcccccagaccgctgcctgcccttcctcatcaccatcgatggggagagcagcaactacatcaatgctgccctcatggacagctataaacagccttcagcttttatagtcacccagcatcctttgccaaacacagtgaaagacttttggagactggtcctggattatcactgcacatccgtagttatgctaaatgatgtggatcctgcccagttgtgtccacagtactggccagaaaacggagtacacagacacggccccatccaggtggaatttgtctctgctgacctggaagaggacatcatcagcaggatattccgcatttacaatgccgccagaccccaagatggatatcggatggtgcagcaattccagttcctgggctggccgatgtacagggacacaccagtgtctaagcgctccttcttgaagctcattcgccaggtggacaagtggcaagaggaatacaatggcggggaaggccgcaccgttgtgcactgcttgaacgggggaggccgcagtgggacgttctgcgccatcagcatcgtatgtgagatgctccggcaccagagaaccgtggatgtctttcacgctgtgaagacactgaggaacaacaagcccaacatggtcgacctcctggatcagtacaagttctgctacgaggtggccctggaatacttgaattctggctgatggtgtaaacagctctgcaaacaatccctttcataccacaaagccaagacgttccatggtatttgtgcaaaagagatgaagacttctcaatatgcttattttgctttgcataattggctctttttaagagcccaagaaagtgtttctaaaattgcttgcactgcccaatcccagtaatgctgctgcctgacagaaacacacacacagccacagttgccaaatcccgtactccttgccaccggcttcctagagcagcgtagacagctggtaaactgaagagcacaactatattcttatgaaggaatttgtacctttggggtattattttgtggcccgtgaccctcgttattgttacagctgagtgtatgtttttgttctgtggagaatgctatctggcattatggtaatatattattttaggtaatatttgtactttaacatgttgcataatatatgcttatgtagctttccaggactaacagataaatgtgtaatgaacaaagatatgttgtatgagtcgtcgtttctgtcagatttgtattgtttccaagggaaaagcttgggggaggactcagttcacaaaatgcaaaactcaacgatcagattcacggacccagagcttttccatgtgtttatattgtaaatatttttgatttcatcaaattatttattcattaaaagaaatttttgtgaagcacagtgagtgacaatcatttttcttaaggcctggaaacgattttctgtatgatgttactttatgtgaattctcatctcaataaatgatgacccgtgagcagccgtg

SEQ ID NO: 439987 - DNA, 4490 bp, Homo sapiens
tgcccaagctgaagctgcctgggaggaagggctgagcatgcctagcccagccccttctttggggagctgactgcctatgggaaccctctccctccatcctggcattgatgtgcgagatgctcctctgaaggaaatcaaggtgaccagctcccgacgcttcattgcttcatttaatgttgtgaataccaccaaacgagatgctggaaagtaccgctgcatgattcgcactgaaggaggtgttggaatatcaaactatgcagagttggtagttaaagaaccacccgttcctattgccccacctcagctcgcctctgtaggagccacctacctgtggatacagctcaacgccaactccatcaatggggatgggcccattgtggcccgagaggtggagtactgcacggccagtgggagctggaatgaccggcagccagtcgattccacgagctataaaattggacaccttgacccagatacagaatatgagattagtgtgctcctgaccaggccaggggagggtggcactggctctcctggtccagctctcaggacaagaacaaagtgtgctgatcccatgcgaggcccaagaaaactagaagtagtggaggtcaaatctcggcaaatcactatccgctgggagccatttggatataatgtaactcgttgccacagttataatctcactgtccactactgttaccaagttggaggacaagaacaagtgcgagaagaagtaagctgggatacagaaaattcacaccctcaacacacgatcactaacctgtcaccatacaccaatgtcagtgtgaaactgatcctcatgaacccagagggccggaaggaaagccaagaactcatagtgcagacagatgaagacctcccaggtgctgttcccactgaatccatacaaggaagtacctttgaagagaagatatttcttcagtggagagaaccaactcaaacatatggtgtaatcactttatatgagatcacctacaaagcagtcagttcctttgacccagaaatagatttatccaatcagagtggaagagtttcaaagctgggaaatgaaacccattttctgttttttggactgtatccggggaccacatactcctttaccatccgagctagcacagctaagggttttgggcctccagcaacaaaccagttcaccaccaaaatatcagcaccctctatgccagcttatgaacttgagacacctttgaatcaaactgacaataccgtgacagtcatgctgaaacctgcccacagcagaggagcacctgtcagtgtctatcaaatagttgttgaggaagaacgtcctcgaagaactaaaaagacgacagaaatcttaaagtgctacccagtgccaattcacttccagaatgcttctctgctgaactcacagtactactttgctgcagaatttcctgcagacagcctccaagctgcgcagccttttacaattggtgataataagacatataatggatactggaacactccccttctcccctataaaagctacagaatttatttccaagctgctagtagagccaatggggaaaccaaaatagactgtgtccaagtggccacaaaaggagctgccactccgaaaccagtcccagaacccgagaaacagacagaccatacagttaaaattgctggagtcatcgcgggcatcttgctgttcgtgattatatttcttggagttgtgttggtaatgaagaaaaggaaactggccaagaagcggaaagagaccatgagcagcacccgacaggagatgactgtgatggtgaactcaatggacaagagctatgctgagcagggcacaaactgcgacgaggctttctcattcatggacacgcacaatctgaatgggagatctgtgtcttcaccatcgtccttcacaatgaaaacaaatacactgagcacatcggtgcctaattcctattacccagatgaaacccacacaatggccagcgataccagcagcctggtgcagtcccatacttacaagaagcgagagccggccgacgtgccctatcagactgggcagctccaccccgccatccgggtggcagacctccttcagcacatcacacagatgaagtgtgcggagggctacggcttcaaggaggaatacgagagcttctttgaagggcagtctgcaccatgggactcggctaagaaagatgagaacagaatgaagaacagatacgggaatatcattgcatacgatcattcccgagtgaggctgcagacaatagaaggagacacaaactcagactatatcaatggcaattatatcgatggttatcatcgacccaatcattacattgctacccaagggccaatgcaggaaaccatctatgacttctggaggatggtgtggcacgaaaacactgcaagtatcatcatggtgaccaatcttgtggaagtgggaagggtcaaatgctgcaaatactggccagatgacacagagatatataaagacattaaagttaccctaatagaaacagaactactggcagaatatgtgataagaacatttgctgttgaaaagagaggtgtgcatgaaatccgagagatcagacagtttcacttcactggctggccggatcatggggtcccctaccatgccaccggcctgctgggattcgtgcggcaagtcaagtccaagagcccgcccagtgcaggcccactggtggtgcactgcagtgctggtgcagggaggactggctgtttcatcgtcattgatatcatgttggacatggccgaaagggaaggggtcgtagacatctacaactgcgtcagggagctgcggtcacggagggtgaacatggtgcaaacagaggagcagtatgtgtttatccacgatgcgatcctggaagcctgtctttgtggggacacctctgtgcctgcttcccaagttaggtctctgtattatgacatgaacaaactggatccacagacaaactcaagccagattaaagaggaattccggacgctaaacatggtgacaccaacgctgcgagtagaggactgcagcatcgcactgttgccccggaaccatgagaaaaaccggtgcatggacatcctgcccccagaccgctgcctgcccttcctcatcaccatcgatggggagagcagcaactacatcaatgctgccctcatggacagctataaacagccttcagcttttatagtcacccagcatcctttgccaaacacagtgaaagacttttggagactggtcctggattatcactgcacatccgtagttatgctaaatgatgtggatcctgcccagttgtgtccacagtactggccagaaaacggagtacacagacacggccccatccaggtggaatttgtctctgctgacctggaagaggacatcatcagcaggatattccgcatttacaatgccgccagaccccaagatggatatcggatggtgcagcaattccagttcctgggctggccgatgtacagggacacaccagtgtctaagcgctccttcttgaagctcattcgccaggtggacaagtggcaagaggaatacaatggcggggaaggccgcaccgttgtgcactgcttgaacgggggaggccgcagtgggacgttctgcgccatcagcatcgtatgtgagatgctccggcaccagagaaccgtggatgtctttcacgctgtgaagacactgaggaacaacaagcccaacatggtcgacctcctggatcagtacaagttctgctacgaggtggccctggaatacttgaattctggctgatggtgtaaacagctctgcaaacaatccctttcataccacaaagccaagacgttccatggtatttgtgcaaaagagatgaagacttctcaatatgcttattttgctttgcataattggctctttttaagagcccaagaaagtgtttctaaaattgcttgcactgcccaatcccagtaatgctgctgcctgacagaaacacacacacagccacagttgccaaatcccgtactccttgccaccggcttcctagagcagcgtagacagctggtaaactgaagagcacaactatattcttatgaaggaatttgtacctttggggtattattttgtggcccgtgaccctcgttattgttacagctgagtgtatgtttttgttctgtggagaatgctatctggcattatggtaatatattattttaggtaatatttgtactttaacatgttgcataatatatgcttatgtagctttccaggactaacagataaatgtgtaatgaacaaagatatgttgtatgagtcgtcgtttctgtcagatttgtattgtttccaagggaaaagcttgggggaggactcagttcacaaaatgcaaaactcaacgatcagattcacggacccagagcttttccatgtgtttatattgtaaatatttttgatttcatcaaattatttattcattaaaagaaatttttgtgaa

SEQ ID NO: 439988 - DNA, 2273 bp, Homo sapiens
acatgatcaatcagctcggtaccagatataaatttaccgattgagtcacaagaagccacagaaatcacagctcatatcaatggcatctactctcgctgcgtttatcatcgacccaaacattacattgtgtacccaagggccaatgcaggaaaccatctatgacttctggaggatggtgtggcacgaaaacactgcaagtatcatcatggtgaccaatcttgtggaagtgggaagggtcaaatgctgcaaatactggccagatgacacagagatatataaagacattaaagttaccctaatagaaacagaactactggcagaatatgtgataagaacatttgctgttgaaaagagaggtgtgcatgaaatccgagagatcagacagtttcacttcactggctggccggatcatggggtcccctaccatgccaccggcctgctgggattcgtgcggcaagtcaagtccaagagcccgcccagtgcaggcccactggtggtgcactgcagtgctggtgcagggaggactggctgtttcatcgtcattgatatcatgttggacatggccgaaagggaaggggtcgtagacatctacaactgcgtcagggagctgcggtcacggagggtgaacatggtgcaaacagaggagcagtatgtgtttatccacgatgcgatcctggaagcctgtctttgtggggacacctctgtgcctgcttcccaagttaggtctctgtattatgacatgaacaaactggatccacagacaaactcaagccagattaaagaggaattccggacgctaaacatggtgacaccaacgctgcgagtagaggactgcagcatcgcactgttgccccggaaccatgagaaaaaccggtgcatggacatcctgcccccagaccgctgcctgcccttcctcatcaccatcgatggggagagcagcaactacatcaatgctgccctcatggacagctataaacagccttcagcttttatagtcacccagcatcctttgccaaacacagtgaaagacttttggagactggtcctggattatcactgcacatccgtagttatgctaaatgatgtggatcctgcccagttgtgtccacagtactggccagaaaacggagtacacagacacggccccatccaggtggaatttgtctctgctgacctggaagaggacatcatcagcaggatattccgcatttacaatgccgccagaccccaagatggatatcggatggtgcagcaattccagttcctgggctggccgatgtacagggacacaccagtgtctaagcgctccttcttgaagctcattcgccaggtggacaagtggcaagaggaatacaatggcggggaaggccgcaccgttgtgcactgcttgaacgggggaggccgcagtgggacgttctgcgccatcagcatcgtatgtgagatgctccggcaccagagaaccgtggatgtctttcacgctgtgaagacactgaggaacaacaagcccaacatggtcgacctcctggatcagtacaagttctgctacgaggtggccctggaatacttgaattctggctgatggtgtaaacagctctgcaaacaatccctttcataccacaaagccaagacgttccatggtatttgtgcaaaagagatgaagacttctcaatatgcttattttgctttgcataattggctctttttaagagcccaagaaagtgtttctaaaattgcttgcactgcccaatcccagtaatgctgctgcctgacagaaacacacacacagccacagttgccaaatcccgtactccttgccaccggcttcctagagcagcgtagacagctggtaaactgaagagcacaactatattcttatgaaggaatttgtacctttggggtattattttgtggcccgtgaccctcgttattgttacagctgagtgtatgtttttgttctgtggagaatgctatctggcattatggtaatatattattttaggtaatatttgtactttaacatgttgcataatatatgcttatgtagctttccaggactaacagataaatgtgtaatgaacaaagatatgttgtatgagtcgtcgtttctgtcagatttgtattgtttccaagggaaaagcttgggggaggactcagttcacaaaatgcaaaactcaacgatcagattcacggacccagagcttttccatgtgtttatattgtaaatatttttgatttcatcaaattatttattcattaaaagaaatttttgtgaa

SEQ ID NO: 439989 - DNA, 5224 bp, Homo sapiens
agcgggtgctgtggcccaatcctgtgcgtgtctcctcttcagggctcctgccggagcatgcttctctaatcttaccatttatcactgacccttcggtgaaactctcttctgtttaaatttaccaggtacactttgtaatacttgggaccaagaatttgaagatagtaatcagacaaatcaaacaactagtagtagtggagagacacgtagccctacaggaaggggtagaattatcattaaaaacacagacaaaaccagagactgcctgaaaaacatgatacctgatgaactggaaaggatccaaagtaggctctatgggcaggtggctgcctctttgatgagccgtatagcacatgtggatatagtcaatctgaaggtgatgacttcaattgggagcaagtgaacaccttgactaaaccgacttctgatccatggatgccatcaggttctttcatgctggtgaatgcctctgggagacctgaggggcagagagcccacctgctcttaccccaacttaaagaaaatgacacccactgcatcgattttcactattttgtgtccagcaagagtaattctcctccggggttactcaatgtctacgtgaaggtcaataacgggccactggggaatcctatctggaatatatctggagacccaacacgtacatggaacagggcagaactggccattagtactttctggcctaacttttatcaggtgatttttgaagtgataacttctggacatcaaggctatctcgctatcgatgaggtgaaggtgttaggacatccatgtaccaggactcctcacttcctgcggattcagaatgtggaagttaatgctggccagtttgctaccttccagtgcagtgccatcggcaggaccgtggcaggagacaggctctggttacagggcattgatgtgcgagatgctcctctgaaggaaatcaaggtgaccagctcccgacgcttcattgcttcatttaatgttgtgaataccaccaaacgagatgctggaaagtaccgctgcatgattcgcactgaaggaggtgttggaatatcaaactatgcagagttggtagttaaagaaccacccgttcctattgccccacctcagctcgcctctgtaggagccacctacctgtggatacagctcaacgccaactccatcaatggggatgggcccattgtggcccgagaggtggagtactgcacggccagtgggagctggaatgaccggcagccagtcgattccacgagctataaaattggacaccttgacccagatacagaatatgagattagtgtgctcctgaccaggccaggggagggtggcactggctctcctggtccagctctcaggacaagaacaaagtgtgctgatcccatgcgaggcccaagaaaactagaagtagtggaggtcaaatctcggcaaatcactatccgctgggagccatttggatataatgtaactcgttgccacagttataatctcactgtccactactgttaccaagttggaggacaagaacaagtgcgagaagaagtaagctgggatacagaaaattcacaccctcaacacacgatcactaacctgtcaccatacaccaatgtcagtgtgaaactgatcctcatgaacccagagggccggaaggaaagccaagaactcatagtgcagacagatgaagacctcccaggtgctgttcccactgaatccatacaaggaagtacctttgaagagaagatatttcttcagtggagagaaccaactcaaacatatggtgtaatcactttatatgagatcacctacaaagcagtcagttcctttgacccagaaatagatttatccaatcagagtggaagagtttcaaagctgggaaatgaaacccattttctgttttttggactgtatccggggaccacatactcctttaccatccgagctagcacagctaagggttttgggcctccagcaacaaaccagttcaccaccaaaatatcagcaccctctatgccagcttatgaacttgagacacctttgaatcaaactgacaataccgtgacagtcatgctgaaacctgcccacagcagaggagcacctgtcagtgtctatcaaatagttgttgaggaagaacgtcctcgaagaactaaaaagacgacagaaatcttaaagtgctacccagtgccaattcacttccagaatgcttctctgctgaactcacagtactactttgctgcagaatttcctgcagacagcctccaagctgcgcagccttttacaattggtgataataagacatataatggatactggaacactccccttctcccctataaaagctacagaatttatttccaagctgctagtagagccaatggggaaaccaaaatagactgtgtccaagtggccacaaaaggagctgccactccgaaaccagtcccagaacccgagaaacagacagaccatacagttaaaattgctggagtcatcgcgggcatcttgctgttcgtgattatatttcttggagttgtgttggtaatgaagaaaaggaaactggccaagaagcggaaagagaccatgagcagcacccgacaggagatgactgtgatggtgaactcaatggacaagagctatgctgagcagggcacaaactgcgacgaggctttctcattcatggacacgcacaatctgaatgggagatctgtgtcttcaccatcgtccttcacaatgaaaacaaatacactgagcacatcggtgcctaattcctattacccagatgaaacccacacaatggccagcgataccagcagcctggtgcagtcccatacttacaagaagcgagagccggccgacgtgccctatcagactgggcagctccaccccgccatccgggtggcagacctccttcagcacatcacacagatgaagtgtgcggagggctacggcttcaaggaggaatacgagagcttctttgaagggcagtctgcaccatgggactcggctaagaaagatgagaacagaatgaagaacagatacgggaatatcattgcatacgatcattcccgagtgaggctgcagacaatagaaggagacacaaactcagactatatcaatggcaattatatcgatggttatcatcgacccaatcattacattgctacccaagggccaatgcaggaaaccatctatgacttctggaggatggtgtggcacgaaaacactgcaagtatcatcatggtgaccaatcttgtggaagtgggaagggtcaaatgctgcaaatactggccagatgacacagagatatataaagacattaaagttaccctaatagaaacagaactactggcagaatatgtgataagaacatttgctgttgaaaagagaggtgtgcatgaaatccgagagatcagacagtttcacttcactggctggccggatcatggggtcccctaccatgccaccggcctgctgggattcgtgcggcaagtcaagtccaagagcccgcccagtgcaggcccactggtggtgcactgcagtgctggtgcagggaggactggctgtttcatcgtcattgatatcatgttggacatggccgaaagggaaggggtcgtagacatctacaactgcgtcagggagctgcggtcacggagggtgaacatggtgcaaacagaggagcagtatgtgtttatccacgatgcgatcctggaagcctgtctttgtggggacacctctgtgcctgcttcccaagttaggtctctgtattatgacatgaacaaactggatccacagacaaactcaagccagattaaagaggaattccggacgctaaacatggtgacaccaacgctgcgagtagaggactgcagcatcgcactgttgccccggaaccatgagaaaaaccggtgcatggacatcctgcccccagaccgctgcctgcccttcctcatcaccatcgatggggagagcagcaactacatcaatgctgccctcatggacagctataaacagccttcagcttttatagtcacccagcatcctttgccaaacacagtgaaagacttttggagactggtcctggattatcactgcacatccgtagttatgctaaatgatgtggatcctgcccagttgtgtccacagtactggccagaaaacggagtacacagacacggccccatccaggtggaatttgtctctgctgacctggaagaggacatcatcagcaggatattccgcatttacaatgccgccagaccccaagatggatatcggatggtgcagcaattccagttcctgggctggccgatgtacagggacacaccagtgtctaagcgctccttcttgaagctcattcgccaggtggacaagtggcaagaggaatacaatggcggggaaggccgcaccgttgtgcactgcttgaacgggggaggccgcagtgggacgttctgcgccatcagcatcgtatgtgagatgctccggcaccagagaaccgtggatgtctttcacgctgtgaagacactgaggaacaacaagcccaacatggtcgacctcctggatcagtacaagttctgctacgaggtggccctggaatacttgaattctggctgatggtgtaaacagctctgcaaacaatccctttcataccacaaagccaagacgttccatggtatttgtgcaaaagagatgaagacttctcaatatgcttattttgctttgcataattggctctttttaagagcccaagaaagtgtttctaaaattgcttgcactgcccaatcccagtaatgctgctgcctgacagaaacacacacacagccacagttgccaaatcccgtactccttgccaccggcttcctagagcagcgtagacagctggtaaactgaagagcacaactatattcttatgaaggaatttgtacctttggggtattattttgtggcccgtgaccctcgttattgttacagctgagtgtatgtttttgttctgtggagaatgctatctggcattatggtaatatattattttaggtaatatttgtactttaacatgttgcataatatatgcttatgtagctttccaggactaacagataaatgtgtaatgaacaaagatatgttgtatgagtcgtcgtttctgtcagatttgtattttttccatgtgtttatattgtaaatatttttgatttcatcaaattatttattcattaaaagaaatttttgtgaa

SEQ ID NO: 439990 - DNA, 3735 bp, Homo sapiens
agcgggtgctgtggcccaatcctgtgcgtgtctcctcttcagggctcctgccggagcatgcttctctaatcttaccatttatcactgacccttcggtgaaactctcttctgtttaaatttaccaggtacactttgtaatacttgggaccaagaatttgaagatagtaatcagacaaatcaaacaactagtagtagtggagagacacgtagccctacaggaaggggtagaattatcattaaaaacacagacaaaaccagagactgcctgaaaaacatgatacctgatgaactggaaaggatccaaagtaggctctatgggcaggtggctgcctctttgatgagccgtatagcacatgtggatatagtcaatctgaaggtgatgacttcaattgggagcaagtgaacaccttgactaaaccgacttctgatccatggatgccatcaggttctttcatgctggtgaatgcctctgggagacctgaggggcagagagcccacctgctcttaccccaacttaaagaaaatgacacccactgcatcgattttcactattttgtgtccagcaagagtaattctcctccggggttactcaatgtctacgtgaaggtcaataacgggccactggggaatcctatctggaatatatctggagacccaacacgtacatggaacagggcagaactggccattagtactttctggcctaacttttatcaggtgatttttgaagtgataacttctggacatcaaggctatctcgctatcgatgaggtgaaggtgttaggacatccatgtaccaggactcctcacttcctgcggattcagaatgtggaagttaatgctggccagtttgctaccttccagtgcagtgccatcggcaggaccgtggcaggagacaggctctggttacagggcattgatgtgcgagatgctcctctgaaggaaatcaaggtgaccagctcccgacgcttcattgcttcatttaatgttgtgaataccaccaaacgagatgctggaaagtaccgctgcatgattcgcactgaaggaggtgttggaatatcaaactatgcagagttggtagttaaagaaccacccgttcctattgccccacctcagctcgcctctgtaggagccacctacctgtggatacagctcaacgccaactccatcaatggggatgggcccattgtggcccgagaggtggagtactgcacggccagtgggagctggaatgaccggcagccagtcgattccacgagctataaaattggacaccttgacccagatacagaatatgagattagtgtgctcctgaccaggccaggggagggtggcactggctctcctggtccagctctcaggacaagaacaaagtgtgctgatcccatgcgaggcccaagaaaactagaagtagtggaggtcaaatctcggcaaatcactatccgctgggagccatttggatataatgtaactcgttgccacagttataatctcactgtccactactgttaccaagttggaggacaagaacaagtgcgagaagaagtaagctgggatacagaaaattcacaccctcaacacacgatcactaacctgtcaccatacaccaatgtcagtgtgaaactgatcctcatgaacccagagggccggaaggaaagccaagaactcatagtgcagacagatgaagacctcccaggtgctgttcccactgaatccatacaaggaagtacctttgaagagaagatatttcttcagtggagagaaccaactcaaacatatggtgtaatcactttatatgagatcacctacaaagcagtcagttcctttgacccagaaatagatttatccaatcagagtggaagagtttcaaagctgggaaatgaaacccattttctgttttttggactgtatccggggaccacatactcctttaccatccgagctagcacagctaagggttttgggcctccagcaacaaaccagttcaccaccaaaatatcagcaccctctatgccagcttatgaacttgagacacctttgaatcaaactgacaataccgtgacagtcatgctgaaacctgcccacagcagaggagcacctgtcagtgtctatcaaatagttgttgaggaagaacgtcctcgaagaactaaaaagacgacagaaatcttaaagtgctacccagtgccaattcacttccagaatgcttctctgctgaactcacagtactactttgctgcagaatttcctgcagacagcctccaagctgcgcagccttttacaattggtgataataagacatataatggatactggaacactccccttctcccctataaaagctacagaatttatttccaagctgctagtagagccaatggggaaaccaaaatagactgtgtccaagtggccacaaaaggagctgccactccgaaaccagtcccagaacccgagaaacagacagaccatacagttaaaattgctggagtcatcgcgggcatcttgctgttcgtgattatatttcttggagttgtgttggtaatgaagaaaaggaaactggccaagaagcggaaagagaccatgagcagcacccgacaggagatgactgtgatggtgaactcaatggacaagagctatgctgagcagggcacaaactgcgacgaggctttctcattcatggacacgcacaatctgaatgggagatctgtgtcttcaccatcgtccttcacaatgaaaacaaatacactgagcacatcggtgcctaattcctattacccagatgaaacccacacaatggccagcgataccagcagcctggtgcagtcccatacttacaagaagcgagagccggccgacgtgccctatcagactgggcagctccaccccgccatccgggtggcagacctccttcagcacatcacacagatgaagtgtgcggagggctacggcttcaaggaggaatacgagagcttctttgaagggcagtctgcaccatgggactcggctaagaaagatgagaacagaatgaagaacagatacgggaatatcattgcatacgatcattcccgagtgaggctgcagacaatagaaggagacacaaactcagactatatcaatggcaattatatcgatggttatcatcgacccaatcattacattgctacccaagggccaatgcaggaaaccatctatgacttctggaggatggtgtggcacgaaaacactgcaagtatcatcatggtgaccaatcttgtggaagtgggaagggtcaaatgctgcaaatactggccagatgacacagagatatataaagacattaaagttaccctaatagaaacagaactactggcagaatatgtgataagaacatttgctgttgaaaagagaggtgtgcatgaaatccgagagatcagacagtttcacttcactggctggccggatcatggggtcccctaccatgccaccggcctgctgggattcgtgcggcaagtcaagtccaagagcccgcccagtgcaggcccactggtggtgcactgcagtgctggtgcagggaggactggctgtttcatcgtcattgatatcatgttggacatggccgaaagggaaggggtcgtagacatctacaactgcgtcagggagctgcggtcacggagggtgaacatggtgcaaacagaggtactcccgctcatcacctagcctggggccttggtccctgggctccctcctgcatctccccat

SEQ ID NO: 439991 - DNA, 2644 bp, Homo sapiens
agcctcagaaagagataatctgtgaaagccacagagcctgatttctgctgtgataatcttcagcagaccgaggctggggcgagaatgaggcagacctgtttacatggtgtgtgcagtgccttgtggaattcttaactctattttattgtattatttttaatcgaaaagtagatcagatgatagcatgaagtgaatcggctgctttggactaatgggatcttcttttctgcattaagatcaagaacttttctggaatcctctgttctccgagtagccttgtcttctctgtgtgttttatcaatttgaagaacactggcaaaaatcagcaaacttcatctcccaaaaagctctcgctcttttttgccaatacttgaagatttctgctccaaaatctactttgagctgcttgagcatggtggttgataaccgaagggcaaaagcatcacttatttagtgtgtgttatagaaattttttagacaaccttactagctaacccaggtgaccctttacggacggctttcaaagccaatttgaataaacaactcttccctctcaaatgggcaagagtaactcttcagcaccatggagaggtccgggcagcgtgttacaacgtgggactgtgaccagggcaagcactctgacagtgattaccgagaggatgggatggatctaggcagtgacgccggcagcagcagcagcagcagccgcgccagttcacagtccaactccaccaaagtgaccccttgctccgagtgcaaatcttcatcgtcgccggggggcagcctggacttggtgtctgccctggaggactatgaggagcccttcccggtctaccagaagaaggtgattgatgagtgggcgccggaggaggacggggaggaggaggaagaggaggacgagcgcgaccagcgagggtaccgggatgaccgctctccggcccgggaaccgggggacgtaagcgccaggacccgcagcggcggcggcgggggcaggagcgccaccaccgccatgccgcccccggtgcccaacggcaacctccaccagcacgacccccaggacctcaggcacaatggcaacgtggtggtggctggccggccgagctgttcccggggcccccgccgggcgatccaaaagccccagccggctgggggccggcgcagtggccgcggcccggcggctggggggctctgccttcagcccccagacggcgggacgtgcgtccccgaagagcccccggtgccacctatggattgggaggcgctggagaagcatctggccgggctgcagttccgggagcaggaggtacggaaccagggccaggcgaggaccaactccacctccgcacagaaaaatgagagagagtctatcagacagaagttggcacttggaagcttctttgatgatggcccaggaatttataccagctgtagcaaaagtgggaagccaagcctttcctcccgactgcagagtgggatgaacttgcagatatgctttgtcaacgacagtggcagtgataaggacagtgatgctgatgacagtaagactgaaaccagcttggacacccccttgtctcccatgagcaaacagagttcttcctattctgatagagacactactgaagaggagtctgaatccttggatgacatggacttccttacaaggcaaaagaaattgcaagctgaagccaaaatggcccttgccatggccaaaccaatggccaaaatgcaagtagaagtggagaaacagaacaggaaaaaagtctcccgtcgctgatcttctgccacacatgcctcatataagtgaatgcttgatgaaaagaagtttaaaacccaccgacctgagagacatgactattgggcagctacaagtgatagtcaatgatctccattcccagatagaaagcttgaatgaagagttggtccagctgcttctcatccgagatgagctgcacacagagcaggatgccatgctggtggacattgaagacttgaccagacatgctgaaagtcagcagaagcacatggcagagaaaatgcctgcaaagtgaaaagaagccattcaaccagagaacaagctagaatttattttgcttctgtggttgtaaaaatgctgttgctaaaggtggcgcagaaacaaatatcagtgttagtcattgataatgtctgaagcttaatgtccagtgattggcctttgcttcttaatttattttaattttttacttgtgccacttaatatcaggcattttaataaaatattgttacaaaaaatgtacagtactgacaccaccacaaatcatggttaataaaagagagtagttttaactttatttttatttgtttagagattttaagttggaacagtattttcccattgactacttttcattcttcactgtagttttaaagaagaactgtaaatgacggtgctatacaagtcaaaaaatacatgcctgcctcgtagtgaagttgtagctctccgtaatatgtatattttactcagttttcaacattttgtgaatgttgactacctgaagttcctttttagatgtgctattaacattctgttggattcagagggttccttgaaagttttatgtataaatatgtaaaataaaaattaaaactttgtttcaaaaaaaaaaaa

SEQ ID NO: 439992 - DNA, 2605 bp, Homo sapiens
agcctcagaaagagataatctgtgaaagccacagagcctgatttctgctgtgataatcttcagcagaccgaggctggggcgagaatgaggcagacctgtttacatggtgtgtgcagtgccttgtggaattcttaactctattttattgtattatttttaatcgaaaagtagatcagatgatagcatgaagtgaatcggctgctttggactaatgggatcttcttttctgcattaagatcaagaacttttctggaatcctctgttctccgagtagccttgtcttctctgtgtgttttatcaatttgaagaacactggcaaaaatcagcaaacttcatctcccaaaaagctctcgctcttttttgccaatacttgaagatttctgctccaaaatctactttgagctgcttgagcatggtggttgataaccgaagggcaaaagcatcacttatttagtgtgtgttatagaaattttttagacaaccttactagctaacccaggtgaccctttacggacggctttcaaagccaatttgaataaacaactcttccctctcaaatgggcaagagtaactcttcagcaccatggagaggtccgggcagcgtgttacaacgtgggactgtgaccagggcaagcactctgacagtgattaccgagaggatgggatggatctaggcagtgacgccggcagcagcagcagcagcagccgcgccagttcacagtccaactccaccaaagtgaccccttgctccgagtgcaaatcttcatcgtcgccggggggcagcctggacttggtgtctgccctggaggactatgaggagcccttcccggtctaccagaagaaggtgattgatgagtgggcgccggaggaggacggggaggaggaggaagaggaggacgagcgcgaccagcgagggtaccgggatgaccgctctccggcccgggaaccgggggacgtaagcgccaggacccgcagcggcggcggcgggggcaggagcgccaccaccgccatgccgcccccggtgcccaacggcaacctccaccagcacgacccccaggacctcaggcacaatggcaacgtggtggtggctggccggccgagctgttcccggggcccccgccgggcgatccaaaagccccagccggctgggggccggcgcagtggccgcggcccggcggctggggggctctgccttcagcccccagacggcgggacgtgcgtccccgaagagcccccggtgccacctatggattgggaggcgctggagaagcatctggccgggctgcagttccgggagcaggaggcacagaaaaatgagagagagtctatcagacagaagttggcacttggaagcttctttgatgatggcccaggaatttataccagctgtagcaaaagtgggaagccaagcctttcctcccgactgcagagtgggatgaacttgcagatatgctttgtcaacgacagtggcagtgataaggacagtgatgctgatgacagtaagactgaaaccagcttggacacccccttgtctcccatgagcaaacagagttcttcctattctgatagagacactactgaagaggagtctgaatccttggatgacatggacttccttacaaggcaaaagaaattgcaagctgaagccaaaatggcccttgccatggccaaaccaatggccaaaatgcaagtagaagtggagaaacagaacaggaaaaaagtctcccgtcgctgatcttctgccacacatgcctcatataagtgaatgcttgatgaaaagaagtttaaaacccaccgacctgagagacatgactattgggcagctacaagtgatagtcaatgatctccattcccagatagaaagcttgaatgaagagttggtccagctgcttctcatccgagatgagctgcacacagagcaggatgccatgctggtggacattgaagacttgaccagacatgctgaaagtcagcagaagcacatggcagagaaaatgcctgcaaagtgaaaagaagccattcaaccagagaacaagctagaatttattttgcttctgtggttgtaaaaatgctgttgctaaaggtggcgcagaaacaaatatcagtgttagtcattgataatgtctgaagcttaatgtccagtgattggcctttgcttcttaatttattttaattttttacttgtgccacttaatatcaggcattttaataaaatattgttacaaaaaatgtacagtactgacaccaccacaaatcatggttaataaaagagagtagttttaactttatttttatttgtttagagattttaagttggaacagtattttcccattgactacttttcattcttcactgtagttttaaagaagaactgtaaatgacggtgctatacaagtcaaaaaatacatgcctgcctcgtagtgaagttgtagctctccgtaatatgtatattttactcagttttcaacattttgtgaatgttgactacctgaagttcctttttagatgtgctattaacattctgttggattcagagggttccttgaaagttttatgtataaatatgtaaaataaaaattaaaactttgtttcaaaaaaaaaaaa

SEQ ID NO: 439993 - DNA, 1232 bp, Homo sapiens
  misc_feature (1097)..(1097): n is a, c, g, or t
ggtaggaaggatgatgccggaggttagaaatgttcaactgcaacattgatttgtgtctgtccctctccctctccctcgctggcctttttctcgttaatgaggactagaatgtttccacatcagttaactgccttcataaagcaccagaaggtcacaccagctccagactgatccttttctttgtgcctataatataattggctgattgtgcgggtgatgagcgccccctcccccagcccggtcccagctccatgttcctaagcctgcctcactggtttcggagggctggagagcagctcagctcgctagctgcgcgcttcccggcacaggcagtgccactgcgcaggttgatcagcgaaacagcatccattttaatctgcggggagcccctgccttaccagggcgttctctccgcccgccggtggatgctccgcgcctgccctccgcagcctcgctcagcagtcctgcgttggggtctgcgccctaggatgcactgagatggtacatcaggataactgctcgtatcaggcacagaaaaatgagagagagtctatcagacagaagttggcacttggaagcttctttgatgatggcccaggaatttataccagctgtagcaaaagtgggaagccaagcctttcctcccgactgcagagtgggatgaacttgcagatatgctttgtcaacgacagtggcagtgataaggacagtgatgctgatgacagtaagactgaaaccagcttggacacccccttgtctcccatgagcaaacagagttcttcctattctgatagagacactactgaagaggagtctgaatccttggatgacatggacttccttacaaggcaaaagaaattgcaagctgaagccaaaatggcccttgccatggccaaaccaatggccaaaatgcaagtagaagtggagaaacagaacaggaaaaaagtctcccgtcgctgatcttctgccacacatgcctcatataagtgaatgcttgatgaaaagaagtttaaaacccaccgacctgagagacatgactattgggcagctacaagtgatagtcaatgatctccattcccagatagaaaaggttgaantgaacgaagttggccccgcgtgcttctccatcccgagatgagctggacacaggagactggaatgccatgctgggtggaacttggtagactgtgccaggacatcctggaactctagcggaagccgttgggagaaac

SEQ ID NO: 439994 - DNA, 1178 bp, Homo sapiens
ggtaggaaggatgatgccggaggttagaaatgttcaactgcaacattgatttgtgtctgtccctctccctctccctcgctggcctttttctcgttaatgaggactagaatgtttccacatcagttaactgccttcataaagcaccagaaggtcacaccagctccagactgatccttttctttgtgcctataatataattggctgattgtgcgggtgatgagcgccccctcccccagcccggtcccagctccatgttcctaagcctgcctcactggtttcggagggctggagagcagctcagctcgctagctgcgcgcttcccggcacaggcagtgccactgcgcaggttgatcagcgaaacagcatccattttaatctgcggggagcccctgccttaccagggcgttctctccgcccgccggtggatgctccgcgcctgccctccgcagcctcgctcagcagtcctgcgttggggtctgcgccctaggatgcactgagatggtacatcaggataactgctcgtatcagatggagtcttgctccgttgcccaggctggtgtgctgtggcgcaatcttggctcactgtaacctccacctcccgggttccagcgattctcccaccttagcctcctgagtagctgagattacacgcgtccaccaccatgcccagctaattttctgtatttttagtagaaacgggttttcaccatgttggccagactggtctcaaacttctgactttaggtgatctgcccaccttagcctcccaaagtgctgggatcacagtcgtgagccaccgcgcctggccgacaacaggcttcttgaagacaaggggccttctttaaattttcacaagtctctgccttatacacagagtatgtgttcaataaatgtttgttggattgaattgcactttatgcaattgttgatgttctgagtccctaggatcagggtttcccatcgtaaccccagagataagctcagatccatacgttgtaacaaggagttggtgaagctgacctcagaagtccatgtacctggcttctcagcctcttggccagttgcccgcactttaaacatctcatgtgccagaatgggggtgcagtgcaaggcacaaaataaatgaatgactgggatgcacagacattccagccttcccagagacaatgcattaagaa

SEQ ID NO: 439995 - DNA, 2091 bp, Homo sapiens
caccccgagccttccggcgggtgggaggaggggccggccagggagacgcggaggcgggagtgagacctccgactgccagcggttccttacaaagattaccgagaggatgggatggatctaggcagtgacgccggcagcagcagcagcagcagccgcgccagttcacagtccaactccaccaaagtgaccccttgctccgagtgcaaatcttcatcgtcgccggggggcagcctggacttggtgtctgccctggaggactatgaggagcccttcccggtctaccagaagaaggtgattgatgagtgggcgccggaggaggacggggaggaggaggaagaggaggacgagcgcgaccagcgagggtaccgggatgaccgctctccggcccgggaaccgggggacgtaagcgccaggacccgcagcggcggcggcgggggcaggagcgccaccaccgccatgccgcccccggtgcccaacggcaacctccaccagcacgacccccaggacctcaggcacaatggcaacgtggtggtggctggccggccgagctgttcccggggcccccgccgggcgatccaaaagccccagccggctgggggccggcgcagtggccgcggcccggcggctggggggctctgccttcagcccccagacggcgggacgtgcgtccccgaagagcccccggtgccacctatggattgggaggcgctggagaagcatctggccgggctgcagttccgggagcaggaggtacggaaccagggccaggcgaggaccaactccacctccgcacagaaaaatgagagagagtctatcagacagaagttggcacttggaagcttctttgatgatggcccaggaatttataccagctgtagcaaaagtgggaagccaagcctttcctcccgactgcagagtgggatgaacttgcagatatgctttgtcaacgacagtggcagtgataaggacagtgatgctgatgacagtaagactgaaaccagcttggacacccccttgtctcccatgagcaaacagagttcttcctattctgatagagacactactgaagaggagtctgaatccttggatgacatggacttccttacaaggcaaaagaaattgcaagctgaagccaaaatggcccttgccatggccaaaccaatggccaaaatgcaagtagaagtggagaaacagaacaggaaaaaagtctcccgtcgctgatcttctgccacacatgcctcatataagtgaatgcttgatgaaaagaagtttaaaacccaccgacctgagagacatgactattgggcagctacaagtgatagtcaatgatctccattcccagatagaaagcttgaatgaagagttggtccagctgcttctcatccgagatgagctgcacacagagcaggatgccatgctggtggacattgaagacttgaccagacatgctgaaagtcagcagaagcacatggcagagaaaatgcctgcaaagtgaaaagaagccattcaaccagagaacaagctagaatttattttgcttctgtggttgtaaaaatgctgttgctaaaggtggcgcagaaacaaatatcagtgttagtcattgataatgtctgaagcttaatgtccagtgattggcctttgcttcttaatttattttaattttttacttgtgccacttaatatcaggcattttaataaaatattgttacaaaaaatgtacagtactgacaccaccacaaatcatggttaataaaagagagtagttttaactttatttttatttgtttagagattttaagttggaacagtattttcccattgactacttttcattcttcactgtagttttaaagaagaactgtaaatgacggtgctatacaagtcaaaaaatacatgcctgcctcgtagtgaagttgtagctctccgtaatatgtatattttactcagttttcaacattttgtgaatgttgactacctgaagttcctttttagatgtgctattaacattctgttggattcagagggttccttgaaagttttatgtataaatatgtaaaataaaaattaaaactttgtttcaaaaaaaaaaaa

SEQ ID NO: 439996 - DNA, 2442 bp, Homo sapiens
gatgcctagagtgagctcaactcaaaggtttccagcctcacactcgcctcacattcccccacagtcacattgcgctctgtgattctgaggaatacagtgtgccagcatccgatccagtctcctttcacctgcaggtgttccagaaacttcaaaatgcgtctggaagaactgaaaagattgcagaatcctctagaacaagttaatgatggaaaatattcatttgaaaatcaccagctggccatggatgcagagaataatattgaaaagtatcccctcaatctacagcccttggaatcaaaggtgaaaatcattcagcgagcatggcgagagtacctgcagcggcaggagcccctggggaagaggagcccgtccccaccctctgtctcctcagagaagctgagcagctctgtcagcatgaacaccttctccgacagcagcacacccgattaccgagaggatgggatggatctaggcagtgacgccggcagcagcagcagcagcagccgcgccagttcacagtccaactccaccaaagtgaccccttgctccgagtgcaaatcttcatcgtcgccggggggcagcctggacttggtgtctgccctggaggactatgaggagcccttcccggtctaccagaagaaggtgattgatgagtgggcgccggaggaggacggggaggaggaggaagaggaggacgagcgcgaccagcgagggtaccgggatgaccgctctccggcccgggaaccgggggacgtaagcgccaggacccgcagcggcggcggcgggggcaggagcgccaccaccgccatgccgcccccggtgcccaacggcaacctccaccagcacgacccccaggacctcaggcacaatggcaacgtggtggtggctggccggccgagctgttcccggggcccccgccgggcgatccaaaagccccagccggctgggggccggcgcagtggccgcggcccggcggctggggggctctgccttcagcccccagacggcgggacgtgcgtccccgaagagcccccggtgccacctatggattgggaggcgctggagaagcatctggccgggctgcagttccgggagcaggaggtacggaaccagggccaggcgaggaccaactccacctccgcacagaaaaatgagagagagtctatcagacagaagttggcacttggaagcttctttgatgatggcccaggaatttataccagctgtagcaaaagtgggaagccaagcctttcctcccgactgcagagtgggatgaacttgcagatatgctttgtcaacgacagtggcagtgataaggacagtgatgctgatgacagtaagactgaaaccagcttggacacccccttgtctcccatgagcaaacagagttcttcctattctgatagagacactactgaagaggagtctgaatccttggatgacatggacttccttacaaggcaaaagaaattgcaagctgaagccaaaatggcccttgccatggccaaaccaatggccaaaatgcaagtagaagtggagaaacagaacaggaaaaaagtctcccgtcgctgatcttctgccacacatgcctcatataagtgaatgcttgatgaaaagaagtttaaaacccaccgacctgagagacatgactattgggcagctacaagtgatagtcaatgatctccattcccagatagaaagcttgaatgaagagttggtccagctgcttctcatccgagatgagctgcacacagagcaggatgccatgctggtggacattgaagacttgaccagacatgctgaaagtcagcagaagcacatggcagagaaaatgcctgcaaagtgaaaagaagccattcaaccagagaacaagctagaatttattttgcttctgtggttgtaaaaatgctgttgctaaaggtggcgcagaaacaaatatcagtgttagtcattgataatgtctgaagcttaatgtccagtgattggcctttgcttcttaatttattttaattttttacttgtgccacttaatatcaggcattttaataaaatattgttacaaaaaatgtacagtactgacaccaccacaaatcatggttaataaaagagagtagttttaactttatttttatttgtttagagattttaagttggaacagtattttcccattgactacttttcattcttcactgtagttttaaagaagaactgtaaatgacggtgctatacaagtcaaaaaatacatgcctgcctcgtagtgaagttgtagctctccgtaatatgtatattttactcagttttcaacattttgtgaatgttgactacctgaagttcctttttagatgtgctattaacattctgttggattcagagggttccttgaaagttttatgtataaatatgtaaaataaaaattaaaactttgtttcaaaaaaaaaaaa

SEQ ID NO: 439997 - DNA, 1789 bp, Homo sapiens
cacactcggccctgaacgcggagttgaatcagctggctgaagctgagtgcctctcttttcctttcttgggaacaggaaaggtgctgtggagaggaattggggcgggatcattcaggggaaggtgacagcagatggtgggaaggccggagtcagcaagccaagtgtcaggggcagagtgagcctcagaaaacagcagctgcccggtgccagagcaaggaaaggccagggaggctgggcggggcagtgtctgtgggacagagtggggcaagaacacacacggccgggcacagcctcttagccagctctccatgtcagtatgagcagtaaccaggaactgggcaattggcacatcagcctatcagaattcatgggaggttatttcttaagtgaaattctaaagagttaaaggatgaatttggacagtgatggaatggatgacatcatcagtcaagaatcctcattggatatggaggggaattataaaaaggcacagaaaaatgagagagagtctatcagacagaagttggcacttggaagcttctttgatgatggcccaggaatttataccagctgtagcaaaagtgggaagccaagcctttcctcccgactgcagagtgggatgaacttgcagatatgctttgtcaacgacagtggcagtgataaggacagtgatgctgatgacagtaagactgaaaccagcttggacacccccttgtctcccatgagcaaacagagttcttcctattctgatagagacactactgaagaggagtctgaatccttggatgacatggacttccttacaaggcaaaagaaattgcaagctgaagccaaaatggcccttgccatggccaaaccaatggccaaaatgcaagtagaagtggagaaacagaacaggaaaaaagtctcccgtcgctgatcttctgccacacatgcctcatataagtgaatgcttgatgaaaagaagtttaaaacccaccgacctgagagacatgactattgggcagctacaagtgatagtcaatgatctccattcccagatagaaagcttgaatgaagagttggtccagctgcttctcatccgagatgagctgcacacagagcaggatgccatgctggtggacattgaagacttgaccagacatgctgaaagtcagcagaagcacatggcagagaaaatgcctgcaaagtgaaaagaagccattcaaccagagaacaagctagaatttattttgcttctgtggttgtaaaaatgctgttgctaaaggtggcgcagaaacaaatatcagtgttagtcattgataatgtctgaagcttaatgtccagtgattggcctttgcttcttaatttattttaattttttacttgtgccacttaatatcaggcattttaataaaatattgttacaaaaaatgtacagtactgacaccaccacaaatcatggttaataaaagagagtagttttaactttatttttatttgtttagagattttaagttggaacagtattttcccattgactacttttcattcttcactgtagttttaaagaagaactgtaaatgacggtgctatacaagtcaaaaaatacatgcctgcctcgtagtgaagttgtagctctccgtaatatgtatattttactcagttttcaacattttgtgaatgttgactacctgaagttcctttttagatgtgctattaacattctgttggattcagagggttccttgaaagttttatgtataaatatgtaaaataaaaattaaaactttgtttcaaaaaaaaaaaa

SEQ ID NO: 439998 - DNA, 1718 bp, Homo sapiens
taatttcctgggaaagtgtctggttctcggagaatccttggggcggggtaaaggggcgcgcctggcgcaaaatggttaatacaaagtctgcgcgcgccgcggggccccttgtatgaaaagtgtgcgcgctggtggctgggcacccctttgctaatttgagggattaccgagaggatgggatggatctaggcagtgacgccggcagcagcagcagcagcagccgcgccagttcacagtccaactccaccaaagtgaccccttgctccgagtgcaaatcttcatcgtcgccggggggcagcctggacttggtgtctgccctggaggactatgaggagcccttcccggtctaccagaagaaggtgattgatgagtgggcgccggaggaggacggggaggaggaggaagaggaggacgagcgcgaccagcgagggtaccgggatgaccgctctccggcccgggaaccgggggacgtaagcgccaggacccgcagcggcggcggcgggggcaggagcgccaccaccgccatgccgcccccggtgcccaacggcaacctccaccagcacgacccccaggacctcaggcacaatggcaacgtggtggtggctggccggccgagctgttcccggggcccccgccgggcgatccaaaagccccagccggctgggggccggcgcagtggccgcggcccggcggctggggggctctgccttcagcccccagacggcgggacgtgcgtccccgaagagcccccggtgccacctatggattgggaggcgctggagaagcatctggccgggctgcagttccgggagcaggaggtacggaaccagggccaggcgaggaccaactccacctccgcacagaaaaatgagagagagtctatcagacagaagttggcacttggaagcttctttgatgatggcccaggaatttataccagctgtagcaaaagtgggaagccaagcctttcctcccggcttgaatgaagagttggtccagctgcttctcatccgagatgagctgcacacagagcaggatgccatgctggtggacattgaagacttgaccagacatgctgaaagtcagcagaagcacatggcagagaaaatgcctgcaaagtgaaaagaagccattcaaccagagaacaagctagaatttattttgcttctgtggttgtaaaaatgctgttgctaaaggtggcgcagaaacaaatatcagtgttagtcattgataatgtctgaagcttaatgtccagtgattggcctttgcttcttaatttattttaattttttacttgtgccacttaatatcaggcattttaataaaatattgttacaaaaaatgtacagtactgacaccaccacaaatcatggttaataaaagagagtagttttaactttatttttatttgtttagagattttaagttggaacagtattttcccattgactacttttcattcttcactgtagttttaaagaagaactgtaaatgacggtgctatacaagtcaaaaaatacatgcctgcctcgtagtgaagttgtagctctccgtaatatgtatattttactcagttttcaacattttgtgaatgttgactacctgaagttcctttttagatgtgctattaacattctgttggattcagagggttccttgaaagttttatgtataaatatgtaaaataaaaattaaaactttgtttcaaaaaaaaaaaa

SEQ ID NO: 439999 - DNA, 1389 bp, Homo sapiens
ggtaggaaggatgatgccggaggttagaaatgttcaactgcaacattgatttgtgtctgtccctctccctctccctcgctggcctttttctcgttaatgaggactagaatgtttccacatcagttaactgccttcataaagcaccagaaggtcacaccagctccagactgatccttttctttgtgcctataatataattggctgattgtgcgggtgatgagcgccccctcccccagcccggtcccagctccatgttcctaagcctgcctcactggtttcggagggctggagagcagctcagctcgctagctgcgcgcttcccggcacaggcagtgccactgcgcaggttgatcagcgaaacagcatccattttaatctgcggggagcccctgccttaccagggcgttctctccgcccgccggtggatgctccgcgcctgccctccgcagcctcgctcagcagtcctgcgttggggtctgcgccctaggatgcactgagatggtacatcaggataactgctcgtatcaggcacagaaaaatgagagagagtctatcagacagaagttggcacttggaagcttctttgatgatggcccaggaatttataccagctgtagcaaaagtgggaagccaagcctttcctcccggcttgaatgaagagttggtccagctgcttctcatccgagatgagctgcacacagagcaggatgccatgctggtggacattgaagacttgaccagacatgctgaaagtcagcagaagcacatggcagagaaaatgcctgcaaagtgaaaagaagccattcaaccagagaacaagctagaatttattttgcttctgtggttgtaaaaatgctgttgctaaaggtggcgcagaaacaaatatcagtgttagtcattgataatgtctgaagcttaatgtccagtgattggcctttgcttcttaatttattttaattttttacttgtgccacttaatatcaggcattttaataaaatattgttacaaaaaatgtacagtactgacaccaccacaaatcatggttaataaaagagagtagttttaactttatttttatttgtttagagattttaagttggaacagtattttcccattgactacttttcattcttcactgtagttttaaagaagaactgtaaatgacggtgctatacaagtcaaaaaatacatgcctgcctcgtagtgaagttgtagctctccgtaatatgtatattttactcagttttcaacattttgtgaatgttgactacctgaagttcctttttagatgtgctattaacattctgttggattcagagggttccttgaaagttttatgtataaatatgtaaaataaaaattaaaactttgtttcaaaaaaaaaaaa

SEQ ID NO: 440000 - DNA, 1178 bp, Homo sapiens
ggtaggaaggatgatgccggaggttagaaatgttcaactgcaacattgatttgtgtctgtccctctccctctccctcgctggcctttttctcgttaatgaggactagaatgtttccacatcagttaactgccttcataaagcaccagaaggtcacaccagctccagactgatccttttctttgtgcctataatataattggctgattgtgcgggtgatgagcgccccctcccccagcccggtcccagctccatgttcctaagcctgcctcactggtttcggagggctggagagcagctcagctcgctagctgcgcgcttcccggcacaggcagtgccactgcgcaggttgatcagcgaaacagcatccattttaatctgcggggagcccctgccttaccagggcgttctctccgcccgccggtggatgctccgcgcctgccctccgcagcctcgctcagcagtcctgcgttggggtctgcgccctaggatgcactgagatggtacatcaggataactgctcgtatcaggcacagaaaaatgagagagagtctatcagacagaagttggcacttggaagcttctttgatgatggcccaggaatttataccagctgtagcaaaagtgggaagccaagcctttcctcccgactgcagagtgggatgaacttgcagatatgctttgtcaacgacagtggcagtgataaggacagtgatgctgatgacagtaagactgaaaccagcttggacacccccttgtctcccatgagcaaacagagttcttcctattctgatagagacactactgaagaggagtctgaatccttggatgacatggacttccttacaaggcaaaagaaattgcaagctgaagccaaaatggcccttgccatggccaaaccaatggccaaaatgcaagtagaagtggagaaacagaacaggaaaaaagtctcccgtcgctgatcttgtaagcagcaaaggctgaaatgcaaggaagtgtttgggagccagaaatggttgacactgtcccagtcctttcccagaattatgcaaacttgtgtttctctaaggcggtttgtaaaaagtcctgtcattgagaaatgattaagtttgtttctttttccttcctactgtaggactgaaaaatacagaagcaatagatttcacaaaagtaaagtttg

SEQ ID NO: 440001 - DNA, 600 bp, Homo sapiens
ggtggcgggaggctggagcaggcttggcccagcagctcactctctacctcctccccctaggattaccgagaggatgggatggatctaggcagtgacgccggcagcagcagcagcagcagccgcgccagttcacagtccaactccaccaaagtgaccccttgctccgagtgcaaatcttcatcgtcgccggggggcagcctggacttggtgtctgccctggaggactatgaggagcccttcccggtctaccagaagaaggtgattgatgagtgggcgccggaggaggacggggaggaggaggaagaggaggacgagcgcgaccagcgagggtaccgggatgaccgctctccggcccgggaaccgggggacgtaagcgccaggacccgcagcggcggcggcgggggcaggagcgccaccaccgccatgccgcccccggtgcccaacggcaacctccaccagcacgacccccaggacctcaggcacaatggcaacgtggtggtggctggccggccgagctgttcccggggcccccgccgggcgatccaaaagccccagccggctgggggccggcgcagtggccgcggcccggcggctgggggg

SEQ ID NO: 440002 - DNA, 1830 bp, Homo sapiens
ggtaggaaggatgatgccggaggttagaaatgttcaactgcaacattgatttgtgtctgtccctctccctctccctcgctggcctttttctcgttaatgaggactagaatgtttccacatcagttaactgccttcataaagcaccagaaggtcacaccagctccagactgatccttttctttgtgcctataatataattggctgattgtgcgggtgatgagcgccccctcccccagcccggtcccagctccatgttcctaagcctgcctcactggtttcggagggctggagagcagctcagctcgctagctgcgcgcttcccggcacaggcagtgccactgcgcaggttgatcagcgaaacagcatccattttaatctgcggggagcccctgccttaccagggcgttctctccgcccgccggtggatgctccgcgcctgccctccgcagcctcgctcagcagtcctgcgttggggtctgcgccctaggatgcactgagatggtacatcaggataactgctcgtatcaggcacagaaaaatgagagagagtctatcagacagaagttggcacttggaagcttctttgatgatggcccaggaatttataccagctgtagcaaaagtgggaagccaagcctttcctcccgactgcagagtgggatgaacttgcagatatgctttgtcaacgacagtggcagtgataaggacagtgatgctgatgacagtaagactgaaaccagcttggacacccccttgtctcccatgagcaaacagagttcttcctattctgatagagacactactgaagaggagtctgaatccttggatgacatggacttccttacaaggcaaaagaaattgcaagctgaagccaaaatggcccttgccatggccaaaccaatggccaaaatgcaagtagaagtggagaaacagaacaggaaaaaagtctcccgtcgctgatcttctgccacacatgcctcatataagtgaatgcttgatgaaaagaagtttaaaacccaccgacctgagagacatgactattgggcagctacaagtgatagtcaatgatctccattcccagatagaaagcttgaatgaagagttggtccagctgcttctcatccgagatgagctgcacacagagcaggatgccatgctggtggacattgaagacttgaccagacatgctgaaagtcagcagaagcacatggcagagaaaatgcctgcaaagtgaaaagaagccattcaaccagagaacaagctagaatttattttgcttctgtggttgtaaaaatgctgttgctaaaggtggcgcagaaacaaatatcagtgttagtcattgataatgtctgaagcttaatgtccagtgattggcctttgcttcttaatttattttaattttttacttgtgccacttaatatcaggcattttaataaaatattgttacaaaaaatgtacagtactgacaccaccacaaatcatggttaataaaagagagtagttttaactttatttttatttgtttagagattttaagttggaacagtattttcccattgactacttttcattcttcactgtagttttaaagaagaactgtaaatgacggtgctatacaagtcaaaaaatacatgcctgcctcgtagtgaagttgtagctctccgtaatatgtatattttactcagttttcaacattttgtgaatgttgactacctgaagttcctttttagatgtgctattaacattctgttggattcagagggttccttgaaagttttatgtataaatatgtaaaataaaaattaaaactttgtttcaaaaaaaaaaaa

SEQ ID NO: 440003 - DNA, 1948 bp, Homo sapiens
agcctcagaaagagataatctgtgaaagccacagagcctgatttctgctgtgataatcttcagcagaccgaggctggggcgagaatgaggcagacctgtttacatggtgtgtgcagtgccttgtggaattcttaactctattttattgtattatttttaatcgaaaagtagatcagatgatagcatgaagtgaatcggctgctttggactaatgggatcttcttttctgcattaagatcaagaacttttctggaatcctctgttctccgagtagccttgtcttctctgtgtgttttatcaatttgaagaacactggcaaaaatcagcaaacttcatctcccaaaaagctctcgctcttttttgccaatacttgaagatttctgctccaaaatctactttgagctgcttgagcatggtggttgataaccgaagggcaaaagcatcacttatttagtgtgtgttatagaaattttttagacaaccttactagctaacccaggtgaccctttacggacggctttcaaagccaatttgaataaacaactcttccctctcaaatgggcaagagtaactcttcagcaccatggagaggtccgggcagcgtgttacaacgtgggactgtgaccagggcaagcactctgacagtgcacagaaaaatgagagagagtctatcagacagaagttggcacttggaagcttctttgatgatggcccaggaatttataccagctgtagcaaaagtgggaagccaagcctttcctcccgactgcagagtgggatgaacttgcagatatgctttgtcaacgacagtggcagtgataaggacagtgatgctgatgacagtaagactgaaaccagcttggacacccccttgtctcccatgagcaaacagagttcttcctattctgatagagacactactgaagaggagtctgaatccttggatgacatggacttccttacaaggcaaaagaaattgcaagctgaagccaaaatggcccttgccatggccaaaccaatggccaaaatgcaagtagaagtggagaaacagaacaggaaaaaagtctcccgtcgctgatcttctgccacacatgcctcatataagtgaatgcttgatgaaaagaagtttaaaacccaccgacctgagagacatgactattgggcagctacaagtgatagtcaatgatctccattcccagatagaaagcttgaatgaagagttggtccagctgcttctcatccgagatgagctgcacacagagcaggatgccatgctggtggacattgaagacttgaccagacatgctgaaagtcagcagaagcacatggcagagaaaatgcctgcaaagtgaaaagaagccattcaaccagagaacaagctagaatttattttgcttctgtggttgtaaaaatgctgttgctaaaggtggcgcagaaacaaatatcagtgttagtcattgataatgtctgaagcttaatgtccagtgattggcctttgcttcttaatttattttaattttttacttgtgccacttaatatcaggcattttaataaaatattgttacaaaaaatgtacagtactgacaccaccacaaatcatggttaataaaagagagtagttttaactttatttttatttgtttagagattttaagttggaacagtattttcccattgactacttttcattcttcactgtagttttaaagaagaactgtaaatgacggtgctatacaagtcaaaaaatacatgcctgcctcgtagtgaagttgtagctctccgtaatatgtatattttactcagttttcaacattttgtgaatgttgactacctgaagttcctttttagatgtgctattaacattctgttggattcagagggttccttgaaagttttatgtataaatatgtaaaataaaaattaaaactttgtttcaaaaaaaaaaaa

SEQ ID NO: 440004 - DNA, 2159 bp, Homo sapiens
taatttcctgggaaagtgtctggttctcggagaatccttggggcggggtaaaggggcgcgcctggcgcaaaatggttaatacaaagtctgcgcgcgccgcggggccccttgtatgaaaagtgtgcgcgctggtggctgggcacccctttgctaatttgagggattaccgagaggatgggatggatctaggcagtgacgccggcagcagcagcagcagcagccgcgccagttcacagtccaactccaccaaagtgaccccttgctccgagtgcaaatcttcatcgtcgccggggggcagcctggacttggtgtctgccctggaggactatgaggagcccttcccggtctaccagaagaaggtgattgatgagtgggcgccggaggaggacggggaggaggaggaagaggaggacgagcgcgaccagcgagggtaccgggatgaccgctctccggcccgggaaccgggggacgtaagcgccaggacccgcagcggcggcggcgggggcaggagcgccaccaccgccatgccgcccccggtgcccaacggcaacctccaccagcacgacccccaggacctcaggcacaatggcaacgtggtggtggctggccggccgagctgttcccggggcccccgccgggcgatccaaaagccccagccggctgggggccggcgcagtggccgcggcccggcggctggggggctctgccttcagcccccagacggcgggacgtgcgtccccgaagagcccccggtgccacctatggattgggaggcgctggagaagcatctggccgggctgcagttccgggagcaggaggtacggaaccagggccaggcgaggaccaactccacctccgcacagaaaaatgagagagagtctatcagacagaagttggcacttggaagcttctttgatgatggcccaggaatttataccagctgtagcaaaagtgggaagccaagcctttcctcccgactgcagagtgggatgaacttgcagatatgctttgtcaacgacagtggcagtgataaggacagtgatgctgatgacagtaagactgaaaccagcttggacacccccttgtctcccatgagcaaacagagttcttcctattctgatagagacactactgaagaggagtctgaatccttggatgacatggacttccttacaaggcaaaagaaattgcaagctgaagccaaaatggcccttgccatggccaaaccaatggccaaaatgcaagtagaagtggagaaacagaacaggaaaaaagtctcccgtcgctgatcttctgccacacatgcctcatataagtgaatgcttgatgaaaagaagtttaaaacccaccgacctgagagacatgactattgggcagctacaagtgatagtcaatgatctccattcccagatagaaagcttgaatgaagagttggtccagctgcttctcatccgagatgagctgcacacagagcaggatgccatgctggtggacattgaagacttgaccagacatgctgaaagtcagcagaagcacatggcagagaaaatgcctgcaaagtgaaaagaagccattcaaccagagaacaagctagaatttattttgcttctgtggttgtaaaaatgctgttgctaaaggtggcgcagaaacaaatatcagtgttagtcattgataatgtctgaagcttaatgtccagtgattggcctttgcttcttaatttattttaattttttacttgtgccacttaatatcaggcattttaataaaatattgttacaaaaaatgtacagtactgacaccaccacaaatcatggttaataaaagagagtagttttaactttatttttatttgtttagagattttaagttggaacagtattttcccattgactacttttcattcttcactgtagttttaaagaagaactgtaaatgacggtgctatacaagtcaaaaaatacatgcctgcctcgtagtgaagttgtagctctccgtaatatgtatattttactcagttttcaacattttgtgaatgttgactacctgaagttcctttttagatgtgctattaacattctgttggattcagagggttccttgaaagttttatgtataaatatgtaaaataaaaattaaaactttgtttcaaaaaaaaaaaa

SEQ ID NO: 440005 - DNA, 2030 bp, Homo sapiens
gatcctgtgtctgatccttgctggctgtgcaggattaccgagaggatgggatggatctaggcagtgacgccggcagcagcagcagcagcagccgcgccagttcacagtccaactccaccaaagtgaccccttgctccgagtgcaaatcttcatcgtcgccggggggcagcctggacttggtgtctgccctggaggactatgaggagcccttcccggtctaccagaagaaggtgattgatgagtgggcgccggaggaggacggggaggaggaggaagaggaggacgagcgcgaccagcgagggtaccgggatgaccgctctccggcccgggaaccgggggacgtaagcgccaggacccgcagcggcggcggcgggggcaggagcgccaccaccgccatgccgcccccggtgcccaacggcaacctccaccagcacgacccccaggacctcaggcacaatggcaacgtggtggtggctggccggccgagctgttcccggggcccccgccgggcgatccaaaagccccagccggctgggggccggcgcagtggccgcggcccggcggctggggggctctgccttcagcccccagacggcgggacgtgcgtccccgaagagcccccggtgccacctatggattgggaggcgctggagaagcatctggccgggctgcagttccgggagcaggaggtacggaaccagggccaggcgaggaccaactccacctccgcacagaaaaatgagagagagtctatcagacagaagttggcacttggaagcttctttgatgatggcccaggaatttataccagctgtagcaaaagtgggaagccaagcctttcctcccgactgcagagtgggatgaacttgcagatatgctttgtcaacgacagtggcagtgataaggacagtgatgctgatgacagtaagactgaaaccagcttggacacccccttgtctcccatgagcaaacagagttcttcctattctgatagagacactactgaagaggagtctgaatccttggatgacatggacttccttacaaggcaaaagaaattgcaagctgaagccaaaatggcccttgccatggccaaaccaatggccaaaatgcaagtagaagtggagaaacagaacaggaaaaaagtctcccgtcgctgatcttctgccacacatgcctcatataagtgaatgcttgatgaaaagaagtttaaaacccaccgacctgagagacatgactattgggcagctacaagtgatagtcaatgatctccattcccagatagaaagcttgaatgaagagttggtccagctgcttctcatccgagatgagctgcacacagagcaggatgccatgctggtggacattgaagacttgaccagacatgctgaaagtcagcagaagcacatggcagagaaaatgcctgcaaagtgaaaagaagccattcaaccagagaacaagctagaatttattttgcttctgtggttgtaaaaatgctgttgctaaaggtggcgcagaaacaaatatcagtgttagtcattgataatgtctgaagcttaatgtccagtgattggcctttgcttcttaatttattttaattttttacttgtgccacttaatatcaggcattttaataaaatattgttacaaaaaatgtacagtactgacaccaccacaaatcatggttaataaaagagagtagttttaactttatttttatttgtttagagattttaagttggaacagtattttcccattgactacttttcattcttcactgtagttttaaagaagaactgtaaatgacggtgctatacaagtcaaaaaatacatgcctgcctcgtagtgaagttgtagctctccgtaatatgtatattttactcagttttcaacattttgtgaatgttgactacctgaagttcctttttagatgtgctattaacattctgttggattcagagggttccttgaaagttttatgtataaatatgtaaaataaaaattaaaactttgtttcaaaaaaaaaaaa

SEQ ID NO: 440006 - DNA, 1774 bp, Homo sapiens
ggtaggaaggatgatgccggaggttagaaatgttcaactgcaacattgatttgtgtctgtccctctccctctccctcgctggcctttttctcgttaatgaggactagaatgtttccacatcagttaactgccttcataaagcaccagaaggtcacaccagctccagactgatccttttctttgtgcctataatataattggctgattgtgcgggtgatgagcgccccctcccccagcccggtcccagctccatgttcctaagcctgcctcactggtttcggagggctggagagcagctcagctcgctagctgcgcgcttcccggcacaggcagtgccactgcgcaggttgatcagcgaaacagcatccattttaatctgcggggagcccctgccttaccagggcgttctctccgcccgccggtggatgctccgcgcctgccctccgcagcctcgctcagcagtcctgcgttggggtctgcgccctaggatgcactgagatggtacatcaggataactgctcgtatcaggcacagaaaaatgagagagagtctatcagacagaagttggcacttggaagcttctttgatgatggcccaggaatttataccagctgtagcaaaagtgggaagccaagcctttcctcccgactgcagagtgggatgaacttgcagatatgctttgtcaacgacagtggcagtgataaggacagtgatgctgatgacagtaagactgaaaccagcttggacacccccttgtctcccatgagcaaacagagttcttcctattctgatagagacactactgaagaggagtctgaatccttggatgacatggacttccttacaaggcaaaagaaattgcaagctgaagccaaaatggcccttgccatggccaaaccaatggccaaaatgcaagtagaagtggagaaacagaacaggtgatgaaaagaagtttaaaacccaccgacctgagagacatgactattgggcagctacaagtgatagtcaatgatctccattcccagatagaaagcttgaatgaagagttggtccagctgcttctcatccgagatgagctgcacacagagcaggatgccatgctggtggacattgaagacttgaccagacatgctgaaagtcagcagaagcacatggcagagaaaatgcctgcaaagtgaaaagaagccattcaaccagagaacaagctagaatttattttgcttctgtggttgtaaaaatgctgttgctaaaggtggcgcagaaacaaatatcagtgttagtcattgataatgtctgaagcttaatgtccagtgattggcctttgcttcttaatttattttaattttttacttgtgccacttaatatcaggcattttaataaaatattgttacaaaaaatgtacagtactgacaccaccacaaatcatggttaataaaagagagtagttttaactttatttttatttgtttagagattttaagttggaacagtattttcccattgactacttttcattcttcactgtagttttaaagaagaactgtaaatgacggtgctatacaagtcaaaaaatacatgcctgcctcgtagtgaagttgtagctctccgtaatatgtatattttactcagttttcaacattttgtgaatgttgactacctgaagttcctttttagatgtgctattaacattctgttggattcagagggttccttgaaagttttatgtataaatatgtaaaataaaaattaaaactttgtttcaaaaaaaaaaaa

SEQ ID NO: 440007 - DNA, 919 bp, Homo sapiens
cggacgcgtgggtcgacccacgcgtccggaaaaagtctcccgtcgctgatcttctgccacacatgcctcatataagtgaatgcttgatgaaaagaagtttaaaacccaccgacctgagagacatgactattgggcagctacaagtgatagtcaatgatctccattcccagatagaaagcttgaatgaagagttggtccagctgcttctcatccgagatgagctgcacacagagcaggatgccatgctggtggacattgaagacttgaccagacatgctgaaagtcagcagaagcacatggcagagaaaatgcctgcaaagtgaaaagaagccattcaaccagagaacaagctagaatttattttgcttctgtggttgtaaaaatgctgttgctaaaggtggcgcagaaacaaatatcagtgttagtcattgataatgtctgaagcttaatgtccagtgattggcctttgcttcttaatttattttaattttttacttgtgccacttaatatcaggcattttaataaaatattgttacaaaaaatgtacagtactgacaccaccacaaatcatggttaataaaagagagtagttttaactttatttttatttgtttagagattttaagttggaacagtattttcccattgactacttttcattcttcactgtagttttaaagaagaactgtaaatgacggtgctatacaagtcaaaaaatacatgcctgcctcgtagtgaagttgtagctctccgtaatatgtatattttactcagttttcaacattttgtgaatgttgactacctgaagttcctttttagatgtgctattaacattctgttggattcagagggttccttgaaagttttatgtataaatatgtaaaataaaaattaaaactttgtttcaaaaaaaaaaaa

SEQ ID NO: 440008 - DNA, 1923 bp, Homo sapiens
ccacaataggggcagacctgtccatccttctctgtgggtcccctgtacctttctcccccaacaggatcagacccagaggcagctggttggggtttgtcgagaagaaggattatccagatcagtcctttctaatctcagctcctgcctgtaccctcccatactcaccaaaccctcttccccaccaccctgagctgaggagcacagtttgaggcccccccaaccccccgccggtcggggccaggccaggccaggccagctcctctggcagcagagcctgggcaggtgacgggcgggcgcgggcgtcgcagctgagggagtaaggaggctcccaggaaccggagctggaaacccggccgaggtccagccagagcccaagagccagagtgacccctcgacctgtcagccatgggggagatggagcaactgcgtcaggaagcggagcagctcaagaagcagattgcagatgccaggaaagcctgtgctgacgttactctggcagagctggtgtctggcctagaggtggtgggacgagtccagatgcggacgcggcggacgttaaggggacacctggccaagatttacgccatgcactgggccactgattctaagctgctggtaagtgcctcgcaagatgggaagctgatcgtgtgggacagctacaccaccaacaaggtgcacgccatcccactgcgctcctcctgggtcatgacctgtgcctatgccccatcagggaactttgtggcatgtggggggctggacaacatgtgttccatctacaacctcaaatcccgtgagggcaatgtcaaggtcagccgggagctttctgctcacacaggttatctctcctgctgccgcttcctggatgacaacaatattgtgaccagctcgggggacaccacgtgtgccttgtgggacattgagactgggcagcagaagactgtatttgtgggacacacgggtgactgcatgagcctggctgtgtctcctgacttcaatctcttcatttcgggggcctgtgatgccagtgccaagctctgggatgtgcgagaggggacctgccgtcagactttcactggccacgagtcggacatcaacgccatctgtttcttccccaatggagaggccatctgcacgggctcggatgacgcttcctgccgcttgtttgacctgcgggcagaccaggagctgatctgcttctcccacgagagcatcatctgcggcatcacgtccgtggccttctccctcagtggccgcctactattcgctggctacgacgacttcaactgcaatgtctgggactccatgaagtctgagcgtgtgggcatcctctctggccacgataacagggtgagctgcctgggagtcacagctgacgggatggctgtggccacaggttcctgggacagcttcctcaaaatctggaactgaggaggctggagaaagggaagtggaaggcagtgaacacactcagcagccccctgcccgaccccatctcattcaggtgttctcttctatattccgggtgccattcccactaagctttctcctttgagggcagtggggagcatgggactgtgcctttgggaggcagcatcagggacacaggggcaaagaactgccccatctcctcccatggccttccctccccacagtcctcacagcctctcccttaatgagcaaggacaacctgcccctccccagccctttgcaggcccagcagacttgagtctgaggccccaggccctaggattcctcccccagagccactacctttgtccaggcctgggtggtatagggcgtttggccctgtgactatggctctggcaccactagggtcctggccctcttcttattcatgctttctcctttttctacctttttttctctcctaagacacctgcaataaagtgtagcaccctggta

SEQ ID NO: 440009 - DNA, 2200 bp, Homo sapiens
ccacaataggggcagacctgtccatccttctctgtgggtcccctgtacctttctcccccaacaggatcagacccagaggcagctggttggggtttgtcgagaagaaggattatccagatcagtcctttctaatctcagctcctgcctgtaccctcccatactcaccaaaccctcttccccaccaccctgagctgaggagcacagtttgaggcccccccaaccccccgccggtcggggccaggccaggccaggccagctcctctggcagcagagcctgggcaggtgacgggcgggcgcgggcgtcgcagctgagggagtaaggaggctcccaggaaccggagctggaaacccggccgaggtccagccagagcccaagagccagagtgacccctcgacctgtcagccatgggggagatggagcaactgcgtcaggaagcggagcagctcaagaagcagattgcagatgccaggaaagcctgtgctgacgttactctggcagagctggtgtctggcctagaggtggtgggacgagtccagatgcggacgcggcggacgttaaggggacacctggccaagatttacgccatgcactgggccactgattctaagctgctggtaagtgcctcgcaagatgggaagctgatcgtgtgggacagctacaccaccaacaaggtgcacgccatcccactgcgctcctcctgggtcatgacctgtgcctatgccccatcagggaactttgtggcatgtggggggctggacaacatgtgttccatctacaacctcaaatcccgtgagggcaatgtcaaggtcagccgggagctttctgctcacacaggttatctctcctgctgccgcttcctggatgacaacaatattgtgaccagctcgggggacaccacgtgtgccttgtgggacattgagactgggcagcagaagactgtatttgtgggacacacgggtgactgcatgagcctggctgtgtctcctgacttcaatctcttcatttcgggggcctgtgatgccagtgccaagctctgggatgtgcgagaggggacctgccgtcagactttcactggccacgagtcggacatcaacgccatctgtttcttccccaatggagaggccatctgcacgggctcggatgacgcttcctgccgcttgtttgacctgcgggcagaccaggagctgatctgcttctcccacgagagcatcatctgcggcatcacgtccgtggccttctccctcagtggccgcctactattcgctggctacgacgacttcaactgcaatgtctgggactccatgaagtctgagcgtgtgggcatcctctctggccacgataacagggtgagctgcctgggagtcacagctgacgggatggctgtggccacaggttcctgggacagcttcctcaaaatctggaactgaggaggctggagaaagggaagtggaaggcagtgaacacactcagcagccccctgcccgaccccatctcattcaggtgttctcttctatattccgggtgccattcccactaagctttctcctttgagggcagtggggagcatgggactgtgcctttgggaggcagcatcagggacacaggggcaaagaactgccccatctcctcccatggccttccctccccacagtcctcacagcctctcccttaatgagcaaggacaacctgcccctccccagccctttgcaggcccagcagacttgagtctgaggccccaggccctaggattcctcccccagagccactacctttgtccaggcctgggtggtatagggcgtttggccctgtgactatggctctggcaccactagggtcctggccctcttcttattcatgctttctcctttttctacctttttttctctcctaagacacctgcaataaagtgtagcaccctggtacatctgtgatgtttgccttctactctcttctgttccaaaaagacccaggtcccatttaagggcagtaatgtgttacaggtgctgtgataaaggctgggtactggatagcttgtgggcttatgggaggaggcctgagatgggtcagggggagaaggtattcagcaggtggctgggggactgtgtgcagcagttcgctatggcctgcctgtggtgcccatgtgtttgtacgggagggttagcttgagaaggaatcagattataaaaggtcttgaatgtc

SEQ ID NO: 440010 - DNA, 2482 bp, Homo sapiens
ccacaataggggcagacctgtccatccttctctgtgggtcccctgtacctttctcccccaacaggatcagacccagaggcagctggttggggtttgtcgagaagaaggattatccagatcagtcctttctaatctcagctcctgcctgtaccctcccatactcaccaaaccctcttccccaccaccctgagctgaggagcacagtttgaggcccccccaaccccccgccggtcggggccaggccaggccaggccagctcctctggcagcagagcctgggcaggtgacgggcgggcgcgggcgtcgcagctgagggagtaaggaggctcccaggaaccggagctggaaacccggccgaggtccagccagagcccaagagccagagtgacccctcgacctgtcagccatgggggagatggagcaactgcgtcaggaagcggagcagctcaagaagcagattgcagatgccaggaaagcctgtgctgacgttactctggcagagctggtgtctggcctagaggtggtgggacgagtccagatgcggacgcggcggacgttaaggggacacctggccaagatttacgccatgcactgggccactgattctaagctgctggtaagtgcctcgcaagatgggaagctgatcgtgtgggacagctacaccaccaacaaggtgcacgccatcccactgcgctcctcctgggtcatgacctgtgcctatgccccatcagggaactttgtggcatgtggggggctggacaacatgtgttccatctacaacctcaaatcccgtgagggcaatgtcaaggtcagccgggagctttctgctcacacaggttatctctcctgctgccgcttcctggatgacaacaatattgtgaccagctcgggggacaccacgtgtgccttgtgggacattgagactgggcagcagaagactgtatttgtgggacacacgggtgactgcatgagcctggctgtgtctcctgacttcaatctcttcatttcgggggcctgtgatgccagtgccaagctctgggatgtgcgagaggggacctgccgtcagactttcactggccacgagtcggacatcaacgccatctgtgatccaatccagaaacgtgcattacctttcctcgccatatctttttcgtcaccacctttaaactggaactgttttcccacctttgtcttttatgtcattgacgtttttgaagagtacaaaccagttttctgtagactctccctccgtttgagcttatctgacatttgctcgccgtgagatccaggccttgcatttgtactggaccctgttcttacacaccctgatccagcccacttgtgtagtctgggagtctgggacaacctccgtccgcccttctagccgggtcactgcaggcaagccttggtgctcttgcctgcgacgtggaaatgatgcctgcctgcagcgctgtatagtgcagagcgggcgaggggcatagggaagtcactggcacgtggtatgtgttggcagggctgcttctcaccccaaaccaagggagggacaggcagggaggctgagagcagcggcttgccctggagctgtcaggtgggaggcagagggcgggagaggctgtgggctgcccaggtctgatccctgacccacttgccacccgtgccctcagttcttccccaatggagaggccatctgcacgggctcggatgacgcttcctgccgcttgtttgacctgcgggcagaccaggagctgatctgcttctcccacgagagcatcatctgcggcatcacgtccgtggccttctccctcagtggccgcctactattcgctggctacgacgacttcaactgcaatgtctgggactccatgaagtctgagcgtgtgggcatcctctctggccacgataacagggtgagctgcctgggagtcacagctgacgggatggctgtggccacaggttcctgggacagcttcctcaaaatctggaactgaggaggctggagaaagggaagtggaaggcagtgaacacactcagcagccccctgcccgaccccatctcattcaggtgttctcttctatattccgggtgccattcccactaagctttctcctttgagggcagtggggagcatgggactgtgcctttgggaggcagcatcagggacacaggggcaaagaactgccccatctcctcccatggccttccctccccacagtcctcacagcctctcccttaatgagcaaggacaacctgcccctccccagccctttgcaggcccagcagacttgagtctgaggccccaggccctaggattcctcccccagagccactacctttgtccaggcctgggtggtatagggcgtttggccctgtgactatggctctggcaccactagggtcctggccctcttcttattcatgctttctcctttttctacctttttttctctcctaagacacctgcaataaagtgtagcaccctggta

SEQ ID NO: 440011 - DNA, 2069 bp, Homo sapiens
ccacaataggggcagacctgtccatccttctctgtgggtcccctgtacctttctcccccaacaggatcagacccagaggcagctggttggggtttgtcgagaagaaggattatccagatcagtcctttctaatctcagctcctgcctgtaccctcccatactcaccaaaccctcttccccaccaccctgagctgaggagcacagtttgaggcccccccaaccccccgccggtcggggccaggccaggccaggccagctcctctggcagcagagcctgggcaggtgacgggcgggcgcgggcgtcgcagctgagggagtaaggaggctcccaggaaccggagctggaaacccggccgaggtccagccagagcccaagagccagagtgacccctcgacctgtcagccatgggggagatggagcaactgcgtcaggaagcggagcagctcaagaagcagattgcagatgccaggaaagcctgtgctgacgttactctggcagagctggtgtctggcctagaggtggtgggacgagtccagatgcggacgcggcggacgttaaggggacacctggccaagatttacgccatgcactgggccactgattctaagctgctggtaagtgcctcgcaagatgggaagctgatcgtgtgggacagctacaccaccaacaaggtgcacgccatcccactgcgctcctcctgggtcatgacctgtgcctatgccccatcagggaactttgtggcatgtggggggctggacaacatgtgttccatctacaacctcaaatcccgtgagggcaatgtcaaggtcagccgggagctttctgctcacacaggttatctctcctgctgccgcttcctggatgacaacaatattgtgaccagctcgggggacaccacgtgtgccttgtgggacattgagactgggcagcagaagactgtatttgtgggacacacgggtgactgcatgagcctggctgtgtctcctgacttcaatctcttcatttcgggggcctgtgatgccagtgccaagctctgggatgtgcgagaggggacctgccgtcagactttcactggccacgagtcggacatcaacgccatctgtcttctccctcagtggccgcctactattcgctggctacgacgacttcaactgcaatgtctgggactccatgaagtctgagcgtgtgggcatcctctctggccacgataacagggtgagctgcctgggagtcacagctgacgggatggctgtggccacaggttcctgggacagcttcctcaaaatctggaactgaggaggctggagaaagggaagtggaaggcagtgaacacactcagcagccccctgcccgaccccatctcattcaggtgttctcttctatattccgggtgccattcccactaagctttctcctttgagggcagtggggagcatgggactgtgcctttgggaggcagcatcagggacacaggggcaaagaactgccccatctcctcccatggccttccctccccacagtcctcacagcctctcccttaatgagcaaggacaacctgcccctccccagccctttgcaggcccagcagacttgagtctgaggccccaggccctaggattcctcccccagagccactacctttgtccaggcctgggtggtatagggcgtttggccctgtgactatggctctggcaccactagggtcctggccctcttcttattcatgctttctcctttttctacctttttttctctcctaagacacctgcaataaagtgtagcaccctggtacatctgtgatgtttgccttctactctcttctgttccaaaaagacccaggtcccatttaagggcagtaatgtgttacaggtgctgtgataaaggctgggtactggatagcttgtgggcttatgggaggaggcctgagatgggtcagggggagaaggtattcagcaggtggctgggggactgtgtgcagcagttcgctatggcctgcctgtggtgcccatgtgtttgtacgggagggttagcttgagaaggaatcagattataaaaggtcttgaatgtc

SEQ ID NO: 440012 - DNA, 2603 bp, Homo sapiens
ccacaataggggcagacctgtccatccttctctgtgggtcccctgtacctttctcccccaacaggatcagacccagaggcagctggttggggtttgtcgagaagaaggattatccagatcagtcctttctaatctcagctcctgcctgtaccctcccatactcaccaaaccctcttccccaccaccctgagctgaggagcacagtttgaggcccccccaaccccccgccggtcggggccaggccaggccaggccagctcctctggcagcagagcctgggcaggtgacgggcgggcgcgggcgtcgcagctgagggagtaaggaggctcccaggaaccggagctggaaacccggccgaggtccagccagagcccaagagccagagtgacccctcgacctgtcagccatgggggagatggagcaactgcgtcaggaagcggagcagctcaagaagcagattgcagatgccaggaaagcctgtgctgacgttactctggcagagctggtgtctggcctagaggtggtgggacgagtccagatgcggacgcggcggacgttaaggggacacctggccaagatttacgccatgcactgggccactgattctaagctgctggtaagtgcctcgcaagatgggaagctgatcgtgtgggacagctacaccaccaacaaggtgcacgccatcccactgcgctcctcctgggtcatgacctgtgcctatgccccatcagggaactttgtggcatgtggggggctggacaacatgtgttccatctacaacctcaaatcccgtgagggcaatgtcaaggtcagccgggagctttctgctcacacaggttatctctcctgctgccgcttcctggatgacaacaatattgtgaccagctcgggggacaccacgtgtgccttgtgggacattgagactgggcagcagaagactgtatttgtgggacacacgggtgactgcatgagcctggctgtgtctcctgacttcaatctcttcatttcgggggcctgtgatgccagtgccaagctctgggatgtgcgagaggggacctgccgtcagactttcactggccacgagtcggacatcaacgccatctgtgatccaatccagaaacgtgcattacctttcctcgccatatctttttcgtcaccacctttaaactggaactgttttcccacctttgtcttttatgtcattgacgtttttgaagagtacaaaccagttttctgtagactctccctccgtttgagcttatctgacatttgctcgccgtgagatccaggccttgcatttgtactggaccctgttcttacacaccctgatccagcccacttgtgtagtctgggagtctgggacaacctccgtccgcccttctagccgggtcactgcaggcaagccttggtgctcttgcctgcgacgtggaaatgatgcctgcctgcagcgctgtatagtgcagagcgggcgaggggcatagggaagtcactggcacgtggtatgtgttggcagggctgcttctcaccccaaaccaagggagggacaggcagggaggctgagagcagcggcttgccctggagctgtcaggtgggaggcagagggcgggagaggctgtgggctgcccaggtctgatccctgacccacttgccacccgtgccctcagttcttccccaatggagaggccatctgcacgggctcggatgacgcttcctgccgcttgtttgacctgcgggcagaccaggagctgatctgcttctcccacgagagcatcatctgcggcatcacgtccgtggccttctccctcagtggccgcctactattcgctggctacgacgacttcaactgcaatgtctgggactccatgaagtctgagcgtgtgggtaagggccagccctggctgctgcttcctcagctggaaggaccctccccagccctccctccccattctgtaccccccatcagctcccatttcggactctcttactgctgtcccttgtcactgggtgactccacccctggaatccagtaccccttggttcccaactaggactgttttccctcagtgttgctctaagcagcctctctccactgcccaatgccatgactgctccctgccctaggagatctgtggaccatgactgtccagtcagttctgggttcctggcatttcaggggcacccactgagaggcaagacagcctcagggaaacatggaatcaaggcagaatcaaggagatctggagtggcccgagggccctgactgcagcctagggctcatctaagactagcctgaagttggtcagataggatggcttcttctctatcaagaggccaggtgctgatgaaaataacactggccaggggcagaatccaaatcctaattctgttgctcactttctgagtgtccttgcacaagtcactcctccatgggcctcagtttcttcatctggaagcaaagaaataggatgaacggttgccttctcttttccagcacctgtcaaggtgccctcgggttttttcatagtacacagatgcttccagcctttctctgtctgatcccagccctcccccaaccaaagctcttgacagagaaccccctgccct

SEQ ID NO: 440013 - DNA, 1967 bp, Homo sapiens
ggagacagagtctcacactgttgcccagtctggatgcagtggtgctatcatagctcaccgcagtctcaacctccagggttcaaccaatcctcccaccacagcctcctgagtagctgggactacagatgcgtgtgaccacgcttggctaatgttttgatttttgtgtagagatgggttcccactatgttgcccaggctgagctggaacttctgagctcaagcgatcctcctgcctcagtctcccaaaatattgggattacaggcatgagccaccacgcctagcccattttatcacgtttgctttatcattttttctctgtagagaaatagccatagatacacacacacatacacacttagatgtagatatacattttctttctgtgtcttttgaaagtaggttgcagacatcatgtttctttaccccttaagtacttcccgaaacaaagcccttctgtagcataatcactgtatgattcttaagatcaggaaactcaacattgacacaatactacagtctacagtctatattcaaatttcaccaatagcctcaaaaatgtccataatagctcatgtttttttctgtccaggatccaatccagaaacgtgcattacctttcctcgccatatctttttcgtcaccacctttaaactggaactgttttcccacctttgtcttttatgtcattgacgtttttgaagagtacaaaccagttttctgtagactctccctccgtttgagcttatctgacatttgctcgccgtgagatccaggccttgcatttgtactggaccctgttcttacacaccctgatccagcccacttgtgtagtctgggagtctgggacaacctccgtccgcccttctagccgggtcactgcaggcaagccttggtgctcttgcctgcgacgtggaaatgatgcctgcctgcagcgctgtatagtgcagagcgggcgaggggcatagggaagtcactggcacgtggtatgtgttggcagggctgcttctcaccccaaaccaagggagggacaggcagggaggctgagagcagcggcttgccctggagctgtcaggtgggaggcagagggcgggagaggctgtgggctgcccaggtctgatccctgacccacttgccacccgtgccctcagttcttccccaatggagaggccatctgcacgggctcggatgacgcttcctgccgcttgtttgacctgcgggcagaccaggagctgatctgcttctcccacgagagcatcatctgcggcatcacgtccgtggccttctccctcagtggccgcctactattcgctggctacgacgacttcaactgcaatgtctgggactccatgaagtctgagcgtgtgggcatcctctctggccacgataacagggtgagctgcctgggagtcacagctgacgggatggctgtggccacaggttcctgggacagcttcctcaaaatctggaactgaggaggctggagaaagggaagtggaaggcagtgaacacactcagcagccccctgcccgaccccatctcattcaggtgttctcttctatattccgggtgccattcccactaagctttctcctttgagggcagtggggagcatgggactgtgcctttgggaggcagcatcagggacacaggggcaaagaactgccccatctcctcccatggccttccctccccacagtcctcacagcctctcccttaatgagcaaggacaacctgcccctccccagccctttgcaggcccagcagacttgagtctgaggccccaggccctaggattcctcccccagagccactacctttgtccaggcctgggtggtatagggcgtttggccctgtgactatggctctggcaccactagggtcctggccctcttcttattcatgctttctcctttttctacctttttttctctcctaagacacctgcaataaagtgtagcaccctggta

SEQ ID NO: 440014 - DNA, 2565 bp, Homo sapiens
ggagctggcctgggctctgctctcctgggctggggcgcaggcagggctcaggcaggctggggctggacgcaaaggacctcaaacttggagggcctagctggggagagggtgcagccacccagtcgtttccctgtgtcttggagtctggtgtgggcacgaagggcagaagcacagcctggtggggggttcctcaacaccgaccccatgttcctggcaggagccagagtgacccctcgacctgtcagccatgggggagatggagcaactgcgtcaggaagcggagcagctcaagaagcagattgcagtaactccagagccctacccctggggccccagaaaacagctggggacatgaggagcgtggcccagggggagggggctgggtttgctcttgagtgactagaagtgaccagggactttctaaacttggttcgcatatttgagacccccaagccccagagccccaagaccaacctgccctgaaggcccatgcacctgccacccccacctcgcccttgctcccctgatgtctgctttccctgcaggatgccaggaaagcctgtgctgacgttactctggcagagctggtgtctggcctagaggtggtgggacgagtccagatgcggacgcggcggacgttaaggggacacctggccaagatttacgccatgcactgggccactgattctaagctgctggtaagtgcctcgcaagatgggaagctgatcgtgtgggacagctacaccaccaacaaggtgcacgccatcccactgcgctcctcctgggtcatgacctgtgcctatgccccatcagggaactttgtggcatgtggggggctggacaacatgtgttccatctacaacctcaaatcccgtgagggcaatgtcaaggtcagccgggagctttctgctcacacaggttatctctcctgctgccgcttcctggatgacaacaatattgtgaccagctcgggggacaccacgtgtgccttgtgggacattgagactgggcagcagaagactgtatttgtgggacacacgggtgactgcatgagcctggctgtgtctcctgacttcaatctcttcatttcgggggcctgtgatgccagtgccaagctctgggatgtgcgagaggggacctgccgtcagactttcactggccacgagtcggacatcaacgccatctgtgatccaatccagaaacgtgcattacctttcctcgccatatctttttcgtcaccacctttaaactggaactgttttcccacctttgtcttttatgtcattgacgtttttgaagagtacaaaccagttttctgtagactctccctccgtttgagcttatctgacatttgctcgccgtgagatccaggccttgcatttgtactggaccctgttcttacacaccctgatccagcccacttgtgtagtctgggagtctgggacaacctccgtccgcccttctagccgggtcactgcaggcaagccttggtgctcttgcctgcgacgtggaaatgatgcctgcctgcagcgctgtatagtgcagagcgggcgaggggcatagggaagtcactggcacgtggtatgtgttggcagggctgcttctcaccccaaaccaagggagggacaggcagggaggctgagagcagcggcttgccctggagctgtcaggtgggaggcagagggcgggagaggctgtgggctgcccaggtctgatccctgacccacttgccacccgtgccctcagttcttccccaatggagaggccatctgcacgggctcggatgacgcttcctgccgcttgtttgacctgcgggcagaccaggagctgatctgcttctcccacgagagcatcatctgcggcatcacgtccgtggccttctccctcagtggccgcctactattcgctggctacgacgacttcaactgcaatgtctgggactccatgaagtctgagcgtgtgggcatcctctctggccacgataacagggtgagctgcctgggagtcacagctgacgggatggctgtggccacaggttcctgggacagcttcctcaaaatctggaactgaggaggctggagaaagggaagtggaaggcagtgaacacactcagcagccccctgcccgaccccatctcattcaggtgttctcttctatattccgggtgccattcccactaagctttctcctttgagggcagtggggagcatgggactgtgcctttgggaggcagcatcagggacacaggggcaaagaactgccccatctcctcccatggccttccctccccacagtcctcacagcctctcccttaatgagcaaggacaacctgcccctccccagccctttgcaggcccagcagacttgagtctgaggccccaggccctaggattcctcccccagagccactacctttgtccaggcctgggtggtatagggcgtttggccctgtgactatggctctggcaccactagggtcctggccctcttcttattcatgctttctcctttttctacctttttttctctcctaagacacctgcaataaagtgtagcaccctggta

SEQ ID NO: 440015 - DNA, 234 bp, Homo sapiens
ccagctcgggggacaccacgtggtgaggctgaacattgctggtgctggggcttgggagtgggcccggcctttctctaacagtctccctccattttggcagtgccttgtgggacattgagactgggcagcagaagactgtatttgtgggacacacgggtgactgcatgagcctggctgtgtctcctgacttcaatctcttcatttcgggggcctgtgatgccagtgccaagctct

SEQ ID NO: 440016 - DNA, 1949 bp, Homo sapiens
ccacaataggggcagacctgtccatccttctctgtgggtcccctgtacctttctcccccaacaggatcagacccagaggcagctggttggggtttgtcgagaagaaggattatccagatcagtcctttctaatctcagctcctgcctgtaccctcccatactcaccaaaccctcttccccaccaccctgagctgaggagcacagtttgaggcccccccaaccccccgccggtcggggccaggccaggccaggccagctcctctggcagcagagcctgggcaggtgacgggcgggcgcgggcgtcgcagctgagggagtaaggaggctcccaggaaccggagctggaaacccggccgaggtccagccagagcccaagagccagagtgacccctcgacctgtcagccatgggggagatggagcaactgcgtcaggaagcggagcagctcaagaagcagattgcagatgccaggaaagcctgtgctgacgttactctggcagagctggtgtctggcctagaggtggtgggacgagtccagatgcggacgcggcggacgttaaggggacacctggccaagatttacgccatgcactgggccactgattctaagctgctggtaagtgcctcgcaagatgggaagctgatcgtgtgggacagctacaccaccaacaaggtgcacgccatcccactgcgctcctcctgggtcatgacctgtgcctatgccccatcagggaactttgtggcatgtggggggctggacaacatgtgttccatctacaacctcaaatcccgtgagggcaatgtcaaggtcagccgggagctttctgctcacacaggttatctctcctgctgccgcttcctggatgacaacaatattgtgaccagctcgggggacaccacgtgtgccttgtgggacattgagactgggcagcagaagactgtatttgtgggacacacgggtgactgcatgagcctggctgtgtctcctgacttcaatctcttcatttcgggggcctgtgatgccagtgccaagctctgggatgtgcgagaggggacctgccgtcagactttcactggccacgagtcggacatcaacgccatctgtttcttccccaatggagaggccatctgcacgggctcggatgacgcttcctgccgcttgtttgacctgcgggcagaccaggagctgatctgcttctcccacgagagcatcatctgcggcatcacgtccgtggccttctccctcagtggccgcctactattcgctggctacgacgacttcaactgcaatgtctgggactccatgaagtctgagcgtgtgggcatcctctctggccacgataacagggtgagctgcctgggagtcacagctgacgggatggctgtggccacaggttcctgggacagcttcctcaaaatctggaactgaggaggctggagaaagggaagtggaaggcagtgaacacactcagcagccccctgcccgaccccatctcattcaggtgttctcttctatattccgggtgccattcccactaagctttctcctttgagggcagtggggagcatgggactgtgcctttgggaggcagcatcagggacacaggggcaaagaactgccccatctcctcccatggccttccctccccacagtcctcacagcctctcccttaatgagcaaggacaacctgcccctccccagccctttgcaggcccagcagacttgagtctgaggccccaggccctaggattcctcccccagagccactacctttgtccaggcctgggtggtatagggcgtttggccctgtgactatggctctggcaccactagggtcctggccctcttcttattcatgctttctcctttttctacctttttttctctcctaagacacctgcaataaagtgtagcaccctggtaaaaaaaaaagaaaaacctcgtgccga

SEQ ID NO: 440017 - DNA, 1508 bp, Homo sapiens
  misc_feature (1327)..(1327): n is a, c, g, or t
  misc_feature (1329)..(1329): n is a, c, g, or t
ccacaataggggcagacctgtccatccttctctgtgggtcccctgtacctttctcccccaacaggatcagacccagaggcagctggttggggtttgtcgagaagaaggattatccagatcagtcctttctaatctcagctcctgcctgtaccctcccatactcaccaaaccctcttccccaccaccctgagctgaggagcacagtttgaggcccccccaaccccccgccggtcggggccaggccaggccaggccagctcctctggcagcagagcctgggcaggtgacgggcgggcgcgggcgtcgcagctgagggagtaaggaggctcccaggaaccggagctggaaacccggccgaggtccagccagagcccaagagccagagtgacccctcgacctgtcagccatgggggagatggagcaactgcgtcaggaagcggagcagctcaagaagcagattgcagatgccaggaaagcctgtgctgacgttactctggcagagctggtgtctggcctagaggtggtgggacgagtccagatgcggacgcggcggacgttaaggggacacctggccaagatttacgccatgcactgggccactgattctaagctgctggtaagtgcctcgcaagatgggaagctgatcgtgtgggacagctacaccaccaacaaggtgcacgccatcccactgcgctcctcctgggtcatgacctgtgcctatgccccatcagggaactttgtggcatgtggggggctggacaacatgtgttccatctacaacctcaaatcccgtgagggcaatgtcaaggtcagccgggagctttctgctcacacaggttatctctcctgctgccgcttcctggatgacaacaatattgtgaccagctcgggggacaccacgtgtgccttgtgggacattgagactgggcagcagaagactgtatttgtgggacacacgggtgactgcatgagcctggctgtgtctcctgacttcaatctcttcatttcgggggcctgtgatgccagtgccaagctctgggatgtgcgagaggggacctgccgtcagactttcactggccacgagtcggacatcaacgccatctgtttcttccccaatggagaggccatctgcacgggctcggatgacgcttcctgccgcttgtttgacctgcgggcagaccaggagctgatctgcttctcccacgagagcatcatctgcggcatcacgtccgtggccttctccctcagtggccgcctactattcgctggctacgacgacttcaactgcaatgtctgggactccatgaagtctgagcgtgtggggctcncntctgggccggataaccggctgagcggctgggatcccgtgacggtgggtgggcccaggtccggggaggtccccatttggccgggcgtcggcaccgcggtgggcgcgctacctcggccgccgccgcttccggggtccctggggcccccacctgggcggcgcgcgcccgcgacgccgggcac

SEQ ID NO: 440018 - DNA, 2044 bp, Homo sapiens
ccacaataggggcagacctgtccatccttctctgtgggtcccctgtacctttctcccccaacaggatcagacccagaggcagctggttggggtttgtcgagaagaaggattatccagatcagtcctttctaatctcagctcctgcctgtaccctcccatactcaccaaaccctcttccccaccaccctgagctgaggagcacagtttgaggcccccccaaccccccgccggtcggggccaggccaggccaggccagctcctctggcagcagagcctgggcaggtgacgggcgggcgcgggcgtcgcagctgagggagtaaggaggctcccaggaaccggagctggaaacccggccgaggtccagccagagcccaagagccagagtgacccctcgacctgtcagccatgggggagatggagcaactgcgtcaggaagcggagcagctcaagaagcagattgcagatgccaggaaagcctgtgctgacgttactctggcagagctggtgtctggcctagaggtggtgggacgagtccagatgcggacgcggcggacgttaaggggacacctggccaagatttacgccatgcactgggccactgattctaagctgctggtaagtgcctcgcaagatgggaagctgatcgtgtgggacagctacaccaccaacaaggtgcacgccatcccactgcgctcctcctgggtcatgacctgtgcctatgccccatcagggaactttgtggcatgtggggggctggacaacatgtgttccatctacaacctcaaatcccgtgagggcaatgtcaaggtcagccgggagctttctgctcacacaggttatctctcctgctgccgcttcctggatgacaacaatattgtgaccagctcgggggacaccacgtgtgccttgtgggacattgagactgggcagcagaagactgtatttgtgggacacacgggtgactgcatgagcctggctgtgtctcctgacttcaatctcttcatttcgggggcctgtgatgccagtgccaagctctgggatgtgcgagaggggacctgccgtcagactttcactggccacgagtcggacatcaacgccatctgtttcttccccaatggagaggccatctgcacgggctcggatgacgcttcctgccgcttgtttgacctgcgggcagaccaggagctgatctgcttctcccacgagagcatcatctgcggcatcacgtccgtggccttctccctcagtggccgcctactattcgctggctacgacgacttcaactgcaatgtctgggactccatgaagtctgagcgtgtgggtaagggccagccctggctgctgcttcctcagctggaaggaccctccccagccctccctccccattctgtaccccccatcagctcccatttcggactctcttactgctgtcccttgtcactgggtgactccacccctggaatccagtaccccttggttcccaactaggactgttttccctcagtgttgctctaagcagcctctctccactgcccaatgccatgactgctccctgccctaggagatctgtggaccatgactgtccagtcagttctgggttcctggcatttcaggggcacccactgagaggcaagacagcctcagggaaacatggaatcaaggcagaatcaaggagatctggagtggcccgagggccctgactgcagcctagggctcatctaagactagcctgaagttggtcagataggatggcttcttctctatcaagaggccaggtgctgatgaaaataacactggccaggggcagaatccaaatcctaattctgttgctcactttctgagtgtccttgcacaagtcactcctccatgggcctcagtttcttcatctggaagcaaagaaataggatgaacggttgccttctcttttccagcacctgtcaaggtgccctcgggttttttcatagtacacagatgcttccagcctttctctgtctgatcccagccctcccccaaccaaagctcttgacagagaaccccctgccct

SEQ ID NO: 440019 - DNA, 1758 bp, Homo sapiens
ccacaataggggcagacctgtccatccttctctgtgggtcccctgtacctttctcccccaacaggatcagacccagaggcagctggttggggtttgtcgagaagaaggattatccagatcagtcctttctaatctcagctcctgcctgtaccctcccatactcaccaaaccctcttccccaccaccctgagctgaggagcacagtttgaggagccagagtgacccctcgacctgtcagccatgggggagatggagcaactgcgtcaggaagcggagcagctcaagaagcagattgcagatgccaggaaagcctgtgctgacgttactctggcagagctggtgtctggcctagaggtggtgggacgagtccagatgcggacgcggcggacgttaaggggacacctggccaagatttacgccatgcactgggccactgattctaagctgctggtaagtgcctcgcaagatgggaagctgatcgtgtgggacagctacaccaccaacaaggtgcacgccatcccactgcgctcctcctgggtcatgacctgtgcctatgccccatcagggaactttgtggcatgtggggggctggacaacatgtgttccatctacaacctcaaatcccgtgagggcaatgtcaaggtcagccgggagctttctgctcacacaggttatctctcctgctgccgcttcctggatgacaacaatattgtgaccagctcgggggacaccacgtgtgccttgtgggacattgagactgggcagcagaagactgtatttgtgggacacacgggtgactgcatgagcctggctgtgtctcctgacttcaatctcttcatttcgggggcctgtgatgccagtgccaagctctgggatgtgcgagaggggacctgccgtcagactttcactggccacgagtcggacatcaacgccatctgtttcttccccaatggagaggccatctgcacgggctcggatgacgcttcctgccgcttgtttgacctgcgggcagaccaggagctgatctgcttctcccacgagagcatcatctgcggcatcacgtccgtggccttctccctcagtggccgcctactattcgctggctacgacgacttcaactgcaatgtctgggactccatgaagtctgagcgtgtgggcatcctctctggccacgataacagggtgagctgcctgggagtcacagctgacgggatggctgtggccacaggttcctgggacagcttcctcaaaatctggaactgaggaggctggagaaagggaagtggaaggcagtgaacacactcagcagccccctgcccgaccccatctcattcaggtgttctcttctatattccgggtgccattcccactaagctttctcctttgagggcagtggggagcatgggactgtgcctttgggaggcagcatcagggacacaggggcaaagaactgccccatctcctcccatggccttccctccccacagtcctcacagcctctcccttaatgagcaaggacaacctgcccctccccagccctttgcaggcccagcagacttgagtctgaggccccaggccctaggattcctcccccagagccactacctttgtccaggcctgggtggtatagggcgtttggccctgtgactatggctctggcaccactagggtcctggccctcttcttattcatgctttctcctttttctacctttttttctctcctaagacacctgcaataaagtgtagcaccctggta

SEQ ID NO: 440020 - DNA, 1060 bp, Homo sapiens
ccacaataggggcagacctgtccatccttctctgtgggtcccctgtacctttctcccccaacaggatcagacccagaggcagctggttggggtttgtcgagaagaaggattatccagatcagtcctttctaatctcagctcctgcctgtaccctcccatactcaccaaaccctcttccccaccaccctgagctgaggagcacagtttgaggcccccccaaccccccgccggtcggggccaggccaggccaggccagctcctctggcagcagagcctgggcaggtgacgggcgggcgcgggcgtcgcagctgagggagtaaggaggctcccaggaaccggagctggaaacccggccgaggtccagccagagcccaagagccagagtgacccctcgacctgtcagccatgggggagatggagcaactgcgtcaggaagcggagcagctcaagaagcagattgcagatgccaggaaagcctgtgctgacgttactctggcagagctggtgtctggcctagaggtggtgggacgagtccagatgcggacgcggcggacgttaaggggacacctggccaagatttacgccatgcactgggccactgattctaagctgctggtaagtgcctcgcaagatgggaagctgatcgtgtgggacagctacaccaccaacaaggtgcacgccatcccactgcgctcctcctgggtcatgacctgtgcctatgccccatcagggaactttgtggcatgtggggggctggacaacatgtgttccatctacaacctcaaatcccgtgagggcaatgtcaaggtcagccgggagctttctgctcacacaggttatctctcctgctgccgcttcctggatgacaacaatattgtgaccagctcgggggacaccacgtgcttgtgggacattgagactggcagcagagactggattgggggacccccggtgaatgctgaccaggtgggttcctagttaaacctcatcggggccgatgccatgcagcttggaattgaaggacgccgtaatctggcccaaggcataacctggttccaga

SEQ ID NO: 440021 - DNA, 1234 bp, Homo sapiens
cctcggttccgttgcgtagcgtgtccctcagtgggacactgcagggtgcggggacaactacgaagatggcggttgcgcgcttggcagctgtggcggcctgggtaccttgtcggagctggggctgggcagccgtccccttcggtccccaccgtggcctcagcgtgctgcttgcacggatacctcagcgggcgccacggtggctcccagcttgtagacaaaagacgtcactctcattccttaatcgaccagaccttccaaacctggcttataagaagctaaaaggcaaaagtccaggaattatcttcatccctggctatctttcttatatgaatggtacaaaagcgttggcgattgaggagttttgcaaatctctaggtcacgcctgcataaggtttgattactcaggagttggaagttcagatggtaactcagaggaaagcacactggggaaatggagaaaagatgttctttctataattgatgacttagctgatgggccacagattcttgttggatctagccttggagggtggcttatgcttcatgctgcaattgcacgaccagagaaggtcgtggctcttattggtgtagctacagctgcagataccttagtgacaaagtttaatcagcttcctgttgagctaaaaaaggaagtagagatgaaaggtgtgtggagcatgccatcaaaatactctgaagaaggagtttataacgttcagtacagtttcattaaagaagctgaacatcactgcttgttacatagcccaattcctgtgaactgccccataagattgctccatggcatgaaggatgacattgtaccttggcatacatcaatgcaggttgccgatcgagtactcagcacagatgtggatgtcatcctccgaaaacacagtgatcaccgaatgagggaaaaagcagacattcaacttcttgtttacactattgatgacttaattgataagctctcaactatagttaactagtatcacatgtttagttggtatgtaaactaatgtatccagaagattggaagagggataagaaatgaaagatcctgatactttaggtttttccctttcctctattttgtaaatataagatgagtattatttaatgatgtatttgcataagtaatgcaaattgtgaagaaggaccagctgctgtttagaaaattttctccttccttctgtccttgattttttttcattaaagtatttcctttttttaattc

SEQ ID NO: 440022 - DNA, 2332 bp, Homo sapiens
cctcggttccgttgcgtagcgtgtccctcagtgggacactgcagggtgcggggacaactacgaagatggcggttgcgcgcttggcagctgtggcggcctgggtaccttgtcggagctggggctgggcagccgtccccttcggtccccaccgtggcctcagcgtgctgcttgcacggatacctcagcgggcgccacggtggctcccagattcttgttggatctagccttggagggtggcttatgcttcatgctgcaattgcacgaccagagaaggtcgtggctcttattggtgtagctacagctgcagataccttagtgacaaagtttaatcagcttcctgttgagctaaaaaaggaagtagagatgaaaggtgtgtggagcatgccatcaaaatactctgaagaaggagtttataacgttcagtacagtttcattaaagaagctgaacatcactgcttgttacatagcccaattcctgtgaactgccccataagattgctccatggcatgaaggatgacattgtaccttggcatacatcaatgcaggttgccgatcgagtactcagcacagatgtggatgtcatcctccgaaaacacagtgatcaccgaatgagggaaaaagcagacattcaacttcttgtttacactattgatgacttaattgataagctctcaactatagttaactagtatcacatgtttagttggtatgtaaactaatgtatccagaagattggaagagggataagaaatgaaagatcctgatactttaggtttttccctttcctctattttgtaaatataagatgagtattatttaatgatgtatttgcataagtaatgcaaattgtgaagaaggaccagctgctgtttagaaaattttctccttccttctgtccttgattttttttcattaaagtatttcctttttttaattcaagaaaagtttacctttcttatgcttatgttagctatgccagctcttaattgcatccttttctaattaggattattaataaagcgtgaatattttgttttttattatagacagaaatttgtaacattacttctgatttgaaaatgcaattcacaaaatatagggaaatttttattgaagtaaatttgaaatgatggagaaatttcagaagcataataaagttcacaataaggataatactttatataatgtataaagtatatataatataatatatatgttatataaactgcacattatattcaaacttaaaattgagctttttttttaaaggcccaaaattgtacagtgatacaaggagctatttctaaaatttggcttatgtataatatatttaaatggggaatttcatctaaaacaatgatgtagtatttttaatattctgattggtaaaattaaagaggaaattaatctttatatattatttcttgcagaaacattcattattttattaatattgccctaagtacaactaggcaagtgattgccacctaaatcagaagacgttctaaagtcagtaagaaagtgtgaaatgctagtataaaggttattttttttctttcctaaataactaaagtgaggtgtagattgagccttgatattatttagttaatgttttttattaattaattttggctggactttatttagcttgattaggttattatctgtcaaaccttttaagttgacaacatgactcatatatatacatgtgtataagatgagcatgtgtcgaagacttattcgactcattaatgaggaaaccagcagatagtaaacctggttcaaagtacaattcaagaaactgagtatttatgggcattgaagaaaaaatgttgagataaaattgctgtgcagaaaaaagtgttaatgaagccgacctgactacttaaccttagagacctgctttacaaggttggcccttgattggcatctgggaacttggagttcagggggcttccaccattcccagaactgatcaaagtagcttactatatctaaactgtaaaacaatatagtttctcctgaacacctgctttccttctgggagtctggaattttggtatgtgccaggcagagactacctttgtgaccagctcccagtaaaaaccccaggcactcagtctctaacaagcttttctggttgacagtgtttcacaagtgctgttacaactggttgctgggagaattaagctcatcctctgtgattccactggcggaggattcttggaagcttgcacttagtttcccctgacttcaccccatgtgtcttttttcctttgctgattttgttttgtatcctttcactgtaataaatcatggccgtgagcagaa

SEQ ID NO: 440023 - DNA, 2628 bp, Homo sapiens
cctcggttccgttgcgtagcgtgtccctcagtgggacactgcagggtgcggggacaactacgaagatggcggttgcgcgcttggcagctgtggcggcctgggtaccttgtcggagctggggctgggcagccgtccccttcggtccccaccgtggcctcagcgtgctgcttgcacggatacctcagcgggcgccacggtggctcccagcttgtagacaaaagacgtcactctcattccttaatcgaccagaccttccaaacctggcttataagaagctaaaaggcaaaagtccaggaattatcttcatccctggctatctttcttatatgaatggtacaaaagcgttggcgattgaggagttttgcaaatctctaggtcacgcctgcataaggtttgattactcaggagttggaagttcagatggtaactcagaggaaagcacactggggaaatggagaaaagatgttctttctataattgatgacttagctgatgggccacagattcttgttggatctagccttggagggtggcttatgcttcatgctgcaattgcacgaccagagaaggtcgtggctcttattggtgtagctacagctgcagataccttagtgacaaagtttaatcagcttcctgttgagctaaaaaaggaagtagagatgaaaggtgtgtggagcatgccatcaaaatactctgaagaaggagtttataacgttcagtacagtttcattaaagaagctgaacatcactgcttgttacatagcccaattcctgtgaactgccccataagattgctccatggcatgaaggatgacattgtaccttggcatacatcaatgcaggttgccgatcgagtactcagcacagatgtggatgtcatcctccgaaaacacagtgatcaccgaatgagggaaaaagcagacattcaacttcttgtttacactattgatgacttaattgataagctctcaactatagttaactagtatcacatgtttagttggtatgtaaactaatgtatccagaagattggaagagggataagaaatgaaagatcctgatactttaggtttttccctttcctctattttgtaaatataagatgagtattatttaatgatgtatttgcataagtaatgcaaattgtgaagaaggaccagctgctgtttagaaaattttctccttccttctgtccttgattttttttcattaaagtatttcctttttttaattcaagaaaagtttacctttcttatgcttatgttagctatgccagctcttaattgcatccttttctaattaggattattaataaagcgtgaatattttgttttttattatagacagaaatttgtaacattacttctgatttgaaaatgcaattcacaaaatatagggaaatttttattgaagtaaatttgaaatgatggagaaatttcagaagcataataaagttcacaataaggataatactttatataatgtataaagtatatataatataatatatatgttatataaactgcacattatattcaaacttaaaattgagctttttttttaaaggcccaaaattgtacagtgatacaaggagctatttctaaaatttggcttatgtataatatatttaaatggggaatttcatctaaaacaatgatgtagtatttttaatattctgattggtaaaattaaagaggaaattaatctttatatattatttcttgcagaaacattcattattttattaatattgccctaagtacaactaggcaagtgattgccacctaaatcagaagacgttctaaagtcagtaagaaagtgtgaaatgctagtataaaggttattttttttctttcctaaataactaaagtgaggtgtagattgagccttgatattatttagttaatgttttttattaattaattttggctggactttatttagcttgattaggttattatctgtcaaaccttttaagttgacaacatgactcatatatatacatgtgtataagatgagcatgtgtcgaagacttattcgactcattaatgaggaaaccagcagatagtaaacctggttcaaagtacaattcaagaaactgagtatttatgggcattgaagaaaaaatgttgagataaaattgctgtgcagaaaaaagtgttaatgaagccgacctgactacttaaccttagagacctgctttacaaggttggcccttgattggcatctgggaacttggagttcagggggcttccaccattcccagaactgatcaaagtagcttactatatctaaactgtaaaacaatatagtttctcctgaacacctgctttccttctgggagtctggaattttggtatgtgccaggcagagactacctttgtgaccagctcccagtaaaaaccccaggcactcagtctctaacaagcttttctggttgacagtgtttcacaagtgctgttacaactggttgctgggagaattaagctcatcctctgtgattccactggcggaggattcttggaagcttgcacttagtttcccctgacttcaccccatgtgtcttttttcctttgctgattttgttttgtatcctttcactgtaataaatcatggccgtgagcagaa

SEQ ID NO: 440024 - DNA, 2789 bp, Homo sapiens
cctcggttccgttgcgtagcgtgtccctcagtgggacactgcagggtgcggggacaactacgaagatggcggttgcgcgcttggcagctgtggcggcctgggtaccttgtcggagctggggctgggcagccgtccccttcggtccccaccgtggcctcagcgtgctgcttgcacggatacctcagcgggcgccacggtggctcccagcttgtagacaaaagacgtcactctcattccttaatcgaccagaccttccaaacctggcttataagaagctaaaaggcaaaagtccaggaattatcttcatccctggctatctttcttatatgaatggtacaaaagcgttggcgattgaggagttttgcaaatctctaggtcacgcctgcataaggtttgattactcaggagttggaagttcagatggtaactcagaggaaagcacactggggaaatggagaaaagatgttctttctataattgatgacttagctgatgggccacagattcttgttggatctagccttggagggtggcttatgcttcatgctgcaattgcacgaccagagaaggtcgtggctcttattggtgtagctacagctgcagataccttagtgacaaagtttaatcagcttcctgttgagctaaaaaaggaagtagagatgaaaggtgtgtggagcatgccatcaaaatactctgaagaaggagtttataacgttcagtacagtttcattaaagaagctgaacatcactgcttgttacatagcccaattcctgtgaactgccccataagattgctccatggcatgaaggatgacattgtaccttggcatacatcaatgcaggttgccgatcgagtactcagcacagatgtggatgtcatcctccgaaaacacagtgatcaccgaatgagggaaaaagcagacattcaacttcttgtttacactattgatgacttaattgataagctctcaactatagttaactagtatcacatgtttagttggtatgtaaactaatgtatccagaagattggaagagggataagaaatgaaagatcctgatactttaggtttttccctttcctctattttgtaaatataagatgagtattatttaatgatgtatttgcataagtaatgcaaattgtgaagaaggaccagctgctgtttagaaaattttctccttccttctgtccttgattttttttcattaaagtatttcctttttttaattcaagaaaagtttacctttcttatgcttatgttagctatgccagctcttaattgcatccttttctaattaggattattaataaagcgtgaatattttgttttttattatagacagaaatttgtaacattacttctgatttgaaaatgcaattcacaaaatatagggaaatttttattgaagtaaatttgaaatgatggagaaatttcagaagcataataaagttcacaataaggataatactttatataatgtataaagtatatataatataatatatatgttatataaactgcacattatattcaaacttaaaattgagctttttttttaaaggcccaaaattgtacagtgatacaaggagctatttctaaaatttggcttatgtataatatatttaaatggggaatttcatctaaaacaatgatgtagtatttttaatattctgattggtaaaattaaagaggaaattaatctttatatattatttcttgcagaaacattcattattttattaatattgccctaagtacaactaggcaagtgattgccacctaaatcagaagacgttctaaagtcagtaagaaagtgtgaaatgctagtataaaggttattttttttctttcctaaataactaaagtgaggtgtagattgagccttgatattatttagttaatgttttttattaattaattttggctggactttatttagcttgattaggttattatctgtcaaaccttttaagttgacaacatgactcatatatatacatgtgtataagatgagcatgtgtcgaagacttattcgactcattaatgaggaaaccagcagatagtaaacctggttcaaagtacaattcaagaaactgagtatttatgggcattgaagaaaaaatgttgagataaaattgctgtgcagaaaaaagtgttaatgaagccgacctgactacttaaccttagagacctgctttacaaggttggcccttgattggcatctgggaacttggagttcagggggcttccaccattcccagaactgatcaaagtagcttactatatctaaactgtaaaacaatatagtttctcctgaacacctgctttccttctgggagtctggaattttggtatgtgccaggcagagactacctttgtgaccagctcccagtaaaaaccccaggcactcagtctctaacaagcttttctggttgacagtgtttcacaagtgctgttacaactggttgctgggagaattaagctcatcctctgtgattccactggcggaggattcttggaagcttgcacttagtttcccctgacttcaccccatgtgtcttttttcctttgctgattttgttttgtatcctttcactgtaataaatcatggccgtgagcagaaatcggctataggagccggttcaatcactgggcgcgataaaggcgtgcgggaaacctgggtcccaatattcgctggggatcccctgcagagggaaaggcggcgaggcgccacaaggacgcgatggaagagagtgggcatagaacacggcagggtaccttcgg

SEQ ID NO: 440025 - DNA, 1116 bp, Homo sapiens
cctcggttccgttgcgtagcgtgtccctcagtgggacactgcagggtgcggggacaactacgaagatggcggttgcgcgcttggcagctgtggcggcctgggtaccttgtcggagctggggctgggcagccgtccccttcggtccccaccgtggcctcagcgtgctgcttgcacggatacctcagcgggcgccacggtggctcccagcttgtagacaaaagacgtcactctcattccttaatcgaccagaccttccaaacctggcttataagaagctaaaaggcaaaagtccaggaattatcttcatccctggctatctttcttatatgaatggtacaaaagcgttggcgattgaggagttttgcaaatctctaggtcacgcctgcataaggtttgattactcaggagttggaagttcagatggtaactcagaggaaagcacactggggaaatggagaaaagatgttctttctataattgatgacttagctgatgggccacagattcttgttggatctagccttggagggtggcttatgcttcatgctgcaattgcacgaccagagaaggtcgtggctcttattggtgtagctacagctgcagataccttagtgacaaagtttaatcagcttcctgttgagctaaaaaaggaagtagagatgaaaggtgtgtggagcatgccatcaaaatactctgaagaaggagtttataacgttcagtacagtttcattaaagaagctgaacatcactgcttgttacatagcccaattcctgtgaactgccccataagattgctccatggcatgaaggatgacattgtaccttggcatacatcaatgcaggttgccgatcgagtactcagcacagatgtggatgtcatcctccgaaaacacagtgatcaccgaatgagggaaaaagcagacattcaacttcttgtttacactattgatgacttaattgataagctctcaactatagttaactagtatcacatgtttagttggtatgtaaactaatgtatccagaagattggaagagggataagaaatgaaagatcctgatactttaggtttttccctttcctctattttgtaaatataagatgagtattattta

SEQ ID NO: 440026 - DNA, 1062 bp, Homo sapiens
gtagatgaagtacaaggaggttctgaggatcagcatcttcaaaaggatggtgcctcatactccatgcctaggggtaatagatggtgcacattaatgctttaaagcacagctccgccctgcaccatactggcatatgagttgactgcagccacccctcaaacttttcatgccctaccacagctagtcaaaggaaaatgcccgaacttttctaaacagccctggactcttttttcccttctctgtgctgaggagttgaggactatccccatttaaaactgcagctgttcccctctttaccctcttcacacagtggagctggccaagggcaggcacagcctcaccactgggaagtctgaagagccaccgggttgccctgatagcaccatgctctaacagattggtgggctggatgaaaatgcttccagggttcacagcgcatcacgtaccaccttccaaagacaaaagctgaaggtcagtagagtggagctagagagggggtgcttgctgcaaagggactgctttacccataatttcaccttccaagaagaacagggacaggaccaacaggcaagccaggcaacaacagagaatacccccgccctgagtttgtgcctctcaggttccagcctgtgtagtgactgccgatcgctccgactaaacaggaaggggaacccctttcggagccctggtgggaaagacattgttttaaccagttcataatcagccattagagaagaaagcagcatctgcgatgtcagcacaggctgatggtcactggtacactacggaattttataaacctggtggttcgtgtgccttggtcaccgctggctgcaaatgaagataattttcccaaaaggagcattcagttgcattctcattttcccttttggctctttcaaatataaacaagtacaataatgtttaacactggggaaatatacagtaagttacagactgtgctgtggccctgagggccggagctggttaaagggacaggacgccctgcccgcagttctgccctctggccctgagcttttatgaagcctattttcctaataa

SEQ ID NO: 440027 - DNA, 1894 bp, Homo sapiens
acagcggcggccgcatcgcgcctgcgcagtgccctcgtcccccgcagtctctgtgcgttgaagccggagaccgcggcggcctcagcgaggaccctccgccccggagccgccggccggagccgcagcctctgccgcagcgcccccgccacctgtcccctccccctccgcctccgccggagccgcctcgtgcactctggggtatggccgtcaatgtgtactccacatctgtgaccagtgaaaatctgagtcgccatgatatgcttgcatgggtcaacgactccctgcacctcaactataccaagatagaacagctttgttcaggggcagcctactgccagttcatggacatgctcttccccggctgtgtgcacttgaggaaagtgaagttccaggccaaactagagcatgaatacatccacaacttcaaggtgctgcaagcagctttcaagaagatgggtgttgacaaaatcattcctgtagagaaattagtgaaaggaaaattccaagataattttgagtttattcagtggtttaagaaattctttgacgcaaactatgatggaaaggattacaaccctctgctggcgcggcagggccaggacgtagcgccacctcctaacccaggtgatcagatcttcaacaaatccaagaaactcattggcacagcagttccacagaggacgtcccccacaggcccaaaaaacatgcagacctctggccggctgagcaatgtggcccccccctgcattctccggaagaatcctccatcagcccgaaatggcggccatgagactgatgcccaaattcttgaactcaaccaacagctggtggacttgaagctgacagtggatgggctggagaaggaacgtgacttctacttcagcaaacttcgtgacatcgagctcatctgccaggagcatgaaagtgaaaacagccctgttatctcaggcatcattggcatcctctatgccacagaggaaggattcgcaccccctgaggacgatgagattgaagagcatcaacaagaagaccaggacgagtactgagggcggccgcagccctggctgactgcacggcttccccgtgcctccctccctgctccactcccacattatagtcctttcctaacacggtcggccgggtgctttgtgtcagtgctgcagcactggggagccaggcgaggggggcttgggggcatggggccggaaagcaggcagaagcccgtcctgggtggtgctggcccagttggtgggacccctgtccacacccaccctatttatttccgttgtctctctgctgtgtcgcccaacacttcccagggtgctgctgccacccgccccagccagccacctgctcctgacagccagcagctgtgtatttgacaaagtcattggtatatttttacttactggattctccttgcactttacctgttcttttccagagctgacagcacgggctccggcgcagtgtgcctggcttggcttcccttccccatggctgggggctggggtaggactcacccattctaatttattttgtcttttggcttctcagtagctaaggggaaggctgatgtcaggagagggagagggggctgaggaggtagtgctgtaggcccagggggtcagggaaagggaggggggcatgtgagggatggaaatgacctcctggcaccaggctcacccacccaaggccccctgccccagcactgaatcccagcgctgccctgaggcccccagccactccctccagcagcctggttcaccacacaaactctgcctggaccccattgtctgtctgcttcccacctgccctccccaccccctgcccctcgggcaccagcctgcatatgtgttcacttttatttaaataaacttgtgtggtaaaagta

SEQ ID NO: 440028 - DNA, 1927 bp, Homo sapiens
acagcggcggccgcatcgcgcctgcgcagtgccctcgtcccccgcagtctctgtgcgttgaagccggagaccgcggcggcctcagcgaggaccctccgccccggagccgccggccggagccgcagcctctgccgcagcgcccccgccacctgtcccctccccctccgcctccgccggagccgcctcgtgcactctggggtatggccgtcaatgtgtactccacatctgtgaccagtgaaaatctgagtcgccatgatatgcttgcatgggtcaacgactccctgcacctcaactataccaagatagaacagctttgttcaggggcagcctactgccagttcatggacatgctcttccccggctgtgtgcacttgaggaaagtgaagttccaggccaaactagagcatgaatacatccacaacttcaaggtgctgcaagcagctttcaagaagatgggtgttgacaaaatcattcctgtagagaaattagtgaaaggaaaattccaagataattttgagtttattcagtggtttaagaaattctttgacgcaaactatgatggaaaggattacaaccctctgctggcgcggcagggccaggacgtagcgccacctcctaacccaggtgatcagatcttcaacaaatccaagaaactcattggcacagcagttccacagaggacgtcccccacaggcccaaaaaacatgcagacctctggccggctgagcaatgtggcccccccctgcattctccggaagaatcctccatcagcccgaaatggcggccatgagactgatgcccaaattcttgaactcaaccaacagctggtggacttgaagctgacagtggatgggctggagaaggaacgtgacttctacttcagcaaacttcgtgacatcgagctcatctgccaggagcatgaaagtgaaaacagccctgttatctcaggcatcattggcatcctctatgccacagaggaaggattcgcaccccctgaggacgatgagattgaagagcatcaacaagaagaccaggacgagtactgagggcggccgcagccctggctgactgcacggcttccccgtgcctccctccctgctccactcccacattatagtcctttcctaacacggtcggccgggtgctttgtgtcagtgctgcagcactggggagccaggcgaggggggcttgggggcatggggccggaaagcaggcagaagcccgtcctgggtggtgctggcccagttggtgggacccctgtccacacccaccctatttatttccgttgtctctctgctgtgtcgcccaacacttcccagggtgctgctgccacccgccccagccagccacctgctcctgacagccagcagctgtgtatttgacaaagtcattggtatatttttacttactggattctccttgcactttacctgttcttttccagagctgacagcacgggctccggcgcagtgtgcctggcttggcttcccttccccatggctgggggctggggtaggactcacccattctaatttattttgtcttttggcttctcagtagctaaggggaaggctgatgtcaggagagggagagggggctgaggaggtagtgctgtaggcccagggggtcagggaaagggaggggggcatgtgagggatggaaatgacctcctggcaccaggctcacccacccaaggccccctgccccagcactgaatcccagcgctgccctgaggcccccagccactccctccagcagcctggttcaccacacaaactctgcctggaccccattgtctgtctgcttcccacctgccctccccaccccctgcccctcgggcaccagcctgcatatgtgttcacttttatttaaataaacttgtgtggtaaaagtacatgccatgtgtccctcaactgaaaaaaaaaaa

SEQ ID NO: 440029 - DNA, 303 bp, Homo sapiens
gagagagagagagagagagagagagagagagagaggagagagagagagagagagagagagagaggatggaaatgacctcctggcaccaggctcacccacccaaggccccctgccccagcactgaatcccagcgctgccctgaggcccccagccactccctccagcagcctggttcaccacacaaactctgcctggaccccattgtctgtctgcttcccacctgccctccccaccccctgcccctcgggcaccagcctgcatatgtgttcacttttatttaaataaacttgtgtggtaaaagta

SEQ ID NO: 440030 - DNA, 354 bp, Homo sapiens
ctgttctgcctgggcctgccccactcgcccgcctgcttgctttgcactagaagcagcccgctctgtctagggaggtgcagtcgctagtgagcaagtcgccacggcatgctggctgcgctggggaggagctggggtccctgatttggccacccaaggccccctgccccagcactgaatcccagcgctgccctgaggcccccagccactccctccagcagcctggttcaccacacaaactctgcctggaccccattgtctgtctgcttcccacctgccctccccaccccctgcccctcgggcaccagcctgcatatgtgttcacttttatttaaataaacttgtgtggtaaaagta

SEQ ID NO: 440031 - DNA, 755 bp, Homo sapiens
gtgttgctttacggtctcaaggtggctcttaactctcagggaggctgagaaagcaggcattttgtgttactggcctctctattggagacagctggggtatggccgtcaatgtgtactccacatctgtgaccagtgaaaatctgagtcgccatgatatgcttgcatgggtcaacgactccctgcacctcaactataccaagatagaacagctttgttcaggggcagcctactgccagttcatggacatgctcttccccggctgtgtgcacttgaggaaagtgaagttccaggccaaactagagcatgaatacatccacaacttcaaggtgctgcaagcagctttcaagaagatgggtgttgacaaagtaggtgcctgcgctctggggggccctgaggagcagtgtgaccctggggaagaagaggacccaccagcccaggcaactggggctgctggggtcattccggtgctcgtgcctccctccacctcccgactctccagagggaattttccccctgctcaaggcacaatggaaaagcccacaacacttgccatgccatcatgacaacattcctttcccttcctcctctctggaccctgcccaccccaacactgagctctgtgcaccgctcctgtgaagttccacctctctctgtctctgtagggcccaagaaagtgtctctgctcactctactgcctcggtggctgcagacccccagcccacacgcaggcagtagagccaagggacgcctcccca

SEQ ID NO: 440032 - DNA, 1918 bp, Homo sapiens
caagcccagaataacctggatgtgtgactcacaggggtaggggtagcaattttgcagattttccaaacaggtgacttcagcccccgggcctgggcaggaaggggtagcccagtgacaatgggcatagtcccacttcaggaacgggaaacgtgttggctggctctgtggagttctctctcttctgatcccacagcatctgttccagttgtcttggccgctggggtatggccgtcaatgtgtactccacatctgtgaccagtgaaaatctgagtcgccatgatatgcttgcatgggtcaacgactccctgcacctcaactataccaagatagaacagctttgttcaggggcagcctactgccagttcatggacatgctcttccccggctgtgtgcacttgaggaaagtgaagttccaggccaaactagagcatgaatacatccacaacttcaaggtgctgcaagcagctttcaagaagatgggtgttgacaaaatcattcctgtagagaaattagtgaaaggaaaattccaagataattttgagtttattcagtggtttaagaaattctttgacgcaaactatgatggaaaggattacaaccctctgctggcgcggcagggccaggacgtagcgccacctcctaacccaggtgatcagatcttcaacaaatccaagaaactcattggcacagcagttccacagaggacgtcccccacaggcccaaaaaacatgcagacctctggccggctgagcaatgtggcccccccctgcattctccggaagaatcctccatcagcccgaaatggcggccatgagactgatgcccaaattcttgaactcaaccaacagctggtggacttgaagctgacagtggatgggctggagaaggaacgtgacttctacttcagcaaacttcgtgacatcgagctcatctgccaggagcatgaaagtgaaaacagccctgttatctcaggcatcattggcatcctctatgccacagaggaaggattcgcaccccctgaggacgatgagattgaagagcatcaacaagaagaccaggacgagtactgagggcggccgcagccctggctgactgcacggcttccccgtgcctccctccctgctccactcccacattatagtcctttcctaacacggtcggccgggtgctttgtgtcagtgctgcagcactggggagccaggcgaggggggcttgggggcatggggccggaaagcaggcagaagcccgtcctgggtggtgctggcccagttggtgggacccctgtccacacccaccctatttatttccgttgtctctctgctgtgtcgcccaacacttcccagggtgctgctgccacccgccccagccagccacctgctcctgacagccagcagctgtgtatttgacaaagtcattggtatatttttacttactggattctccttgcactttacctgttcttttccagagctgacagcacgggctccggcgcagtgtgcctggcttggcttcccttccccatggctgggggctggggtaggactcacccattctaatttattttgtcttttggcttctcagtagctaaggggaaggctgatgtcaggagagggagagggggctgaggaggtagtgctgtaggcccagggggtcagggaaagggaggggggcatgtgagggatggaaatgacctcctggcaccaggctcacccacccaaggccccctgccccagcactgaatcccagcgctgccctgaggcccccagccactccctccagcagcctggttcaccacacaaactctgcctggaccccattgtctgtctgcttcccacctgccctccccaccccctgcccctcgggcaccagcctgcatatgtgttcacttttatttaaataaacttgtgtggtaaaagta

SEQ ID NO: 440033 - DNA, 1877 bp, Homo sapiens
ctgttctgcctgggcctgccccactcgcccgcctgcttgctttgcactagaagcagcccgctctgtctagggaggtgcagtcgctagtgagcaagtcgccacggcatgctggctgcgctggggaggagctggggtccctgatttggccaccactgtgcagatacctggtccagcccagcagagggcaaaagagcccatcctgacacagggcccctggaggggcagccacccagggacaatggctttgggctggggcttctgttaggaaagaccctgtgccagctgcctttcctctagctatgagtacgagagggtcccgcacccttccaactctacttccccaaatttgcgtcctaatttctctcctctatccctcaggccagctctctccctgccccaacacctcacaccttgtttagttccctatagtttctgctctcccgggctcgccaaagggctgcccagctgctggagtgtccatgtggccaagactcggggcctagctgtagatgcccttcctggggtgggggcaggggggtgagagtgcctgcctgtcgcatgggcctgcccccgcagtcctcacaccaggctgtctcctgccacgtgcgctgtgggctcacgtggacttacctgactcttttcctctgggcagttccacagaggacgtcccccacaggcccaaaaaacatgcagacctctggccggctgagcaatgtggcccccccctgcattctccggaagaatcctccatcagcccgaaatggcggccatgagactgatgcccaaattcttgaactcaaccaacagctggtggacttgaagctgacagtggatgggctggagaaggaacgtgacttctacttcagcaaacttcgtgacatcgagctcatctgccaggagcatgaaagtgaaaacagccctgttatctcaggcatcattggcatcctctatgccacagaggaaggattcgcaccccctgaggacgatgagattgaagagcatcaacaagaagaccaggacgagtactgagggcggccgcagccctggctgactgcacggcttccccgtgcctccctccctgctccactcccacattatagtcctttcctaacacggtcggccgggtgctttgtgtcagtgctgcagcactggggagccaggcgaggggggcttgggggcatggggccggaaagcaggcagaagcccgtcctgggtggtgctggcccagttggtgggacccctgtccacacccaccctatttatttccgttgtctctctgctgtgtcgcccaacacttcccagggtgctgctgccacccgccccagccagccacctgctcctgacagccagcagctgtgtatttgacaaagtcattggtatatttttacttactggattctccttgcactttacctgttcttttccagagctgacagcacgggctccggcgcagtgtgcctggcttggcttcccttccccatggctgggggctggggtaggactcacccattctaatttattttgtcttttggcttctcagtagctaaggggaaggctgatgtcaggagagggagagggggctgaggaggtagtgctgtaggcccagggggtcagggaaagggaggggggcatgtgagggatggaaatgacctcctggcaccaggctcacccacccaaggccccctgccccagcactgaatcccagcgctgccctgaggcccccagccactccctccagcagcctggttcaccacacaaactctgcctggaccccattgtctgtctgcttcccacctgccctccccaccccctgcccctcgggcaccagcctgcatatgtgttcacttttatttaaataaacttgtgtggtaaaagta

SEQ ID NO: 440034 - DNA, 1811 bp, Homo sapiens
acagcggcggccgcatcgcgcctgcgcagtgccctcgtcccccgcagtctctgtgcgttgaagccggagaccgcggcggcctcagcgaggaccctccgccccggagccgccggccggagccgcagcctctgccgcagcgcccccgccacctgtcccctccccctccgcctccgccggagccgcctcgtgcactctggggtatggccgtcaatgtgtactccacatctgtgaccagtgaaaatctgagtcgccatgatatgcttgcatgggtcaacgactccctgcacctcaactataccaagatagaacagctttgttcaggggcagcctactgccagttcatggacatgctcttccccggctgtgtgcacttgaggaaagtgaagttccaggccaaactagagcatgaatacatccacaacttcaaggtgctgcaagcagctttcaagaagatgggtgttgacaaaatcattcctgtagagaaattagtgaaaggaaaattccaagataattttgagtttattcagtggtttaagaaattctttgacgcaaactatgatggaaaggattacaaccctctgctggcgcggcagggccaggacgtagcgccacctcctaacccagttccacagaggacgtcccccacaggccccccccccctgcattctccggaagaatcctccatcagcccgaaatggcggccatgagactgatgcccaaattcttgaactcaaccaacagctggtggacttgaagctgacagtggatgggctggagaaggaacgtgacttctacttcagcaaacttcgtgacatcgagctcatctgccaggagcatgaaagtgaaaacagccctgttatctcaggcatcattggcatcctctatgccacagaggaaggattcgcaccccctgaggacgatgagattgaagagcatcaacaagaagaccaggacgagtactgagggcggccgcagccctggctgactgcacggcttccccgtgcctccctccctgctccactcccacattatagtcctttcctaacacggtcggccgggtgctttgtgtcagtgctgcagcactggggagccaggcgaggggggcttgggggcatggggccggaaagcaggcagaagcccgtcctgggtggtgctggcccagttggtgggacccctgtccacacccaccctatttatttccgttgtctctctgctgtgtcgcccaacacttcccagggtgctgctgccacccgccccagccagccacctgctcctgacagccagcagctgtgtatttgacaaagtcattggtatatttttacttactggattctccttgcactttacctgttcttttccagagctgacagcacgggctccggcgcagtgtgcctggcttggcttcccttccccatggctgggggctggggtaggactcacccattctaatttattttgtcttttggcttctcagtagctaaggggaaggctgatgtcaggagagggagagggggctgaggaggtagtgctgtaggcccagggggtcagggaaagggaggggggcatgtgagggatggaaatgacctcctggcaccaggctcacccacccaaggccccctgccccagcactgaatcccagcgctgccctgaggcccccagccactccctccagcagcctggttcaccacacaaactctgcctggaccccattgtctgtctgcttcccacctgccctccccaccccctgcccctcgggcaccagcctgcatatgtgttcacttttatttaaataaacttgtgtggtaaaagta

SEQ ID NO: 440035 - DNA, 828 bp, Homo sapiens
acagcggcggccgcatcgcgcctgcgcagtgccctcgtcccccgcagtctctgtgcgttgaagccggagaccgcggcggcctcagcgaggaccctccgccccggagccgccggccggagccgcagcctctgccgcagcgcccccgccacctgtcccctccccctccgcctccgccggagccgcctcgtgcactctggggtatggccgtcaatgtgtactccacatctgtgaccagtgaaaatctgagtcgccatgatatgcttgcatgggtcaacgactccctgcacctcaactataccaagatagaacagctttgttcaggggcagcctactgccagttcatggacatgctcttccccggctgtgtgcacttgaggaaagtgaagttccaggccaaactagagcatgaatacatccacaacttcaaggtgctgcaagcagctttcaagaagatgggtgttgacaaaatcattcctgtagagaaattagtgaaaggaaaattccaagataattttgagtttattcagtggtttaagaaattctttgacgcaaactatgatggaaaggattacaaccctctgctggcgcggcagggccaggacgtagcgccacctcctaacccaggtgatcagatcttcaacaaatccaagaaactcattggcacagcagcccccagccactccctccagcagcctggttcaccacacaaactctgcctggaccccattgtctgtctgcttcccacctgccctccccaccccctgcccctcgggcaccagcctgcatatgtgttcacttttatttaaataaacttgtgtggtaaaagta

SEQ ID NO: 440036 - DNA, 857 bp, Homo sapiens
acagcggcggccgcatcgcgcctgcgcagtgccctcgtcccccgcagtctctgtgcgttgaagccggagaccgcggcggcctcagcgaggaccctccgccccggagccgccggccggagccgcagcctctgccgcagcgcccccgccacctgtcccctccccctccgcctccgccggagccgcctcgtgcactctggggtatggccgtcaatgtgtactccacatctgtgaccagtgaaaatctgagtcgccatgatatgcttgcatgggtcaacgactccctgcacctcaactataccaagatagaacagctttgttcaggggcagcctactgccagttcatggacatgctcttccccggctgtgtgcacttgaggaaagtgaagttccaggccaaactagagcatgaatacatccacaacttcaaggtgctgcaagcagctttcaagaagatgggtgttgacaaagtaggtgcctgcgctctggggggccctgaggagcagtgtgaccctggggaagaagaggacccaccagcccaggcaactggggctgctggggtcattccggtgctcgtgcctccctccacctcccgactctccagagggaattttccccctgctcaaggcacaatggaaaagcccacaacacttgccatgccatcatgacaacattcctttcccttcctcctctctggaccctgcccaccccaacactgagctctgtgcaccgctcctgtgaagttccacctctctctgtctctgtagggcccaagaaagtgtctctgctcactctactgcctcggtggctgcagacccccagcccacacgcaggcagtagagccaagggacgcctcccca

SEQ ID NO: 440037 - DNA, 1849 bp, Homo sapiens
acagcggcggccgcatcgcgcctgcgcagtgccctcgtcccccgcagtctctgtgcgttgaagccggagaccgcggcggcctcagcgaggaccctccgccccggagccgccggccggagccgcagcctctgccgcagcgcccccgccacctgtcccctccccctccgcctccgccggagccgcctcgtgcactctggggtatggccgtcaatgtgtactccacatctgtgaccagtgaaaatctgagtcgccatgatatgcttgcatgggtcaacgactccctgcacctcaactataccaagatagaacagctttgttcaggggcagcctactgccagttcatggacatgctcttccccggctgtgtgcacttgaggaaagtgaagttccaggccaaactagagcatgaatacatccacaacttcaaggtgctgcaagcagctttcaagaagatgggtgttgacaaaatcattcctgtagagaaattagtgaaaggaaaattccaagataattttgagtttattcagtggtttaagaaattctttgacgcaaactatgatggaaaggattacaaccctctgctggcgcggcagggccaggacgtagcgccacctcctaacccagttccacagaggacgtcccccacaggcccaaaaaacatgcagacctctggccggctgagcaatgtggcccccccctgcattctccggaagaatcctccatcagcccgaaatggcggccatgagactgatgcccaaattcttgaactcaaccaacagctggtggacttgaagctgacagtggatgggctggagaaggaacgtgacttctacttcagcaaacttcgtgacatcgagctcatctgccaggagcatgaaagtgaaaacagccctgttatctcaggcatcattggcatcctctatgccacagaggaaggattcgcaccccctgaggacgatgagattgaagagcatcaacaagaagaccaggacgagtactgagggcggccgcagccctggctgactgcacggcttccccgtgcctccctccctgctccactcccacattatagtcctttcctaacacggtcggccgggtgctttgtgtcagtgctgcagcactggggagccaggcgaggggggcttgggggcatggggccggaaagcaggcagaagcccgtcctgggtggtgctggcccagttggtgggacccctgtccacacccaccctatttatttccgttgtctctctgctgtgtcgcccaacacttcccagggtgctgctgccacccgccccagccagccacctgctcctgacagccagcagctgtgtatttgacaaagtcattggtatatttttacttactggattctccttgcactttacctgttcttttccagagctgacagcacgggctccggcgcagtgtgcctggcttggcttcccttccccatggctgggggctggggtaggactcacccattctaatttattttgtcttttggcttctcagtagctaaggggaaggctgatgtcaggagagggagagggggctgaggaggtagtgctgtaggcccagggggtcagggaaagggaggggggcatgtgagggatggaaatgacctcctggcaccaggctcacccacccaaggccccctgccccagcactgaatcccagcgctgccctgaggcccccagccactccctccagcagcctggttcaccacacaaactctgcctggaccccattgtctgtctgcttcccacctgccctccccaccccctgcccctcgggcaccagcctgcatatgtgttcacttttatttaaataaacttgtgtggtaaaagta

SEQ ID NO: 440038 - DNA, 1677 bp, Homo sapiens
acagcggcggccgcatcgcgcctgcgcagtgccctcgtcccccgcagtctctgtgcgttgaagccggagaccgcggcggcctcagcgaggaccctccgccccggagccgccggccggagccgcagcctctgccgcagcgcccccgccacctgtcccctccccctccgcctccgccggagccgcctcgtgcactctggggtatggccgtcaatgtgtactccacatctgtgaccagtgaaaatctgagtcgccatgatatgcttgcatgggtcaacgactccctgcacctcaactataccaagatagaacagctttgttcaggggcagcctactgccagttcatggacatgctcttccccggctgtgtgcacttgaggaaagtgaagttccaggccaaactagagcatgaatacatccacaacttcaaggtgctgcaagcagctttcaagaagatgggtgttgacaaaatcattcctgtagagaaattagtgaaaggaaaattccaagataattttgagtttattcagtggtttaagaaattctttgacgcaaactatgatggaaaggattacaaccctctgctggcgcggcagggccaggacgtagcgccacctcctaacccaggtgatcagatcttcaacaaatccaagaaactcattggcacagcagttccacagaggacgtcccccacaggcccaaaaaacatgcagacctctggccggctgagcaatgtggcccccccctgcattctccggaagaatcctccatcagcccgaaatggcggccatgagactgatgcccaaattcttgaactcaaccaacagctggtggacttgaagctgacagtggatgggctggagaaggaacgtgacttctacttcagcaaacttcgtgacatcgagctcatctgccaggagcatgaaagtgaaaacagccctgttatctcaggcatcattggcatcctctatgccacagaggaaggattcgcaccccctgaggacgatgagattgaagagcatcaacaagaagaccaggacgagtactgagggcggccgcagccctggctgactgcacggcttccccgtgcctccctccctgctccactcccacattatagtcctttcctaacacggtcggccgggtgctttgtgtcagtgctgcagcactggggagccaggcgaggggggcttgggggcatggggccggaaagcaggcagaagcccgtcctgggtggtgctggcccagttggtgggacccctgtccacacccaccctatttatttccgttgtctctctgctgtgtcgcccaacacttcccagggtgctgctgccacccgccccagccagccacctgctcctgacagccagcagctgtgtatttgacaaagtcattggtatatttttacttactggattctccttgcactttacctgttcttttccagagctgacagcacgggctccggcgcagtgtgcctggcttggcttcccttccccatggctgggggctggggtaggacccccagccactccctccagcagcctggttcaccacacaaactctgcctggaccccattgtctgtctgcttcccacctgccctccccaccccctgcccctcgggcaccagcctgcatatgtgttcacttttatttaaataaacttgtgtggtaaaagta

SEQ ID NO: 440039 - DNA, 894 bp, Homo sapiens
acagcggcggccgcatcgcgcctgcgcagtgccctcgtcccccgcagtctctgtgcgttgaagccggagaccgcggcggcctcagcgaggaccctccgccccggagccgccggccggagccgcagcctctgccgcagcgcccccgccacctgtcccctccccctccgcctccgccggagccgcctcgtgcactctggggtatggccgtcaatgtgtactccacatctgtgaccagtgaaaatctgagtcgccatgatatgcttgcatgggtcaacgactccctgcacctcaactataccaagatagaacagctttgttcaggggcagcctactgccagttcatggacatgctcttccccggctgtgtgcacttgaggaaagtgaagttccaggccaaactagagcatgaatacatccacaacttcaaggtgctgcaagcagctttcaagaagatgggtgttgacaaaatcattcctgtagagaaattagtgaaaggaaaattccaagataattttgagtttattcagtggtttaagaaattctttgacgcaaactatgatggaaaggattacaaccctctgctggcgcggcagggccaggacgtagcgccacctcctaacccaggtgatcagatcttcaacaaatccaagaaactcattggcacagcagttccacagaggacgtcccccacaggcccaaaaaacatgcagacctctggccggctgagcaatgtggcccccagccactccctccagcagcctggttcaccacacaaactctgcctggaccccattgtctgtctgcttcccacctgccctccccaccccctgcccctcgggcaccagcctgcatatgtgttcacttttatttaaataaacttgtgtggtaaaagta

SEQ ID NO: 440040 - DNA, 5457 bp, Homo sapiens
aggtccagagtcaactctgccccgaggcctagcttggccagaaggtagcagacagacagacggatctaacctctcttggatcctccagccatgaggctgctctgggggctgatctgggcatccagcttcttcaccttatctctgcagaagcccaggttgctcttgttctctccttctgtggttcatctgggggtccccctatcggtgggggtgcagctccaggatgtgccccgaggacaggtagtgaaaggatcagtgttcctgagaaacccatctcgtaataatgtcccctgctccccaaaggtggacttcacccttagctcagaaagagacttcgcactcctcagtctccaggtgcccttgaaagatgcgaagagctgtggcctccatcaactcctcagaggccctgaggtccagctggtggcccattcgccatggctaaaggactctctgtccagaacgacaaacatccagggtatcaacctgctcttctcctctcgccgggggcacctctttttgcagacggaccagcccatttacaaccctggccagcgggttcggtaccgggtctttgctctggatcagaagatgcgcccgagcactgacaccatcacagtcatggtggagaactctcacggcctccgcgtgcggaagaaggaggtgtacatgccctcgtccatcttccaggatgactttgtgatcccagacatctcagagccagggacctggaagatctcagcccgattctcagatggcctggaatccaacagcagcacccagtttgaggtgaagaaatatgtccttcccaactttgaggtgaagatcacccctggaaagccctacatcctgacggtgccaggccatcttgatgaaatgcagttagacatccaggccaggtacatctatgggaagccagtgcagggggtggcatatgtgcgctttgggctcctagatgaggatggtaagaagactttctttcgggggctggagagtcagaccaagctggtgaatggacagagccacatttccctctcaaaggcagagttccaggacgccctggagaagctgaatatgggcattactgacctccaggggctgcgcctctacgttgctgcagccatcattgagtatccaggtggggagatggaggaggcagagctcacatcctggtattttgtgtcatctcccttctccttggatcttagcaagaccaagcgacaccttgtgcctggggcccccttcctgctgcaggccttggtccgtgagatgtcaggctccccagcttctggcattcctgtcaaagtttctgccacggtgtcttctcctgggtctgttcctgaagtccaggacattcagcaaaacacagacgggagcggccaagtcagcattccaataattatccctcagaccatctcagagctgcagctctcagtatctgcaggctccccacatccagcgatagccaggctcactgtggcagccccaccttcaggaggccccgggtttctgtctattgagcggccggattctcgacctcctcgtgttggggacactctgaacctgaacttgcgagccgtgggcagtggggccaccttttctcattactactacatgatcctatcccgagggcagatcgtgttcatgaatcgagagcccaagaggaccctgacctcggtctcggtgtttgtggaccatcacctggcaccctccttctactttgtggccttctactaccatggagaccacccagtggccaactccctgcgagtggatgtccaggctggggcctgcgagggcaagctggagctcagcgtggacggtgccaagcagtaccggaacggggagtccgtgaagctccacttagaaaccgactccctagccctggtggcgctgggagccttggacacagctctgtatgctgcaggcagcaagtcccacaagcccctcaacatgggcaaggtctttgaagctatgaacagctatgacctcggctgtggtcctgggggtggggacagtgcccttcaggtgttccaggcagcgggcctggccttttctgatggagaccagtggaccttatccagaaagagactaagctgtcccaaggagaagacaacccggaaaaagagaaacgtgaacttccaaaaggcgattaatgagaaattgggtcagtatgcttccccgacagccaagcgctgctgccaggatggggtgacacgtctgcccatgatgcgttcctgcgagcagcgggcagcccgcgtgcagcagccggactgccgggagcccttcctgtcctgctgccaatttgctgagagtctgcgcaagaagagcagggacaagggccaggcgggcctccaacgagccctggagatcctgcaggaggaggacctgattgatgaggatgacattcccgtgcgcagcttcttcccagagaactggctctggagagtggaaacagtggaccgctttcaaatattgacactgtggctccccgactctctgaccacgtgggagatccatggcctgagcctgtccaaaaccaaaggcctatgtgtggccaccccagtccagctccgggtgttccgcgagttccacctgcacctccgcctgcccatgtctgtccgccgctttgagcagctggagctgcggcctgtcctctataactacctggataaaaacctgactgtgagcgtccacgtgtccccagtggaggggctgtgcctggctgggggcggagggctggcccagcaggtgctggtgcctgcgggctctgcccggcctgttgccttctctgtggtgcccacggcagccgccgctgtgtctctgaaggtggtggctcgagggtccttcgaattccctgtgggagatgcggtgtccaaggttctgcagattgagaaggaaggggccatccatagagaggagctggtctatgaactcaaccccttggaccaccgaggccggaccttggaaatacctggcaactctgatcccaatatgatccctgatggggactttaacagctacgtcagggttacagcctcagatccattggacactttaggctctgagggggccttgtcaccaggaggcgtggcctccctcttgaggcttcctcgaggctgtggggagcaaaccatgatctacttggctccgacactggctgcttcccgctacctggacaagacagagcagtggagcacactgcctcccgagaccaaggaccacgccgtggatctgatccagaaaggctacatgcggatccagcagtttcggaaggcggatggttcctatgcggcttggttgtcacgggacagcagcacctggctcacagcctttgtgttgaaggtcctgagtttggcccaggagcaggtaggaggctcgcctgagaaactgcaggagacatctaactggcttctgtcccagcagcaggctgacggctcgttccaggacctctctccagtgatacataggagcatgcaggggggtttggtgggcaatgatgagactgtggcactcacagcctttgtgaccatcgcccttcatcatgggctggccgtcttccaggatgagggtgcagagccattgaagcagagagtggaagcctccatctcaaaggcaagctcatttttgggggagaaagcaagtgctgggctcctgggtgcccacgcagctgccatcacggcctatgccctgacactgaccaaggcgcctgtggacctgctcggtgttgcccacaacaacctcatggcaatggcccaggagactggagataacctgtactggggctcagtcactggttctcagagcaatgccgtgtcgcccaccccggctcctcgcaacccatccgaccccatgccccaggccccagccctgtggattgaaaccacagcctacgccctgctgcacctcctgcttcacgagggcaaagcagagatggcagaccaggctgcggcctggctcacccgtcagggcagcttccaagggggattccgcagtacccaagacacggtgattgccctggatgccctgtctgcctactggattgcctcccacaccactgaggagaggggtctcaatgtgactctcagctccacaggccggaatgggttcaagtcccacgcgctgcagctgaacaaccgccagattcgcggcctggaggaggagctgcagttttccttgggcagcaagatcaatgtgaaggtgggaggaaacagcaaaggaaccctgaaggtccttcgtacctacaatgtcctggacatgaagaacacgacctgccaggacctacagatagaagtgacagtcaaaggccacgtcgagtacacgatggaagcaaacgaggactatgaggactatgagtacgatgagcttccagccaaggatgacccagatgcccctctgcagcccgtgacacccctgcagctgtttgagggtcggaggaaccgccgcaggagggaggcgcccaaggtggtggaggagcaggagtccagggtgcactacaccgtgtgcatctggcggaacggcaaggtggggctgtctggcatggccatcgcggacgtcaccctcctgagtggattccacgccctgcgtgctgacctggagaagctgacctccctctctgaccgttacgtgagtcactttgagaccgaggggccccacgtcctgctgtattttgactcggtccccacctcccgggagtgcgtgggctttgaggctgtgcaggaagtgccggtggggctggtgcagccggccagcgcaaccctgtacgactactacaaccccgagcgcagatgttctgtgttttacggggcaccaagtaagagcagactcttggccaccttgtgttctgctgaagtctgccagtgtgctgaggggaagtgccctcgccagcgtcgcgccctggagcggggtctgcaggacgaggatggctacaggatgaagtttgcctgctactacccccgtgtggagtacggcttccaggttaaggttctccgagaagacagcagagctgctttccgcctctttgagaccaagatcacccaagtcctgcacttcaccaaggatgtcaaggccgctgctaatcagatgcgcaacttcctggttcgagcctcctgccgccttcgcttggaacctgggaaagaatatttgatcatgggtctggatggggccacctatgacctcgagggacacccccagtacctgctggactcgaatagctggatcgaggagatgccctctgaacgcctgtgccggagcacccgccagcgggcagcctgtgcccagctcaacgacttcctccaggagtatggcactcaggggtgccaggtgtgagggctgccctcccacctccgctgggaggaacctgaacctgggaaccatgaagctggaagcactgctgtgtccgctttcatgaacacagcctgggaccagggcatattaaaggcttttggcagcaaagtgtca

SEQ ID NO: 440041 - DNA, 5407 bp, Homo sapiens
gaccagatcagcccccagagcagcctcatggctggaggatccaagagaggttagatccgtctgtctgtctgctaccttcttcaccttatctctgcagaagcccaggttgctcttgttctctccttctgtggttcatctgggggtccccctatcggtgggggtgcagctccaggatgtgccccgaggacaggtagtgaaaggatcagtgttcctgagaaacccatctcgtaataatgtcccctgctccccaaaggtggacttcacccttagctcagaaagagacttcgcactcctcagtctccaggtgcccttgaaagatgcgaagagctgtggcctccatcaactcctcagaggccctgaggtccagctggtggcccattcgccatggctaaaggactctctgtccagaacgacaaacatccagggtatcaacctgctcttctcctctcgccgggggcacctctttttgcagacggaccagcccatttacaaccctggccagcgggttcggtaccgggtctttgctctggatcagaagatgcgcccgagcactgacaccatcacagtcatggtggagaactctcacggcctccgcgtgcggaagaaggaggtgtacatgccctcgtccatcttccaggatgactttgtgatcccagacatctcagagccagggacctggaagatctcagcccgattctcagatggcctggaatccaacagcagcacccagtttgaggtgaagaaatatgtccttcccaactttgaggtgaagatcacccctggaaagccctacatcctgacggtgccaggccatcttgatgaaatgcagttagacatccaggccaggtacatctatgggaagccagtgcagggggtggcatatgtgcgctttgggctcctagatgaggatggtaagaagactttctttcgggggctggagagtcagaccaagctggtgaatggacagagccacatttccctctcaaaggcagagttccaggacgccctggagaagctgaatatgggcattactgacctccaggggctgcgcctctacgttgctgcagccatcattgagtatccaggtggggagatggaggaggcagagctcacatcctggtattttgtgtcatctcccttctccttggatcttagcaagaccaagcgacaccttgtgcctggggcccccttcctgctgcaggccttggtccgtgagatgtcaggctccccagcttctggcattcctgtcaaagtttctgccacggtgtcttctcctgggtctgttcctgaagtccaggacattcagcaaaacacagacgggagcggccaagtcagcattccaataattatccctcagaccatctcagagctgcagctctcagtatctgcaggctccccacatccagcgatagccaggctcactgtggcagccccaccttcaggaggccccgggtttctgtctattgagcggccggattctcgacctcctcgtgttggggacactctgaacctgaacttgcgagccgtgggcagtggggccaccttttctcattactactacatgatcctatcccgagggcagatcgtgttcatgaatcgagagcccaagaggaccctgacctcggtctcggtgtttgtggaccatcacctggcaccctccttctactttgtggccttctactaccatggagaccacccagtggccaactccctgcgagtggatgtccaggctggggcctgcgagggcaagctggagctcagcgtggacggtgccaagcagtaccggaacggggagtccgtgaagctccacttagaaaccgactccctagccctggtggcgctgggagccttggacacagctctgtatgctgcaggcagcaagtcccacaagcccctcaacatgggcaaggtctttgaagctatgaacagctatgacctcggctgtggtcctgggggtggggacagtgcccttcaggtgttccaggcagcgggcctggccttttctgatggagaccagtggaccttatccagaaagagactaagctgtcccaaggagaagacaacccggaaaaagagaaacgtgaacttccaaaaggcgattaatgagaaattgggtcagtatgcttccccgacagccaagcgctgctgccaggatggggtgacacgtctgcccatgatgcgttcctgcgagcagcgggcagcccgcgtgcagcagccggactgccgggagcccttcctgtcctgctgccaatttgctgagagtctgcgcaagaagagcagggacaagggccaggcgggcctccaacgagccctggagatcctgcaggaggaggacctgattgatgaggatgacattcccgtgcgcagcttcttcccagagaactggctctggagagtggaaacagtggaccgctttcaaatattgacactgtggctccccgactctctgaccacgtgggagatccatggcctgagcctgtccaaaaccaaaggcctatgtgtggccaccccagtccagctccgggtgttccgcgagttccacctgcacctccgcctgcccatgtctgtccgccgctttgagcagctggagctgcggcctgtcctctataactacctggataaaaacctgactgtgagcgtccacgtgtccccagtggaggggctgtgcctggctgggggcggagggctggcccagcaggtgctggtgcctgcgggctctgcccggcctgttgccttctctgtggtgcccacggcagccgccgctgtgtctctgaaggtggtggctcgagggtccttcgaattccctgtgggagatgcggtgtccaaggttctgcagattgagaaggaaggggccatccatagagaggagctggtctatgaactcaaccccttggaccaccgaggccggaccttggaaatacctggcaactctgatcccaatatgatccctgatggggactttaacagctacgtcagggttacagcctcagatccattggacactttaggctctgagggggccttgtcaccaggaggcgtggcctccctcttgaggcttcctcgaggctgtggggagcaaaccatgatctacttggctccgacactggctgcttcccgctacctggacaagacagagcagtggagcacactgcctcccgagaccaaggaccacgccgtggatctgatccagaaaggctacatgcggatccagcagtttcggaaggcggatggttcctatgcggcttggttgtcacgggacagcagcacctggctcacagcctttgtgttgaaggtcctgagtttggcccaggagcaggtaggaggctcgcctgagaaactgcaggagacatctaactggcttctgtcccagcagcaggctgacggctcgttccaggacctctctccagtgatacataggagcatgcaggggggtttggtgggcaatgatgagactgtggcactcacagcctttgtgaccatcgcccttcatcatgggctggccgtcttccaggatgagggtgcagagccattgaagcagagagtggaagcctccatctcaaaggcaagctcatttttgggggagaaagcaagtgctgggctcctgggtgcccacgcagctgccatcacggcctatgccctgacactgaccaaggcgcctgtggacctgctcggtgttgcccacaacaacctcatggcaatggcccaggagactggagataacctgtactggggctcagtcactggttctcagagcaatgccgtgtcgcccaccccggctcctcgcaacccatccgaccccatgccccaggccccagccctgtggattgaaaccacagcctacgccctgctgcacctcctgcttcacgagggcaaagcagagatggcagaccaggctgcggcctggctcacccgtcagggcagcttccaagggggattccgcagtacccaagacacggtgattgccctggatgccctgtctgcctactggattgcctcccacaccactgaggagaggggtctcaatgtgactctcagctccacaggccggaatgggttcaagtcccacgcgctgcagctgaacaaccgccagattcgcggcctggaggaggagctgcagttttccttgggcagcaagatcaatgtgaaggtgggaggaaacagcaaaggaaccctgaaggtccttcgtacctacaatgtcctggacatgaagaacacgacctgccaggacctacagatagaagtgacagtcaaaggccacgtcgagtacacgatggaagcaaacgaggactatgaggactatgagtacgatgagcttccagccaaggatgacccagatgcccctctgcagcccgtgacacccctgcagctgtttgagggtcggaggaaccgccgcaggagggaggcgcccaaggtggtggaggagcaggagtccagggtgcactacaccgtgtgcatctggcggaacggcaaggtggggctgtctggcatggccatcgcggacgtcaccctcctgagtggattccacgccctgcgtgctgacctggagaagctgacctccctctctgaccgttacgtgagtcactttgagaccgaggggccccacgtcctgctgtattttgactcggtccccacctcccgggagtgcgtgggctttgaggctgtgcaggaagtgccggtggggctggtgcagccggccagcgcaaccctgtacgactactacaaccccgagcgcagatgttctgtgttttacggggcaccaagtaagagcagactcttggccaccttgtgttctgctgaagtctgccagtgtgctgaggggaagtgccctcgccagcgtcgcgccctggagcggggtctgcaggacgaggatggctacaggatgaagtttgcctgctactacccccgtgtggagtacggcttccaggttaaggttctccgagaagacagcagagctgctttccgcctctttgagaccaagatcacccaagtcctgcacttcaccaaggatgtcaaggccgctgctaatcagatgcgcaacttcctggttcgagcctcctgccgccttcgcttggaacctgggaaagaatatttgatcatgggtctggatggggccacctatgacctcgagggacacccccagtacctgctggactcgaatagctggatcgaggagatgccctctgaacgcctgtgccggagcacccgccagcgggcagcctgtgcccagctcaacgacttcctccaggagtatggcactcaggggtgccaggtgtgagggctgccctcccacctccgctgggaggaacctgaacctgggaaccatgaagctggaagcactgctgtgtccgctttcatgaacacagcctgggaccagggcatattaaaggcttttggcagcaaagtgtca

SEQ ID NO: 440042 - DNA, 508 bp, Homo sapiens
aggtccagagtcaactctgccccgaggcctagcttggccagaaggtagcagacagacagacggatctaacctctcttggatcctccagccatgaggctgctctgggggctgatctgggcatccagcttcttcaccttatctctgcagaagcccaggttgctcttgttctctccttctgtggttcatctgggggtccccctatcggtgggggtgcagctccaggatgtgccccgaggacaggtagtgaaaggatcagtgttcctgagaaacccatctcgtaataatgtcccctgctccccaaaggtggacttcacccttagctcagaaagagacttcgcactcctcagtctccaggtgcccttgaaagatgcgaagagctgtggcctccatcaactcctcagaggccctgaggtccagctggtggcccattcgccatggctaaaggactctctgtccagaacgacaaacatccaggggcatattaaaggcttttggcagcaaagtgtca

SEQ ID NO: 440043 - DNA, 5570 bp, Homo sapiens
aggtccagagtcaactctgccccgaggcctagcttggccagaaggtagcagacagacagacggatctaacctctcttggatcctccagccatgaggctgctctgggggctgatctgggcatccagcttcttcaccttatctctgcagaagcccaggttgctcttgttctctccttctgtggttcatctgggggtccccctatcggtgggggtgcagctccaggatgtgccccgaggacaggtagtgaaaggatcagtgttcctgagaaacccatctcgtaataatgtcccctgctccccaaaggtggacttcacccttagctcagaaagagacttcgcactcctcagtctccaggtgcccttgaaagatgcgaagagctgtggcctccatcaactcctcagaggccctgaggtccagctggtggcccattcgccatggctaaaggactctctgtccagaacgacaaacatccagggtatcaacctgctcttctcctctcgccgggggcacctctttttgcagacggaccagcccatttacaaccctggccagcgggttcggtaccgggtctttgctctggatcagaagatgcgcccgagcactgacaccatcacagtcatggtggagaactctcacggcctccgcgtgcggaagaaggaggtgtacatgccctcgtccatcttccaggatgactttgtgatcccagacatctcagagccagggacctggaagatctcagcccgattctcagatggcctggaatccaacagcagcacccagtttgaggtgaagaaatatgtccttcccaactttgaggtgaagatcacccctggaaagccctacatcctgacggtgccaggccatcttgatgaaatgcagttagacatccaggccaggtacatctatgggaagccagtgcagggggtggcatatgtgcgctttgggctcctagatgaggatggtaagaagactttctttcgggggctggagagtcagaccaagctggtgaatggacagagccacatttccctctcaaaggcagagttccaggacgccctggagaagctgaatatgggcattactgacctccaggggctgcgcctctacgttgctgcagccatcattgagtatccaggtggggagatggaggaggcagagctcacatcctggtattttgtgtcatctcccttctccttggatcttagcaagaccaagcgacaccttgtgcctggggcccccttcctgctgcaggccttggtccgtgagatgtcaggctccccagcttctggcattcctgtcaaagtttctgccacggtgtcttctcctgggtctgttcctgaagtccaggacattcagcaaaacacagacgggagcggccaagtcagcattccaataattatccctcagaccatctcagagctgcagctctcagtatctgcaggctccccacatccagcgatagccaggctcactgtggcagccccaccttcaggaggccccgggtttctgtctattgagcggccggattctcgacctcctcgtgttggggacactctgaacctgaacttgcgagccgtgggcagtggggccaccttttctcattactactacatgatcctatcccgagggcagatcgtgttcatgaatcgagagcccaagaggaccctgacctcggtctcggtgtttgtggaccatcacctggcaccctccttctactttgtggccttctactaccatggagaccacccagtggccaactccctgcgagtggatgtccaggctggggcctgcgagggcaagctggagctcagcgtggacggtgccaagcagtaccggaacggggagtccgtgaagctccacttagaaaccgactccctagccctggtggcgctgggagccttggacacagctctgtatgctgcaggcagcaagtcccacaagcccctcaacatgggcaaggtctttgaagctatgaacagctatgacctcggctgtggtcctgggggtggggacagtgcccttcaggtgttccaggcagcgggcctggccttttctgatggagaccagtggaccttatccagaaagagactaagctgtcccaaggagaagacaacccggaaaaagagaaacgtgaacttccaaaaggcgattaatgagaaattgggtcagtatgcttccccgacagccaagcgctgctgccaggatggggtgacacgtctgcccatgatgcgttcctgcgagcagcgggcagcccgcgtgcagcagccggactgccgggagcccttcctgtcctgctgccaatttgctgagagtctgcgcaagaagagcagggacaagggccaggcgggcctccaacgagccctggagatcctgcaggaggaggacctgattgatgaggatgacattcccgtgcgcagcttcttcccagagaactggctctggagagtggaaacagtggaccgctttcaaatattgacactgtggctccccgactctctgaccacgtgggagatccatggcctgagcctgtccaaaaccaaaggcctatgtgtggccaccccagtccagctccgggtgttccgcgagttccacctgcacctccgcctgcccatgtctgtccgccgctttgagcagctggagctgcggcctgtcctctataactacctggataaaaacctgactgtgaggccccatgggagcctgagcatacaggagttgggggagccagggcccagtgaggggtggggaggctaaccgggccaggactctggccatcctcgttttcctgccctcaggtgagcgtccacgtgtccccagtggaggggctgtgcctggctgggggcggagggctggcccagcaggtgctggtgcctgcgggctctgcccggcctgttgccttctctgtggtgcccacggcagccgccgctgtgtctctgaaggtggtggctcgagggtccttcgaattccctgtgggagatgcggtgtccaaggttctgcagattgagaaggaaggggccatccatagagaggagctggtctatgaactcaaccccttggaccaccgaggccggaccttggaaatacctggcaactctgatcccaatatgatccctgatggggactttaacagctacgtcagggttacagcctcagatccattggacactttaggctctgagggggccttgtcaccaggaggcgtggcctccctcttgaggcttcctcgaggctgtggggagcaaaccatgatctacttggctccgacactggctgcttcccgctacctggacaagacagagcagtggagcacactgcctcccgagaccaaggaccacgccgtggatctgatccagaaaggctacatgcggatccagcagtttcggaaggcggatggttcctatgcggcttggttgtcacgggacagcagcacctggctcacagcctttgtgttgaaggtcctgagtttggcccaggagcaggtaggaggctcgcctgagaaactgcaggagacatctaactggcttctgtcccagcagcaggctgacggctcgttccaggacctctctccagtgatacataggagcatgcaggggggtttggtgggcaatgatgagactgtggcactcacagcctttgtgaccatcgcccttcatcatgggctggccgtcttccaggatgagggtgcagagccattgaagcagagagtggaagcctccatctcaaaggcaagctcatttttgggggagaaagcaagtgctgggctcctgggtgcccacgcagctgccatcacggcctatgccctgacactgaccaaggcgcctgtggacctgctcggtgttgcccacaacaacctcatggcaatggcccaggagactggagataacctgtactggggctcagtcactggttctcagagcaatgccgtgtcgcccaccccggctcctcgcaacccatccgaccccatgccccaggccccagccctgtggattgaaaccacagcctacgccctgctgcacctcctgcttcacgagggcaaagcagagatggcagaccaggctgcggcctggctcacccgtcagggcagcttccaagggggattccgcagtacccaagacacggtgattgccctggatgccctgtctgcctactggattgcctcccacaccactgaggagaggggtctcaatgtgactctcagctccacaggccggaatgggttcaagtcccacgcgctgcagctgaacaaccgccagattcgcggcctggaggaggagctgcagttttccttgggcagcaagatcaatgtgaaggtgggaggaaacagcaaaggaaccctgaaggtccttcgtacctacaatgtcctggacatgaagaacacgacctgccaggacctacagatagaagtgacagtcaaaggccacgtcgagtacacgatggaagcaaacgaggactatgaggactatgagtacgatgagcttccagccaaggatgacccagatgcccctctgcagcccgtgacacccctgcagctgtttgagggtcggaggaaccgccgcaggagggaggcgcccaaggtggtggaggagcaggagtccagggtgcactacaccgtgtgcatctggcggaacggcaaggtggggctgtctggcatggccatcgcggacgtcaccctcctgagtggattccacgccctgcgtgctgacctggagaagctgacctccctctctgaccgttacgtgagtcactttgagaccgaggggccccacgtcctgctgtattttgactcggtccccacctcccgggagtgcgtgggctttgaggctgtgcaggaagtgccggtggggctggtgcagccggccagcgcaaccctgtacgactactacaaccccgagcgcagatgttctgtgttttacggggcaccaagtaagagcagactcttggccaccttgtgttctgctgaagtctgccagtgtgctgaggggaagtgccctcgccagcgtcgcgccctggagcggggtctgcaggacgaggatggctacaggatgaagtttgcctgctactacccccgtgtggagtacggcttccaggttaaggttctccgagaagacagcagagctgctttccgcctctttgagaccaagatcacccaagtcctgcacttcaccaaggatgtcaaggccgctgctaatcagatgcgcaacttcctggttcgagcctcctgccgccttcgcttggaacctgggaaagaatatttgatcatgggtctggatggggccacctatgacctcgagggacacccccagtacctgctggactcgaatagctggatcgaggagatgccctctgaacgcctgtgccggagcacccgccagcgggcagcctgtgcccagctcaacgacttcctccaggagtatggcactcaggggtgccaggtgtgagggctgccctcccacctccgctgggaggaacctgaacctgggaaccatgaagctggaagcactgctgtgtccgctttcatgaacacagcctgggaccagggcatattaaaggcttttggcagcaaagtgtca

SEQ ID NO: 440044 - DNA, 4804 bp, Homo sapiens
tctagaggatcaccgtcagtaaggggtgccagtgatgacgttggtgatcccagacatctcagagccagggacctggaagatctcagcccgattctcagatggcctggaatccaacagcagcacccagtttgaggtgaagaaatatgtccttcccaactttgaggtgaagatcacccctggaaagccctacatcctgacggtgccaggccatcttgatgaaatgcagttagacatccaggccaggtacatctatgggaagccagtgcagggggtggcatatgtgcgctttgggctcctagatgaggatggtaagaagactttctttcgggggctggagagtcagaccaagctggtgaatggacagagccacatttccctctcaaaggcagagttccaggacgccctggagaagctgaatatgggcattactgacctccaggggctgcgcctctacgttgctgcagccatcattgagtatccaggtggggagatggaggaggcagagctcacatcctggtattttgtgtcatctcccttctccttggatcttagcaagaccaagcgacaccttgtgcctggggcccccttcctgctgcaggccttggtccgtgagatgtcaggctccccagcttctggcattcctgtcaaagtttctgccacggtgtcttctcctgggtctgttcctgaagtccaggacattcagcaaaacacagacgggagcggccaagtcagcattccaataattatccctcagaccatctcagagctgcagctctcagtatctgcaggctccccacatccagcgatagccaggctcactgtggcagccccaccttcaggaggccccgggtttctgtctattgagcggccggattctcgacctcctcgtgttggggacactctgaacctgaacttgcgagccgtgggcagtggggccaccttttctcattactactacatgatcctatcccgagggcagatcgtgttcatgaatcgagagcccaagaggaccctgacctcggtctcggtgtttgtggaccatcacctggcaccctccttctactttgtggccttctactaccatggagaccacccagtggccaactccctgcgagtggatgtccaggctggggcctgcgagggcaagctggagctcagcgtggacggtgccaagcagtaccggaacggggagtccgtgaagctccacttagaaaccgactccctagccctggtggcgctgggagccttggacacagctctgtatgctgcaggcagcaagtcccacaagcccctcaacatgggcaaggtctttgaagctatgaacagctatgacctcggctgtggtcctgggggtggggacagtgcccttcaggtgttccaggcagcgggcctggccttttctgatggagaccagtggaccttatccagaaagagactaagctgtcccaaggagaagacaacccggaaaaagagaaacgtgaacttccaaaaggcgattaatgagaaattgggtcagtatgcttccccgacagccaagcgctgctgccaggatggggtgacacgtctgcccatgatgcgttcctgcgagcagcgggcagcccgcgtgcagcagccggactgccgggagcccttcctgtcctgctgccaatttgctgagagtctgcgcaagaagagcagggacaagggccaggcgggcctccaacgagccctggagatcctgcaggaggaggacctgattgatgaggatgacattcccgtgcgcagcttcttcccagagaactggctctggagagtggaaacagtggaccgctttcaaatattgacactgtggctccccgactctctgaccacgtgggagatccatggcctgagcctgtccaaaaccaaaggcctatgtgtggccaccccagtccagctccgggtgttccgcgagttccacctgcacctccgcctgcccatgtctgtccgccgctttgagcagctggagctgcggcctgtcctctataactacctggataaaaacctgactgtgagcgtccacgtgtccccagtggaggggctgtgcctggctgggggcggagggctggcccagcaggtgctggtgcctgcgggctctgcccggcctgttgccttctctgtggtgcccacggcagccgccgctgtgtctctgaaggtggtggctcgagggtccttcgaattccctgtgggagatgcggtgtccaaggttctgcagattgagaaggaaggggccatccatagagaggagctggtctatgaactcaaccccttggaccaccgaggccggaccttggaaatacctggcaactctgatcccaatatgatccctgatggggactttaacagctacgtcagggttacagcctcagatccattggacactttaggctctgagggggccttgtcaccaggaggcgtggcctccctcttgaggcttcctcgaggctgtggggagcaaaccatgatctacttggctccgacactggctgcttcccgctacctggacaagacagagcagtggagcacactgcctcccgagaccaaggaccacgccgtggatctgatccagaaaggctacatgcggatccagcagtttcggaaggcggatggttcctatgcggcttggttgtcacgggacagcagcacctggctcacagcctttgtgttgaaggtcctgagtttggcccaggagcaggtaggaggctcgcctgagaaactgcaggagacatctaactggcttctgtcccagcagcaggctgacggctcgttccaggacctctctccagtgatacataggagcatgcaggggggtttggtgggcaatgatgagactgtggcactcacagcctttgtgaccatcgcccttcatcatgggctggccgtcttccaggatgagggtgcagagccattgaagcagagagtggaagcctccatctcaaaggcaagctcatttttgggggagaaagcaagtgctgggctcctgggtgcccacgcagctgccatcacggcctatgccctgacactgaccaaggcgcctgtggacctgctcggtgttgcccacaacaacctcatggcaatggcccaggagactggagataacctgtactggggctcagtcactggttctcagagcaatgccgtgtcgcccaccccggctcctcgcaacccatccgaccccatgccccaggccccagccctgtggattgaaaccacagcctacgccctgctgcacctcctgcttcacgagggcaaagcagagatggcagaccaggctgcggcctggctcacccgtcagggcagcttccaagggggattccgcagtacccaagacacggtgattgccctggatgccctgtctgcctactggattgcctcccacaccactgaggagaggggtctcaatgtgactctcagctccacaggccggaatgggttcaagtcccacgcgctgcagctgaacaaccgccagattcgcggcctggaggaggagctgcagttttccttgggcagcaagatcaatgtgaaggtgggaggaaacagcaaaggaaccctgaaggtccttcgtacctacaatgtcctggacatgaagaacacgacctgccaggacctacagatagaagtgacagtcaaaggccacgtcgagtacacgatggaagcaaacgaggactatgaggactatgagtacgatgagcttccagccaaggatgacccagatgcccctctgcagcccgtgacacccctgcagctgtttgagggtcggaggaaccgccgcaggagggaggcgcccaaggtggtggaggagcaggagtccagggtgcactacaccgtgtgcatctggcggaacggcaaggtggggctgtctggcatggccatcgcggacgtcaccctcctgagtggattccacgccctgcgtgctgacctggagaagctgacctccctctctgaccgttacgtgagtcactttgagaccgaggggccccacgtcctgctgtattttgactcggtccccacctcccgggagtgcgtgggctttgaggctgtgcaggaagtgccggtggggctggtgcagccggccagcgcaaccctgtacgactactacaaccccgagcgcagatgttctgtgttttacggggcaccaagtaagagcagactcttggccaccttgtgttctgctgaagtctgccagtgtgctgaggggaagtgccctcgccagcgtcgcgccctggagcggggtctgcaggacgaggatggctacaggatgaagtttgcctgctactacccccgtgtggagtacggcttccaggttaaggttctccgagaagacagcagagctgctttccgcctctttgagaccaagatcacccaagtcctgcacttcaccaaggatgtcaaggccgctgctaatcagatgcgcaacttcctggttcgagcctcctgccgccttcgcttggaacctgggaaagaatatttgatcatgggtctggatggggccacctatgacctcgagggacacccccagtacctgctggactcgaatagctggatcgaggagatgccctctgaacgcctgtgccggagcacccgccagcgggcagcctgtgcccagctcaacgacttcctccaggagtatggcactcaggggtgccaggtgtgagggctgccctcccacctccgctgggaggaacctgaacctgggaaccatgaagctggaagcactgctgtgtccgctttcatgaacacagcctgggaccagggcatattaaaggcttttggcagcaaagtgtca

SEQ ID NO: 440045 - DNA, 2543 bp, Homo sapiens
  misc_feature (218)..(218): n is a, c, g, or t
  misc_feature (408)..(408): n is a, c, g, or t
tacccccgtagtcccaatacgagggcaaaagcagagatggcagtaccagtctcggctctgctcaaccgtcagggcagcttccaagggggattccgcagtacccaagacacggtgattgccctggatgcctgtctgcctactggattgcctcccacaccactgaggagaggggtctcaatgtgactctcagctccacaggccggaatgggttcaagtcncacgcgctgcagctgaacaaccgccagattcgcggcctggaggaggagctgcagttttccttgggcagcaagatcaatgtgaaggtgggaggaaacagcaaaggaaccctgaaggtccttcgtacctacaatgtcctggacatgaagaacacgacctgccaggacctacagatagaagtgacagtcaaangccacgtcgagtacacgatggaagcaaacgaggactatgaggactatgagtacgatgagcttccagccaaggagacatctaactggcttctgtcccagcagcaggctgacggctcgttccaggacctctctccagtgatacataggagcatgcaggggggtttggtgggcaatgatgagactgtggcactcacagcctttgtgaccatcgcccttcatcatgggctggccgtcttccaggatgagggtgcagagccattgaagcagagagtggaagcctccatctcaaaggcaagctcatttttgggggagaaagcaagtgctgggctcctgggtgcccacgcagctgccatcacggcctatgccctgacactgaccaaggcgcctgtggacctgctcggtgttgcccacaacaacctcatggcaatggcccaggagactggagataacctgtactggggctcagtcactggttctcagagcaatgccgtgtcgcccaccccggctcctcgcaacccatccgaccccatgccccaggccccagccctgtggattgaaaccacagcctacgccctgctgcacctcctgcttcacgagggcaaagcagagatggcagaccaggctgcggcctggctcacccgtcagggcagcttccaagggggattccgcagtacccaagacacggtgattgccctggatgccctgtctgcctactggattgcctcccacaccactgaggagaggggtctcaatgtgactctcagctccacaggccggaatgggttcaagtcccacgcgctgcagctgaacaaccgccagattcgcggcctggaggaggagctgcagttttccttgggcagcaagatcaatgtgaaggtgggaggaaacagcaaaggaaccctgaaggtccttcgtacctacaatgtcctggacatgaagaacacgacctgccaggacctacagatagaagtgacagtcaaaggccacgtcgagtacacgatggaagcaaacgaggactatgaggactatgagtacgatgagcttccagccaaggatgacccagatgcccctctgcagcccgtgacacccctgcagctgtttgagggtcggaggaaccgccgcaggagggaggcgcccaaggtggtggaggagcaggagtccagggtgcactacaccgtgtgcatctggcggaacggcaaggtggggctgtctggcatggccatcgcggacgtcaccctcctgagtggattccacgccctgcgtgctgacctggagaagctgacctccctctctgaccgttacgtgagtcactttgagaccgaggggccccacgtcctgctgtattttgactcggtccccacctcccgggagtgcgtgggctttgaggctgtgcaggaagtgccggtggggctggtgcagccggccagcgcaaccctgtacgactactacaaccccgagcgcagatgttctgtgttttacggggcaccaagtaagagcagactcttggccaccttgtgttctgctgaagtctgccagtgtgctgaggggaagtgccctcgccagcgtcgcgccctggagcggggtctgcaggacgaggatggctacaggatgaagtttgcctgctactacccccgtgtggagtacggcttccaggttaaggttctccgagaagacagcagagctgctttccgcctctttgagaccaagatcacccaagtcctgcacttcaccaaggatgtcaaggccgctgctaatcagatgcgcaacttcctggttcgagcctcctgccgccttcgcttggaacctgggaaagaatatttgatcatgggtctggatggggccacctatgacctcgagggacacccccagtacctgctggactcgaatagctggatcgaggagatgccctctgaacgcctgtgccggagcacccgccagcgggcagcctgtgcccagctcaacgacttcctccaggagtatggcactcaggggtgccaggtgtgagggctgccctcccacctccgctgggaggaacctgaacctgggaaccatgaagctggaagcactgctgtgtccgctttcatgaacacagcctgggaccagggcatattaaaggcttttggcagcaaagtgtca

SEQ ID NO: 440046 - DNA, 5405 bp, Homo sapiens
aggtccagagtcaactctgccccgaggcctagcttggccagaaggtagcagacagacagacggatctaacctctcttggatcctccagccatgaggctgctctgggggctgatctgggcatccagcttcttcaccttatctctgcagaagcccaggttgctcttgttctctccttctgtggttcatctgggggtccccctatcggtgggggtgcagctccaggatgtgccccgaggacaggtagtgaaaggatcagtgttcctgagaaacccatctcgtaataatgtcccctgctccccaaaggtggacttcacccttagctcagaaagagacttcgcactcctcagtctccaggtgcccttgaaagatgcgaagagctgtggcctccatcaactcctcagaggccctgaggtccagctggtggcccattcgccatggctaaaggactctctgtccagaacgacaaacatccagggtatcaacctgctcttctcctctcgccgggggcacctctttttgcagacggaccagcccatttacaaccctggccagcgggttcggtaccgggtctttgctctggatcagaagatgcgcccgagcactgacaccatcacagtcatggtggagaactctcacggcctccgcgtgcggaagaaggaggtgtacatgccctcgtccatcttccaggatgactttgtgatcccagacatctcagagccagggacctggaagatctcagcccgattctcagatggcctggaatccaacagcagcacccagtttgaggtgaagaaatatgtccttcccaactttgaggtgaagatcacccctggaaagccctacatcctgacggtgccaggccatcttgatgaaatgcagttagacatccaggccaggtacatctatgggaagccagtgcagggggtggcatatgtgcgctttgggctcctagatgaggatggtaagaagactttctttcgggggctggagagtcagaccaagctggtgaatggacagagccacatttccctctcaaaggcagagttccaggacgccctggagaagctgaatatgggcattactgacctccaggggctgcgcctctacgttgctgcagccatcattgagtatccaggtggggagatggaggaggcagagctcacatcctggtattttgtgtcatctcccttctccttggatcttagcaagaccaagcgacaccttgtgcctggggcccccttcctgctgcaggccttggtccgtgagatgtcaggctccccagcttctggcattcctgtcaaagtttctgccacggtgtcttctcctgggtctgttcctgaagtccaggacattcagcaaaacacagacgggagcggccaagtcagcattccaataattatccctcagaccatctcagagctgcagctctcagtatctgcaggctccccacatccagcgatagccaggctcactgtggcagccccaccttcaggaggccccgggtttctgtctattgagcggccggattctcgacctcctcgtgttggggacactctgaacctgaacttgcgagccgtgggcagtggggccaccttttctcattactactacatgatcctatcccgagggcagatcgtgttcatgaatcgagagcccaagaggaccctgacctcggtctcggtgtttgtggaccatcacctggcaccctccttctactttgtggccttctactaccatggagaccacccagtggccaactccctgcgagtggatgtccaggctggggcctgcgagggcaagctggagctcagcgtggacggtgccaagcagtaccggaacggggagtccgtgaagctccacttagaaaccgactccctagccctggtggcgctgggagccttggacacagctctgtatgctgcaggcagcaagtcccacaagcccctcaacatgggcaaggtctttgaagctatgaacagctatgacctcggctgtggtcctgggggtggggacagtgcccttcaggtgttccaggcagcgggcctggccttttctgatggagaccagtggaccttatccagaaagagactaagctgtcccaaggagaagacaacccggaaaaagagaaacgtgaacttccaaaaggcgattaatgagaaattgggtcagtatgcttccccgacagccaagcgctgctgccaggatggggtgacacgtctgcccatgatgcgttcctgcgagcagcgggcagcccgcgtgcagcagccggactgccgggagcccttcctgtcctgctgccaatttgctgagagtctgcgcaagaagagcagggacaagggccaggcgggcctccaacgagccctggagatcctgcaggaggaggacctgattgatgaggatgacattcccgtgcgcagcttcttcccagagaactggctctggagagtggaaacagtggaccgctttcaaatattgacactgtggctccccgactctctgaccacgtgggagatccatggcctgagcctgtccaaaaccaaaggcctatgtgtggccaccccagtccagctccgggtgttccgcgagttccacctgcacctccgcctgcccatgtctgtccgccgctttgagcagctggagctgcggcctgtcctctataactacctggataaaaacctgactgtgagcgtccacgtgtccccagtggaggggctgtgcctggctgggggcggagggctggcccagcaggtgctggtgcctgcgggctctgcccggcctgttgccttctctgtggtgcccacggcagccgccgctgtgtctctgaaggtggtggctcgagggtccttcgaattccctgtgggagatgcggtgtccaaggttctgcagattgagaaggaaggggccatccatagagaggagctggtctatgaactcaaccccttggaccaccgaggccggaccttggaaatacctggcaactctgatcccaatatgatccctgatggggactttaacagctacgtcagggttacagcctcagatccattggacactttaggctctgagggggccttgtcaccaggaggcgtggcctccctcttgaggcttcctcgaggctgtggggagcaaaccatgatctacttggctccgacactggctgcttcccgctacctggacaagacagagcagtggagcacactgcctcccgagaccaaggaccacgccgtggatctgatccagaaaggctacatgcggatccagcagtttcggaaggcggatggttcctatgcggcttggttgtcacgggacagcagcacctggctcacagcctttgtgttgaaggtcctgagtttggcccaggagcaggtaggaggctcgcctgagaaactgcaggagacatctaactggcttctgtcccagcagcaggctgacggctcgttccaggacctctctccagtgatacataggagcatgcaggggggtttggtgggcaatgatgagactgtggcactcacagcctttgtgaccatcgcccttcatcatgggctggccgtcttccaggatgagggtgcagagccattgaagcagagagtggaagcctccatctcaaaggcaagctcatttttgggggagaaagcaagtgctgggctcctgggtgcccacgcagctgccatcacggcctatgccctgacactgaccaaggcgcctgtggacctgctcggtgttgcccacaacaacctcatggcaatggcccaggagactggagataacctgtactggggctcagtcactggttctcagagcaatgccgtgtcgcccaccccggctcctcgcaacccatccgaccccatgccccaggccccagccctgtggattgaaaccacagcctacgccctgctgcacctcctgcttcacgagggcaaagcagagatggcagaccaggctgcggcctggctcacccgtcagggcagcttccaagggggattccgcagtacccaagacacggtgattgccctggatgccctgtctgcctactggattgcctcccacaccactgaggagaggggtctcaatgtgactctcagctccacaggccggaatgggttcaagtcccacgcgctgcagctgaacaaccgccagattcgcggcctggaggaggagctgcagttttccttgggcagcaagatcaatgtgaaggtgggaggaaacagcaaaggaaccctgaaggtccttcgtacctacaatgtcctggacatgaagaacacgacctgccaggacctacagatagaagtgacagtcaaaggccacgtcgagtacacgatggaagcaaacgaggactatgaggactatgagtacgatgagcttccagccaaggatgacccagatgcccctctgcagcccgtgacacccctgcagctgtttgagggtcggaggaaccgccgcaggagggaggcgcgcggaacggcaaggtggggctgtctggcatggccatcgcggacgtcaccctcctgagtggattccacgccctgcgtgctgacctggagaagctgacctccctctctgaccgttacgtgagtcactttgagaccgaggggccccacgtcctgctgtattttgactcggtccccacctcccgggagtgcgtgggctttgaggctgtgcaggaagtgccggtggggctggtgcagccggccagcgcaaccctgtacgactactacaaccccgagcgcagatgttctgtgttttacggggcaccaagtaagagcagactcttggccaccttgtgttctgctgaagtctgccagtgtgctgaggggaagtgccctcgccagcgtcgcgccctggagcggggtctgcaggacgaggatggctacaggatgaagtttgcctgctactacccccgtgtggagtacggcttccaggttaaggttctccgagaagacagcagagctgctttccgcctctttgagaccaagatcacccaagtcctgcacttcaccaaggatgtcaaggccgctgctaatcagatgcgcaacttcctggttcgagcctcctgccgccttcgcttggaacctgggaaagaatatttgatcatgggtctggatggggccacctatgacctcgagggacacccccagtacctgctggactcgaatagctggatcgaggagatgccctctgaacgcctgtgccggagcacccgccagcgggcagcctgtgcccagctcaacgacttcctccaggagtatggcactcaggggtgccaggtgtgagggctgccctcccacctccgctgggaggaacctgaacctgggaaccatgaagctggaagcactgctgtgtccgctttcatgaacacagcctgggaccagggcatattaaaggcttttggcagcaaagtgtca

SEQ ID NO: 440047 - DNA, 4086 bp, Homo sapiens
aggtccagagtcaactctgccccgaggcctagcttggccagaaggtagcagacagacagacggatctaacctctcttggatcctccagccatgaggctgctctgggggctgatctgggcatccagcttcttcaccttatctctgcagaagcccaggttgctcttgttctctccttctgtggttcatctgggggtccccctatcggtgggggtgcagctccaggatgtgccccgaggacaggtagtgaaaggatcagtgttcctgagaaacccatctcgtaataatgtcccctgctccccaaaggtggacttcacccttagctcagaaagagacttcgcactcctcagtctccaggtgcccttgaaagatgcgaagagctgtggcctccatcaactcctcagaggccctgaggtccagctggtggcccattcgccatggctaaaggactctctgtccagaacgacaaacatccagggtatcaacctgctcttctcctctcgccgggggcacctctttttgcagacggaccagcccatttacaaccctggccagcgggttcggtaccgggtctttgctctggatcagaagatgcgcccgagcactgacaccatcacagtcatggtggagaactctcacggcctccgcgtgcggaagaaggaggtgtacatgccctcgtccatcttccaggatgactttgtgatcccagacatctcagagccagggacctggaagatctcagcccgattctcagatggcctggaatccaacagcagcacccagtttgaggtgaagaaatatgtccttcccaactttgaggtgaagatcacccctggaaagccctacatcctgacggtgccaggccatcttgatgaaatgcagttagacatccaggccaggtacatctatgggaagccagtgcagggggtggcatatgtgcgctttgggctcctagatgaggatggtaagaagactttctttcgggggctggagagtcagaccaagctggtgaatggacagagccacatttccctctcaaaggcagagttccaggacgccctggagaagctgaatatgggcattactgacctccaggggctgcgcctctacgttgctgcagccatcattgagtatccaggtggggagatggaggaggcagagctcacatcctggtattttgtgtcatctcccttctccttggatcttagcaagaccaagcgacaccttgtgcctggggcccccttcctgctgcaggccttggtccgtgagatgtcaggctccccagcttctggcattcctgtcaaagtttctgccacggtgtcttctcctgggtctgttcctgaagtccaggacattcagcaaaacacagacgggagcggccaagtcagcattccaataattatccctcagaccatctcagagctgcagctctcagtatctgcaggctccccacatccagcgatagccaggctcactgtggcagccccaccttcaggaggccccgggtttctgtctattgagcggccggattctcgacctcctcgtgttggggacactctgaacctgaacttgcgagccgtgggcagtggggccaccttttctcattactactacatgatcctatcccgagggcagatcgtgttcatgaatcgagagcccaagaggaccctgacctcggtctcggtgtttgtggaccatcacctggcaccctccttctactttgtggccttctactaccatggagaccacccagtggccaactccctgcgagtggatgtccaggctggggcctgcgagggcaagctggagctcagcgtggacggtgccaagcagtaccggaacggggagtccgtgaagctccacttagaaaccgactccctagccctggtggcgctgggagccttggacacagctctgtatgctgcaggcagcaagtcccacaagcccctcaacatgggcaaggtctttgaagctatgaacagctatgacctcggctgtggtcctgggggtggggacagtgcccttcaggtgttccaggcagcgggcctggccttttctgatggagaccagtggaccttatccagaaagagactaagctgtcccaaggagaagacaacccggaaaaagagaaacgtgaacttccaaaaggcgattaatgagaaattgggtcagtatgcttccccgacagccaagcgctgctgccaggatggggtgacacgtctgcccatgatgcgttcctgcgagcagcgggcagcccgcgtgcagcagccggactgccgggagcccttcctgtcctgctgccaatttgctgagagtctgcgcaagaagagcagggacaagggccaggcgggcctccaacgagccctggagatcctgcaggaggaggacctgattgatgaggatgacattcccgtgcgcagcttcttcccagagaactggctctggagagtggaaacagtggaccgctttcaaatattgacactgtggctccccgactctctgaccacgtgggagatccatggcctgagcctgtccaaaaccaaaggcctatgtgtggccaccccagtccagctccgggtgttccgcgagttccacctgcacctccgcctgcccatgtctgtccgccgctttgagcagctggagctgcggcctgtcctctataactacctggataaaaacctgactgtgagcgtccacgtgtccccagtggaggggctgtgcctggctgggggcggagggctggcccagcaggtgctggtgcctgcgggctctgcccggcctgttgccttctctgtggtgcccacggcagccgccgctgtgtctctgaaggtggtggctcgagggtccttcgaattccctgtgggagatgcggtgtccaaggttctgcagattgagaaggaaggggccatccatagagaggagctggtctatgaactcaaccccttggaccaccgaggccggaccttggaaatacctggcaactctgatcccaatatgatccctgatggggactttaacagctacgtcagggttacagcctcagatccattggacactttaggctctgagggggccttgtcaccaggagccaaggtggtggaggagcaggagtccagggtgcactacaccgtgtgcatctggcggaacggcaaggtggggctgtctggcatggccatcgcggacgtcaccctcctgagtggattccacgccctgcgtgctgacctggagaagctgacctccctctctgaccgttacgtgagtcactttgagaccgaggggccccacgtcctgctgtattttgactcggtccccacctcccgggagtgcgtgggctttgaggctgtgcaggaagtgccggtggggctggtgcagccggccagcgcaaccctgtacgactactacaaccccgagcgcagatgttctgtgttttacggggcaccaagtaagagcagactcttggccaccttgtgttctgctgaagtctgccagtgtgctgaggggaagtgccctcgccagcgtcgcgccctggagcggggtctgcaggacgaggatggctacaggatgaagtttgcctgctactacccccgtgtggagtacggcttccaggttaaggttctccgagaagacagcagagctgctttccgcctctttgagaccaagatcacccaagtcctgcacttcaccaaggatgtcaaggccgctgctaatcagatgcgcaacttcctggttcgagcctcctgccgccttcgcttggaacctgggaaagaatatttgatcatgggtctggatggggccacctatgacctcgagggacacccccagtacctgctggactcgaatagctggatcgaggagatgccctctgaacgcctgtgccggagcacccgccagcgggcagcctgtgcccagctcaacgacttcctccaggagtatggcactcaggggtgccaggtgtgagggctgccctcccacctccgctgggaggaacctgaacctgggaaccatgaagctggaagcactgctgtgtccgctttcatgaacacagcctgggaccagggcatattaaaggcttttggcagcaaagtgtca

SEQ ID NO: 440048 - DNA, 5776 bp, Homo sapiens
aggtccagagtcaactctgccccgaggcctagcttggccagaaggtagcagacagacagacggatctaacctctcttggatcctccagccatgaggctgctctgggggctgatctgggcatccagcttcttcaccttatctctgcagaagcccaggttgctcttgttctctccttctgtggttcatctgggggtccccctatcggtgggggtgcagctccaggatgtgccccgaggacaggtagtgaaaggatcagtgttcctgagaaacccatctcgtaataatgtcccctgctccccaaaggtggacttcacccttagctcagaaagagacttcgcactcctcagtctccaggtgcccttgaaagatgcgaagagctgtggcctccatcaactcctcagaggccctgaggtccagctggtggcccattcgccatggctaaaggactctctgtccagaacgacaaacatccagggtatcaacctgctcttctcctctcgccgggggcacctctttttgcagacggaccagcccatttacaaccctggccagcgggttcggtaccgggtctttgctctggatcagaagatgcgcccgagcactgacaccatcacagtcatggtggagaactctcacggcctccgcgtgcggaagaaggaggtgtacatgccctcgtccatcttccaggatgactttgtgatcccagacatctcagagccagggacctggaagatctcagcccgattctcagatggcctggaatccaacagcagcacccagtttgaggtgaagaaatatgtccttcccaactttgaggtgaagatcacccctggaaagccctacatcctgacggtgccaggccatcttgatgaaatgcagttagacatccaggccaggtacatctatgggaagccagtgcagggggtggcatatgtgcgctttgggctcctagatgaggatggtaagaagactttctttcgggggctggagagtcagaccaagctggtgaatggacagagccacatttccctctcaaaggcagagttccaggacgccctggagaagctgaatatgggcattactgacctccaggggctgcgcctctacgttgctgcagccatcattgagtatccaggtggggagatggaggaggcagagctcacatcctggtattttgtgtcatctcccttctccttggatcttagcaagaccaagcgacaccttgtgcctggggcccccttcctgctgcaggccttggtccgtgagatgtcaggctccccagcttctggcattcctgtcaaagtttctgccacggtgtcttctcctgggtctgttcctgaagtccaggacattcagcaaaacacagacgggagcggccaagtcagcattccaataattatccctcagaccatctcagagctgcagctctcagtatctgcaggctccccacatccagcgatagccaggctcactgtggcagccccaccttcaggaggccccgggtttctgtctattgagcggccggattctcgacctcctcgtgttggggacactctgaacctgaacttgcgagccgtgggcagtggggccaccttttctcattactactacatgatcctatcccgagggcagatcgtgttcatgaatcgagagcccaagaggaccctgacctcggtctcggtgtttgtggaccatcacctggcaccctccttctactttgtggccttctactaccatggagaccacccagtggccaactccctgcgagtggatgtccaggctggggcctgcgagggcaagctggagctcagcgtggacggtgccaagcagtaccggaacggggagtccgtgaagctccacttagaaaccgactccctagccctggtggcgctgggagccttggacacagctctgtatgctgcaggcagcaagtcccacaagcccctcaacatgggcaaggtctttgaagctatgaacagctatgacctcggctgtggtcctgggggtggggacagtgcccttcaggtgttccaggcagcgggcctggccttttctgatggagaccagtggaccttatccagaaagagactaagctgtcccaaggagaagacaacccggaaaaagagaaacgtgaacttccaaaaggcgattaatgagaaattgggtcagtatgcttccccgacagccaagcgctgctgccaggatggggtgacacgtctgcccatgatgcgttcctgcgagcagcgggcagcccgcgtgcagcagccggactgccgggagcccttcctgtcctgctgccaatttgctgagagtctgcgcaagaagagcagggacaagggccaggcgggcctccaacgagccctggagatcctgcaggaggaggacctgattgatgaggatgacattcccgtgcgcagcttcttcccagagaactggctctggagagtggaaacagtggaccgctttcaaatattgacactgtggctccccgactctctgaccacgtgggagatccatggcctgagcctgtccaaaaccaaaggcctatgtgtggccaccccagtccagctccgggtgttccgcgagttccacctgcacctccgcctgcccatgtctgtccgccgctttgagcagctggagctgcggcctgtcctctataactacctggataaaaacctgactgtgagcgtccacgtgtccccagtggaggggctgtgcctggctgggggcggagggctggcccagcaggtgctggtgcctgcgggctctgcccggcctgttgccttctctgtggtgcccacggcagccgccgctgtgtctctgaaggtggtggctcgagggtccttcgaattccctgtgggagatgcggtgtccaaggttctgcagattgagaaggaaggggccatccatagagaggagctggtctatgaactcaaccccttggaccaccgaggccggaccttggaaatacctggcaactctgatcccaatatgatccctgatggggactttaacagctacgtcagggttacagcctcagatccattggacactttaggctctgagggggccttgtcaccaggaggcgtggcctccctcttgaggcttcctcgaggctgtggggagcaaaccatgatctacttggctccgacactggctgcttcccgctacctggacaagacagagcagtggagcacactgcctcccgagaccaaggaccacgccgtggatctgatccagaaaggctacatgcggatccagcagtttcggaaggcggatggttcctatgcggcttggttgtcacgggacagcagcacctggctcacagcctttgtgttgaaggtcctgagtttggcccaggagcaggtaggaggctcgcctgagaaactgcaggagacatctaactggcttctgtcccagcagcaggctgacggctcgttccaggacctctctccagtgatacataggagcatgcaggggggtttggtgggcaatgatgagactgtggcactcacagcctttgtgaccatcgcccttcatcatgggctggccgtcttccaggatgagggtgcagagccattgaagcagagagtggaagcctccatctcaaaggcaagctcatttttgggggagaaagcaagtgctgggctcctgggtgcccacgcagctgccatcacggcctatgccctgacactgaccaaggcgcctgtggacctgctcggtgttgcccacaacaacctcatggcaatggcccaggagactggagataacctgtactggggctcagtcactggttctcagagcaatgccgtgtcgcccaccccggctcctcgcaacccatccgaccccatgccccaggccccagccctgtggattgaaaccacagcctacgccctgctgcacctcctgcttcacgagggcaaagcagagatggcagaccaggctgcggcctggctcacccgtcagggcagcttccaagggggattccgcagtacccaagacacggtgattgccctggatgccctgtctgcctactggattgcctcccacaccactgaggagaggggtctcaatgtgactctcagctccacaggccggaatgggttcaagtcccacgcgctgcagctgaacaaccgccagattcgcggcctggaggaggagctgcagttttccttgggcagcaagatcaatgtgaaggtgggaggaaacagcaaaggaaccctgaaggtccttcgtacctacaatgtcctggacatgaagaacacgacctgccaggacctacagatagaagtgacagtcaaaggccacgtcgagtacacgatggaagcaaacgaggactatgaggactatgagtacgatgagcttccagccaaggatgacccagatgcccctctgcagcccgtgacacccctgcagctgtttgagggtcggaggaaccgccgcaggagggaggcgcccaaggtggtggaggagcaggagtccagggtgcactacaccgtgtgcatctggcggaacggcaaggtggggctgtctggcatggccatcgcggacgtcaccctcctgagtggattccacgccctgcgtgctgacctggagaagctgacctccctctctgaccgttacgtgagtcactttgagaccgaggggccccacgtcctgctgtattttgactcggtccccacctcccgggagtgcgtgggctttgaggctgtgcaggaagtgccggtggggctggtgcagccggccagcgcaaccctgtacgactactacaaccccgagcgcagatgttctgtgttttacggggcaccaagtaagagcagactcttggccaccttgtgttctgctgaagtctgccagtgtgctgaggggaagtgccctcgccagcgtcgcgccctggagcggggtctgcaggacgaggatggctacaggatgaagtttgcctgctactacccccgtgtggagtacggcttccaggttaaggttctccgagaagacagcagagctgctttccgcctctttgagaccaagatcacccaagtcctgcacttcaccaaggatgtcaaggccgctgctaatcagatgcgcaacttcctggttcgagcctcctgccgccttcgcttggaacctgggaaagaatatttgatcatgggtctggatggggccacctatgacctcgagggacacccccagtacctgctggactcgaatagctggatcgaggagatgccctctgaacgcctgtgccggagcacccgccagcgggcagcctgtgcccagctcaacgacttcctccaggagtatggcactcaggggtgccaggtgtgagggctgccctcccacctccgctgggaggaacctgaacctgggaaccatgaagctggaagcactgctgtgtccgctttcatgaacacagcctgggaccagggcatattaaaggcttttggcagcaaagtgtcaaaaaaaaaaaaaaaaaaaaaaaaaaaaaaaaaaaaaaaaaaaaaaaaaaaaaaaaaaaaaaaaaaaaaaaaaaaaaaaaaaaaaaaaaaaaaaaaaaaaaccttgtggcccgcttggcccaagtcaattttaaactgaacaaacttaatccttgcgcccgaatttggacctaattggccaaattccccttaaagggagccgtttaaaaatcaatggcccgtgttttaaaaacgtggaaatgggaaaaacctgggggtacccaaattaaatcccttggaagaaaatccccttttcccgttggcttaccagccccccccct

SEQ ID NO: 440049 - DNA, 1055 bp, Homo sapiens
cgggagctgccctgggccaggggagggagggcaggacccaggctggggctgggcttctggagcccgcgcaggcagaacctggacgacagctcacacgtctccacaggcggaacggcaaggtggggctgtctggcatggccatcgcggacgtcaccctcctgagtggattccacgccctgcgtgctgacctggagaagctgacctccctctctgaccgttacgtgagtcactttgagaccgaggggccccacgtcctgctgtattttgactcggtccccacctcccgggagtgcgtgggctttgaggctgtgcaggaagtgccggtggggctggtgcagccggccagcgcaaccctgtacgactactacaaccccgagcgcagatgttctgtgttttacggggcaccaagtaagagcagactcttggccaccttgtgttctgctgaagtctgccagtgtgctgaggggaagtgccctcgccagcgtcgcgccctggagcggggtctgcaggacgaggatggctacaggatgaagtttgcctgctactacccccgtgtggagtacggcttccaggttaaggttctccgagaagacagcagagctgctttccgcctctttgagaccaagatcacccaagtcctgcacttcaccaaggatgtcaaggccgctgctaatcagatgcgcaacttcctggttcgagcctcctgccgccttcgcttggaacctgggaaagaatatttgatcatgggtctggatggggccacctatgacctcgagggacacccccagtacctgctggactcgaatagctggatcgaggagatgccctctgaacgcctgtgccggagcacccgccagcgggcagcctgtgcccagctcaacgacttcctccaggagtatggcactcaggggtgccaggtgtgagggctgccctcccacctccgctgggaggaacctgaacctgggaaccatgaagctggaagcactgctgtgtccgctttcatgaacacagcctgggaccagggcatattaaaggcttttggcagcaaagtgtca

SEQ ID NO: 440050 - DNA, 5639 bp, Homo sapiens
aggtccagagtcaactctgccccgaggcctagcttggccagaaggtagcagacagacagacggatctaacctctcttggatcctccagccatgaggctgctctgggggctgatctgggcatccagcttcttcaccttatctctgcagaagcccaggttgctcttgttctctccttctgtggttcatctgggggtccccctatcggtgggggtgcagctccaggatgtgccccgaggacaggtagtgaaaggatcagtgttcctgagaaacccatctcgtaataatgtcccctgctccccaaaggtggacttcacccttagctcagaaagagacttcgcactcctcagtctccaggtgcccttgaaagatgcgaagagctgtggcctccatcaactcctcagaggccctgaggtccagctggtggcccattcgccatggctaaaggactctctgtccagaacgacaaacatccagggtatcaacctgctcttctcctctcgccgggggcacctctttttgcagacggaccagcccatttacaaccctggccagcgggttcggtaccgggtctttgctctggatcagaagatgcgcccgagcactgacaccatcacagtcatggtggagaactctcacggcctccgcgtgcggaagaaggaggtgtacatgccctcgtccatcttccaggatgactttgtgatcccagacatctcagagccagggacctggaagatctcagcccgattctcagatggcctggaatccaacagcagcacccagtttgaggtgaagaaatatgtccttcccaactttgaggtgaagatcacccctggaaagccctacatcctgacggtgccaggccatcttgatgaaatgcagttagacatccaggccaggtacatctatgggaagccagtgcagggggtggcatatgtgcgctttgggctcctagatgaggatggtaagaagactttctttcgggggctggagagtcagaccaagctggtgaatggacagagccacatttccctctcaaaggcagagttccaggacgccctggagaagctgaatatgggcattactgacctccaggggctgcgcctctacgttgctgcagccatcattgagtatccaggtggggagatggaggaggcagagctcacatcctggtattttgtgtcatctcccttctccttggatcttagcaagaccaagcgacaccttgtgcctggggcccccttcctgctgcaggccttggtccgtgagatgtcaggctccccagcttctggcattcctgtcaaagtttctgccacggtgtcttctcctgggtctgttcctgaagtccaggacattcagcaaaacacagacgggagcggccaagtcagcattccaataattatccctcagaccatctcagagctgcagctctcagtatctgcaggctccccacatccagcgatagccaggctcactgtggcagccccaccttcaggaggccccgggtttctgtctattgagcggccggattctcgacctcctcgtgttggggacactctgaacctgaacttgcgagccgtgggcagtggggccaccttttctcattactactacatgatcctatcccgagggcagatcgtgttcatgaatcgagagcccaagaggaccctgacctcggtctcggtgtttgtggaccatcacctggcaccctccttctactttgtggccttctactaccatggagaccacccagtggccaactccctgcgagtggatgtccaggctggggcctgcgagggcaagctggagctcagcgtggacggtgccaagcagtaccggaacggggagtccgtgaagctccacttagaaaccgactccctagccctggtggcgctgggagccttggacacagctctgtatgctgcaggcagcaagtcccacaagcccctcaacatgggcaaggtctttgaagctatgaacagctatgacctcggctgtggtcctgggggtggggacagtgcccttcaggtgttccaggcagcgggcctggccttttctgatggagaccagtggaccttatccagaaagagactaagctgtcccaaggagaagacaacccggaaaaagagaaacgtgaacttccaaaaggcgattaatgagaaattgggtcagtatgcttccccgacagccaagcgctgctgccaggatggggtgacacgtctgcccatgatgcgttcctgcgagcagcgggcagcccgcgtgcagcagccggactgccgggagcccttcctgtcctgctgccaatttgctgagagtctgcgcaagaagagcagggacaagggccaggcgggcctccaacgagccctggagatcctgcaggaggaggacctgattgatgaggatgacattcccgtgcgcagcttcttcccagagaactggctctggagagtggaaacagtggaccgctttcaaatattgacactgtggctccccgactctctgaccacgtgggagatccatggcctgagcctgtccaaaaccaaaggcctatgtgtggccaccccagtccagctccgggtgttccgcgagttccacctgcacctccgcctgcccatgtctgtccgccgctttgagcagctggagctgcggcctgtcctctataactacctggataaaaacctgactgtgagcgtccacgtgtccccagtggaggggctgtgcctggctgggggcggagggctggcccagcaggtgctggtgcctgcgggctctgcccggcctgttgccttctctgtggtgcccacggcagccgccgctgtgtctctgaaggtggtggctcgagggtccttcgaattccctgtgggagatgcggtgtccaaggttctgcagattgagaaggaaggggccatccatagagaggagctggtctatgaactcaaccccttggaccaccgaggccggaccttggaaatacctggcaactctgatcccaatatgatccctgatggggactttaacagctacgtcagggttacagcctcagatccattggacactttaggctctgagggggccttgtcaccaggaggcgtggcctccctcttgaggcttcctcgaggctgtggggagcaaaccatgatctacttggctccgacactggctgcttcccgctacctggacaagacagagcagtggagcacactgcctcccgagaccaaggaccacgccgtggatctgatccagaaaggctacatgcggatccagcagtttcggaaggcggatggttcctatgcggcttggttgtcacgggacagcagcacctggctcacagcctttgtgttgaaggtcctgagtttggcccaggagcaggtaggaggctcgcctgagaaactgcaggagacatctaactggcttctgtcccagcagcaggctgacggctcgttccaggacctctctccagtgatacataggagcatgcaggggggtttggtgggcaatgatgagactgtggcactcacagcctttgtgaccatcgcccttcatcatgggctggccgtcttccaggatgagggtgcagagccattgaagcagagagtggaagcctccatctcaaaggcaagctcatttttgggggagaaagcaagtgctgggctcctgggtgcccacgcagctgccatcacggcctatgccctgacactgaccaaggcgcctgtggacctgctcggtgttgcccacaacaacctcatggcaatggcccaggagactggagataacctgtactggggctcagtcactggttctcagagcaatgccgtgtcgcccaccccggctcctcgcaacccatccgaccccatgccccaggccccagccctgtggattgaaaccacagcctacgccctgctgcacctcctgcttcacgagggcaaagcagagatggcagaccaggctgcggcctggctcacccgtcagggcagcttccaagggggattccgcagtacccaagacacggtgattgccctggatgccctgtctgcctactggattgcctcccacaccactgaggagaggggtctcaatgtgactctcagctccacaggccggaatgggttcaagtcccacgcgctgcagctgaacaaccgccagattcgcggcctggaggaggagctgcagttttccttgggcagcaagatcaatgtgaaggtgggaggaaacagcaaaggaaccctgaaggtccttcgtacctacaatgtcctggacatgaagaacacgacctgccaggacctacagatagaagtgacagtcaaaggccacgtcgagtacacgatggaagcaaacgaggactatgaggactatgagtacgatgagcttccagccaaggatgacccagatgcccctctgcagcccgtgacacccctgcagctgtttgagggtcggaggaaccgccgcaggagggaggcgcccaaggtggtggaggagcaggagtccagggtgcactacaccgtgtgcatctggcggaacggcaaggtggggctgtctggcatggccatcgcggacgtcaccctcctgagtggattccacgccctgcgtgctgacctggagaagctgacctccctctctgaccgttacgtgagtcactttgagaccgaggggccccacgtcctgctgtattttgactcggtccccacctcccgggagtgcgtgggctttgaggctgtgcaggaagtgccggtggggctggtgcagccggccagcgcaaccctgtacgactactacaaccccgagcgcagatgttctgtgttttacggggcaccaagtaagagcagactcttggccaccttgtgttctgctgaagtctgccagtgtgctgaggggaagtgccctcgccagcgtcgcgccctggagcggggtctgcaggacgaggatggctacaggatgaagtttgcctgctactacccccgtgtggagtacggtcagtcttcccaccgaggccctggcctgaccctccctcggggaccggctgttttggtctctctgggtgtagcctgctcctcttacaggtcatgcacgcagcctgtttgctctgacaccaacttcctaccctctcagcctcaaagtaactcacctttcccccttctcctcaccccctcttaggcttccaggttaaggttctccgagaagacagcagagctgctttccgcctctttgagaccaagatcacccaagtcctgcacttcaccaaggatgtcaaggccgctgctaatcagatgcgcaacttcctggttcgagcctcctgccgccttcgcttggaacctgggaaagaatatttgatcatgggtctggatggggccacctatgacctcgagggacacccccagtacctgctggactcgaatagctggatcgaggagatgccctctgaacgcctgtgccggagcacccgccagcgggcagcctgtgcccagctcaacgacttcctccaggagtatggcactcaggggtgccaggtgtgagggctgccctcccacctccgctgggaggaacctgaacctgggaaccatgaagctggaagcactgctgtgtccgctttcatgaacacagcctgggaccagggcatattaaaggcttttggcagcaaagtgtca

SEQ ID NO: 440051 - DNA, 5720 bp, Homo sapiens
aggtccagagtcaactctgccccgaggcctagcttggccagaaggtagcagacagacagacggatctaacctctcttggatcctccagccatgaggctgctctgggggctgatctgggcatccagcttcttcaccttatctctgcagaagcccaggttgctcttgttctctccttctgtggttcatctgggggtccccctatcggtgggggtgcagctccaggatgtgccccgaggacaggtagtgaaaggatcagtgttcctgagaaacccatctcgtaataatgtcccctgctccccaaaggtggacttcacccttagctcagaaagagacttcgcactcctcagtctccaggtgcccttgaaagatgcgaagagctgtggcctccatcaactcctcagaggccctgaggtccagctggtggcccattcgccatggctaaaggactctctgtccagaacgacaaacatccagggtatcaacctgctcttctcctctcgccgggggcacctctttttgcagacggaccagcccatttacaaccctggccagcgggttcggtaccgggtctttgctctggatcagaagatgcgcccgagcactgacaccatcacagtcatggtggagaactctcacggcctccgcgtgcggaagaaggaggtgtacatgccctcgtccatcttccaggatgactttgtgatcccagacatctcagagccagggacctggaagatctcagcccgattctcagatggcctggaatccaacagcagcacccagtttgaggtgaagaaatatgtccttcccaactttgaggtgaagatcacccctggaaagccctacatcctgacggtgccaggccatcttgatgaaatgcagttagacatccaggccaggtacatctatgggaagccagtgcagggggtggcatatgtgcgctttgggctcctagatgaggatggtaagaagactttctttcgggggctggagagtcagaccaagctggtgaatggacagagccacatttccctctcaaaggcagagttccaggacgccctggagaagctgaatatgggcattactgacctccaggggctgcgcctctacgttgctgcagccatcattgagtatccaggtggggagatggaggaggcagagctcacatcctggtattttgtgtcatctcccttctccttggatcttagcaagaccaagcgacaccttgtgcctggggcccccttcctgctgcaggccttggtccgtgagatgtcaggctccccagcttctggcattcctgtcaaagtttctgccacggtgtcttctcctgggtctgttcctgaagtccaggacattcagcaaaacacagacgggagcggccaagtcagcattccaataattatccctcagaccatctcagagctgcagctctcagtatctgcaggctccccacatccagcgatagccaggctcactgtggcagccccaccttcaggaggccccgggtttctgtctattgagcggccggattctcgacctcctcgtgttggggacactctgaacctgaacttgcgagccgtgggcagtggggccaccttttctcattactactacatgatcctatcccgagggcagatcgtgttcatgaatcgagagcccaagaggaccctgacctcggtctcggtgtttgtggaccatcacctggcaccctccttctactttgtggccttctactaccatggagaccacccagtggccaactccctgcgagtggatgtccaggctggggcctgcgagggcaagctggagctcagcgtggacggtgccaagcagtaccggaacggggagtccgtgaagctccacttagaaaccgactccctagccctggtggcgctgggagccttggacacagctctgtatgctgcaggcagcaagtcccacaagcccctcaacatgggcaaggtctttgaagctatgaacagctatgacctcggctgtggtcctgggggtggggacagtgcccttcaggtgttccaggcagcgggcctggccttttctgatggagaccagtggaccttatccagaaagagactaagctgtcccaaggagaagacaacccggaaaaagagaaacgtgaacttccaaaaggcgattaatgagaaattgggtcagtatgcttccccgacagccaagcgctgctgccaggatggggtgacacgtctgcccatgatgcgttcctgcgagcagcgggcagcccgcgtgcagcagccggactgccgggagcccttcctgtcctgctgccaatttgctgagagtctgcgcaagaagagcagggacaagggccaggcgggcctccaacgagccctggagatcctgcaggaggaggacctgattgatgaggatgacattcccgtgcgcagcttcttcccagagaactggctctggagagtggaaacagtggaccgctttcaaatattgacactgtggctccccgactctctgaccacgtgggagatccatggcctgagcctgtccaaaaccaaaggcctatgtgtggccaccccagtccagctccgggtgttccgcgagttccacctgcacctccgcctgcccatgtctgtccgccgctttgagcagctggagctgcggcctgtcctctataactacctggataaaaacctgactgtgagcgtccacgtgtccccagtggaggggctgtgcctggctgggggcggagggctggcccagcaggtgctggtgcctgcgggctctgcccggcctgttgccttctctgtggtgcccacggcagccgccgctgtgtctctgaaggtggtggctcgagggtccttcgaattccctgtgggagatgcggtgtccaaggttctgcagattgagaaggaaggggccatccatagagaggagctggtctatgaactcaaccccttggaccaccgaggccggaccttggaaatacctggcaactctgatcccaatatgatccctgatggggactttaacagctacgtcagggttacagcctcagatccattggacactttaggctctgagggggccttgtcaccaggaggcgtggcctccctcttgaggcttcctcgaggctgtggggagcaaaccatgatctacttggctccgacactggctgcttcccgctacctggacaagacagagcagtggagcacactgcctcccgagaccaaggaccacgccgtggatctgatccagaaaggctacatgcggatccagcagtttcggaaggcggatggttcctatgcggcttggttgtcacgggacagcagcacctggctcacagcctttgtgttgaaggtcctgagtttggcccaggagcaggtaggaggctcgcctgagaaactgcaggagacatctaactggcttctgtcccagcagcaggctgacggctcgttccaggacctctctccagtgatacataggagcatgcaggggggtttggtgggcaatgatgagactgtggcactcacagcctttgtgaccatcgcccttcatcatgggctggccgtcttccaggatgagggtgcagagccattgaagcagagagtggaagcctccatctcaaaggcaagctcatttttgggggagaaagcaagtgctgggctcctgggtgcccacgcagctgccatcacggcctatgccctgacactgaccaaggcgcctgtggacctgctcggtgttgcccacaacaacctcatggcaatggcccaggagactggagataacctgtactggggctcagtcactggttctcagagcaatgccgtgtcgcccaccccggctcctcgcaacccatccgaccccatgccccaggccccagccctgtggattgaaaccacagcctacgccctgctgcacctcctgcttcacgagggcaaagcagagatggcagaccaggctgcggcctggctcacccgtcagggcagcttccaagggggattccgcagtacccaagacacggtgattgccctggatgccctgtctgcctactggattgcctcccacaccactgaggagaggggtctcaatgtgactctcagctccacaggccggaatgggttcaagtcccacgcgctgcagctgaacaaccgccagattcgcggcctggaggaggagctgcagttttccttgggcagcaagatcaatgtgaaggtgggaggaaacagcaaaggaaccctgaaggtccttcgtacctacaatgtcctggacatgaagaacacgacctgccaggacctacagatagaagtgacagtcaaaggccacgtcgagtacacgatggaagcaaacgaggactatgaggactatgagtacgatgagcttccagccaaggatgacccagatgcccctctgcagcccgtgacacccctgcagctgtttgagggtcggaggaaccgccgcaggagggaggcgcccaaggtggtggaggagcaggagtccagggtgcactacaccgtgtgcatctggcggaacggcaaggtggggctgtctggcatggccatcgcggacgtcaccctcctgagtggattccacgccctgcgtgctgacctggagaagctgacctccctctctgaccgttacgtgagtcactttgagaccgaggggccccacgtcctgctgtattttgactcggtccccacctcccgggagtgcgtgggctttgaggctgtgcaggaagtgccggtggggctggtgcagccggccagcgcaaccctgtacgactactacaaccccgagcgcagatgttctgtgttttacggggcaccaagtaagagcagactcttggccaccttgtgttctgctgaagtctgccagtgtgctgaggggaagtgccctcgccagcgtcgcgccctggagcggggtctgcaggacgaggatggctacaggatgaagtttgcctgctactacccccgtgtggagtacggcttccaggttaaggttctccgagaagacagcagagctgctttccgcctctttgagaccaagatcacccaagtcctgcacttcagtatgaagcaaaccggagaggcgggcagggctggggggagacagggaggctgaggtgtggccgaggacctgaccatctggaagtgtgaaaatccccttgggctcgtcagaagccttgggcttggccataaatagggaggcagtggcacctctccatgggggtggcgaaggtggaatgagaggatctacacagagtccccagcctgggctcaccctgcaccttctcttcccctctgaccacttttgcgcacgtcatccccgcagccaaggatgtcaaggccgctgctaatcagatgcgcaacttcctggttcgagcctcctgccgccttcgcttggaacctgggaaagaatatttgatcatgggtctggatggggccacctatgacctcgagggacacccccagtacctgctggactcgaatagctggatcgaggagatgccctctgaacgcctgtgccggagcacccgccagcgggcagcctgtgcccagctcaacgacttcctccaggagtatggcactcaggggtgccaggtgtgagggctgccctcccacctccgctgggaggaacctgaacctgggaaccatgaagctggaagcactgctgtgtccgctttcatgaacacagcctgggaccagggcatattaaaggcttttggcagcaaagtgtca

SEQ ID NO: 440052 - DNA, 5137 bp, Homo sapiens
aggtccagagtcaactctgccccgaggcctagcttggccagaaggtagcagacagacagacggatctaacctctcttggatcctccagccatgaggctgctctgggggctgatctgggcatccagcttcttcaccttatctctgcagaagcccaggttgctcttgttctctccttctgtggttcatctgggggtccccctatcggtgggggtgcagctccaggatgtgccccgaggacaggtagtgaaaggatcagtgttcctgagaaacccatctcgtaataatgtcccctgctccccaaaggtggacttcacccttagctcagaaagagacttcgcactcctcagtctccaggtgcccttgaaagatgcgaagagctgtggcctccatcaactcctcagaggccctgaggtccagctggtggcccattcgccatggctaaaggactctctgtccagaacgacaaacatccagggtatcaacctgctcttctcctctcgccgggggcacctctttttgcagacggaccagcccatttacaaccctggccagcgggttcggtaccgggtctttgctctggatcagaagatgcgcccgagcactgacaccatcacagtcatggtggagaactctcacggcctccgcgtgcggaagaaggaggtgtacatgccctcgtccatcttccaggatgactttgtgatcccagacatctcagagccagggacctggaagatctcagcccgattctcagatggcctggaatccaacagcagcacccagtttgaggtgaagaaatatgtccttcccaactttgaggtgaagatcacccctggaaagccctacatcctgacggtgccaggccatcttgatgaaatgcagttagacatccaggccaggtacatctatgggaagccagtgcagggggtggcatatgtgcgctttgggctcctagatgaggatggtaagaagactttctttcgggggctggagagtcagaccaagctggtgaatggacagagccacatttccctctcaaaggcagagttccaggacgccctggagaagctgaatatgggcattactgacctccaggggctgcgcctctacgttgctgcagccatcattgagtatccaggtggggagatggaggaggcagagctcacatcctggtattttgtgtcatctcccttctccttggatcttagcaagaccaagcgacaccttgtgcctggggcccccttcctgctgcaggccttggtccgtgagatgtcaggctccccagcttctggcattcctgtcaaagtttctgccacggtgtcttctcctgggtctgttcctgaagtccaggacattcagcaaaacacagacgggagcggccaagtcagcattccaataattatccctcagaccatctcagagctgcagctctcagtatctgcaggctccccacatccagcgatagccaggctcactgtggcagccccaccttcaggaggccccgggtttctgtctattgagcggccggattctcgacctcctcgtgttggggacactctgaacctgaacttgcgagccgtgggcagtggggccaccttttctcattactactacatgatcctatcccgagggcagatcgtgttcatgaatcgagagcccaagaggaccctgacctcggtctcggtgtttgtggaccatcacctggcaccctccttctactttgtggccttctactaccatggagaccacccagtggccaactccctgcgagtggatgtccaggctggggcctgcgagggcaagctggagctcagcgtggacggtgccaagcagtaccggaacggggagtccgtgaagctccacttagaaaccgactccctagccctggtggcgctgggagccttggacacagctctgtatgctgcaggcagcaagtcccacaagcccctcaacatgggcaaggtctttgaagctatgaacagctatgacctcggctgtggtcctgggggtggggacagtgcccttcaggtgttccaggcagcgggcctggccttttctgatggagaccagtggaccttatccagaaagagactaagctgtcccaaggagaagacaacccggaaaaagagaaacgtgaacttccaaaaggcgattaatgagaaattgggtcagtatgcttccccgacagccaagcgctgctgccaggatggggtgacacgtctgcccatgatgcgttcctgcgagcagcgggcagcccgcgtgcagcagccggactgccgggagcccttcctgtcctgctgccaatttgctgagagtctgcgcaagaagagcagggacaagggccaggcgggcctccaacgagccctggagatcctgcaggaggaggacctgattgatgaggatgacattcccgtgcgcagcttcttcccagagaactggctctggagagtggaaacagtggaccgctttcaaatattgacactgtggctccccgactctctgaccacgtgggagatccatggcctgagcctgtccaaaaccaaaggcctatgtgtggccaccccagtccagctccgggtgttccgcgagttccacctgcacctccgcctgcccatgtctgtccgccgctttgagcagctggagctgcggcctgtcctctataactacctggataaaaacctgactgtgagcgtccacgtgtccccagtggaggggctgtgcctggctgggggcggagggctggcccagcaggtgctggtgcctgcgggctctgcccggcctgttgccttctctgtggtgcccacggcagccgccgctgtgtctctgaaggtggtggctcgagggtccttcgaattccctgtgggagatgcggtgtccaaggttctgcagattgagaaggaaggggccatccatagagaggagctggtctatgaactcaaccccttggaccaccgaggccggaccttggaaatacctggcaactctgatcccaatatgatccctgatggggactttaacagctacgtcagggttacagcctcagatccattggacactttaggctctgagggggccttgtcaccaggaggcgtggcctccctcttgaggcttcctcgaggctgtggggagcaaaccatgatctacttggctccgacactggctgcttcccgctacctggacaagacagagcagtggagcacactgcctcccgagaccaaggaccacgccgtggatctgatccagaaaggctacatgcggatccagcagtttcggaaggcggatggttcctatgcggcttggttgtcacgggacagcagcacctggctcacagcctttgtgttgaaggtcctgagtttggcccaggagcaggtaggaggctcgcctgagaaactgcaggagacatctaactggcttctgtcccagcagcaggctgacggctcgttccaggacctctctccagtgatacataggagcatgcaggggggtttggtgggcaatgatgagactgtggcactcacagcctttgtgaccatcgcccttcatcatgggctggccgtcttccaggatgagggtgcagagccattgaagcagagagtggaagcctccatctcaaaggcaagctcatttttgggggagaaagcaagtgctgggctcctgggtgcccacgcagctgccatcacggcctatgccctgacactgaccaaggcgcctgtggacctgctcggtgttgcccacaacaacctcatggcaatggcccaggagactggagataacctgtactggggctcagtcactggttctcagagcaatgccgtgtcgcccaccccggctcctcgcaacccatccgaccccatgccccaggccccagccctgtggattgaaaccacagcctacgccctgctgcacctcctgcttcacgagggcaaagcagagatggcagaccaggctgcggcctggctcacccgtcagggcagcttccaagggggattccgcagtacccaagacacggtgattgccctggatgccctgtctgcctactggattgcctcccacaccactgaggagaggggtctcaatgtgactctcagctccacaggccggaatgggttcaagtcccacgcgctgcagctgaacaaccgccagattcgcggcctggaggaggagctgcagttttccttgggcagcaagatcaatgtgaaggtgggaggaaacagcaaaggaaccctgaaggtccttcgtacctacaatgtcctggacatgaagaacacgacctgccaggacctacagatagaagtgacagtcaaaggccacgtcgagtacacgatggaagcaaacgaggactatgaggactatgagtacgatgagcttccagccaaggatgacccagatgcccctctgcagcccgtgacacccctgcagctgtttgagggtcggaggaaccgccgcaggagggaggcgcccaaggtggtggaggagcaggagtccagggtgcactacaccgtgtgcatctggcggaacggcaaggtggggctgtctggcatggccatcgcggacgtcaccctcctgagtggattccacgccctgcgtgctgacctggagaagctgacctccctctctgaccgttacgtgagtcactttgagaccgaggggccccacgtcctgctgtattttgactcggtccccacctcccgggagtgcgtgggctttgaggctgtgcaggaagtgccggtggggctggtgcagccggccagcgcaaccctgtacgactactacaaccccgagcgcagatgttctgtgttttacggggcaccaagtaagagcagactcttggccaccttgtgttctgctgaagtctgccagtgtgctgaggggaagtgccctcgccagcgtcgcgccctggagcggggtctgcaggacgaggatggctacaggatgaagtttgcctgctactacccccgtgtggagtacggcttccaagttaaggttctccgagcacagaactgttttcgcctttttgagaccaagatcaccaaattcttgacttcaccaaagatgtgagggcggttgtaataaatgcgcaccttctgggttgagcctctggcgcctctttgggccgggcgttggactgattactggtcgg

SEQ ID NO: 440053 - DNA, 822 bp, Homo sapiens
ggtgacgtccgcgatggccatgccagacaagccccaccttgccgtccggcagatgcacacggtgtagtgaccctggactcctgctcctccaccaccttgggcgcctccctcctgcggcggttcctccgaccctcaaacagctgcaggggtgtcacgggctggagagggggatctggtaagagcagactcttggccaccttgtgttctgctgaagtctgccagtgtgctgaggggaagtgccctcgccagcgtcgcgccctggagcggggtctgcaggacgaggatggctacaggatgaagtttgcctgctactacccccgtgtggagtacggcttccaggttaaggttctccgagaagacagcagagctgctttccgcctctttgagaccaagatcacccaagtcctgcacttcaccaaggatgtcaaggccgctgctaatcagatgcgcaacttcctggttcgagcctcctgccgccttcgcttggaacctgggaaagaatatttgatcatgggtctggatggggccacctatgacctcgagggacacccccagtacctgctggactcgaatagctggatcgaggagatgccctctgaacgcctgtgccggagcacccgccagcgggcagcctgtgcccagctcaacgacttcctccaggagtatggcactcaggggtgccaggtgtgagggctgccctcccacctccgctgggaggaacctgaacctgggaaccatgaagctggaagcactgctgtgtccgctttcatgaacacagcctgggaccagggcatattaaaggcttttggcagcaaagtgtca

SEQ ID NO: 440054 - DNA, 923 bp, Homo sapiens
tccctgggactgaggaggcagaatggaggggcctgtgccctaactcctctctgttctccagagcgcagatgttctgtgttttacggggcaccaagtaagagcagactcttggccaccttgtgttctgctgaagtctgccagtgtgctgaggggaagtgccctcgccagcgtcgcgccctggagcggggtctgcaggacgaggatggctacaggatgaagtttgcctgctactacccccgtgtggagtacggtcagtcttcccaccgaggccctggcctgaccctccctcggggaccggctgttttggtctctctgggtgtagcctgctcctcttacaggtcatgcacgcagcctgtttgctctgacaccaacttcctaccctctcagcctcaaagtaactcacctttcccccttctcctcaccccctcttaggcttccaggttaaggttctccgagaagacagcagagctgctttccgcctctttgagaccaagatcacccaagtcctgcacttcaccaaggatgtcaaggccgctgctaatcagatgcgcaacttcctggttcgagcctcctgccgccttcgcttggaacctgggaaagaatatttgatcatgggtctggatggggccacctatgacctcgagggacacccccagtacctgctggactcgaatagctggatcgaggagatgccctctgaacgcctgtgccggagcacccgccagcgggcagcctgtgcccagctcaacgacttcctccaggagtatggcactcaggggtgccaggtgtgagggctgccctcccacctccgctgggaggaacctgaacctgggaaccatgaagctggaagcactgctgtgtccgctttcatgaacacagcctgggaccagggcatattaaaggcttttggcagcaaagtgtca

SEQ ID NO: 440055 - DNA, 4145 bp, Homo sapiens
aggtccagagtcaactctgccccgaggcctagcttggccagaaggtagcagacagacagacggatctaacctctcttggatcctccagccatgaggctgctctgggggctgatctgggcatccagcttcttcaccttatctctgcagaagcccaggttgctcttgttctctccttctgtggttcatctgggggtccccctatcggtgggggtgcagctccaggatgtgccccgaggacaggtagtgaaaggatcagtgttcctgagaaacccatctcgtaataatgtcccctgctccccaaaggtggacttcacccttagctcagaaagagacttcgcactcctcagtctccaggtgcccttgaaagatgcgaagagctgtggcctccatcaactcctcagaggccctgaggtccagctggtggcccattcgccatggctaaaggactctctgtccagaacgacaaacatccagggtatcaacctgctcttctcctctcgccgggggcacctctttttgcagacggaccagcccatttacaaccctggccagcgggttcggtaccgggtctttgctctggatcagaagatgcgcccgagcactgacaccatcacagtcatggtggagaactctcacggcctccgcgtgcggaagaaggaggtgtacatgccctcgtccatcttccaggatgactttgtgatcccagacatctcagagccagggacctggaagatctcagcccgattctcagatggcctggaatccaacagcagcacccagtttgaggtgaagaaatatgtccttcccaactttgaggtgaagatcacccctggaaagccctacatcctgacggtgccaggccatcttgatgaaatgcagttagacatccaggccaggtacatctatgggaagccagtgcagggggtggcatatgtgcgctttgggctcctagatgaggatggtaagaagactttctttcgggggctggagagtcagaccaagctggtgaatggacagagccacatttccctctcaaaggcagagttccaggacgccctggagaagctgaatatgggcattactgacctccaggggctgcgcctctacgttgctgcagccatcattgagtatccaggtggggagatggaggaggcagagctcacatcctggtattttgtgtcatctcccttctccttggatcttagcaagaccaagcgacaccttgtgcctggggcccccttcctgctgcaggccttggtccgtgagatgtcaggctccccagcttctggcattcctgtcaaagtttctgccacggtgtcttctcctgggtctgttcctgaagtccaggacattcagcaaaacacagacgggagcggccaagtcagcattccaataattatccctcagaccatctcagagctgcagctctcagtatctgcaggctccccacatccagcgatagccaggctcactgtggcagccccaccttcaggaggccccgggtttctgtctattgagcggccggattctcgacctcctcgtgttggggacactctgaacctgaacttgcgagccgtgggcagtggggccaccttttctcattactactacatgatcctatcccgagggcagatcgtgttcatgaatcgagagcccaagaggaccctgacctcggtctcggtgtttgtggaccatcacctggcaccctccttctactttgtggccttctactaccatggagaccacccagtggccaactccctgcgagtggatgtccaggctggggcctgcgagggcaagctggagctcagcgtggacggtgccaagcagtaccggaacggggagtccgtgaagctccacttagaaaccgactccctagccctggtggcgctgggagccttggacacagctctgtatgctgcaggcagcaagtcccacaagcccctcaacatgggcaaggtctttgaagctatgaacagctatgacctcggctgtggtcctgggggtggggacagtgcccttcaggtgttccaggcagcgggcctggccttttctgatggagaccagtggaccttatccagaaagagactaagctgtcccaaggagaagacaacccggaaaaagagaaacgtgaacttccaaaaggcgattaatgagaaattgggtcagtatgcttccccgacagccaagcgctgctgccaggatggggtgacacgtctgcccatgatgcgttcctgcgagcagcgggcagcccgcgtgcagcagccggactgccgggagcccttcctgtcctgctgccaatttgctgagagtctgcgcaagaagagcagggacaagggccaggcgggcctccaacgagccctggagatcctgcaggaggaggacctgattgatgaggatgacattcccgtgcgcagcttcttcccagagaactggctctggagagtggaaacagtggaccgctttcaaatattgacactgtggctccccgactctctgaccacgtgggagatccatggcctgagcctgtccaaaaccaaaggcctatgtgtggccaccccagtccagctccgggtgttccgcgagttccacctgcacctccgcctgcccatgtctgtccgccgctttgagcagctggagctgcggcctgtcctctataactacctggataaaaacctgactgtgagcgtccacgtgtccccagtggaggggctgtgcctggctgggggcggagggctggcccagcaggtgctggtgcctgcgggctctgcccggcctgttgccttctctgtggtgcccacggcagccgccgctgtgtctctgaaggtggtggctcgagggtccttcgaattccctgtgggagatgcggtgtccaaggttctgcagattgagaaggaaggggccatccatagagaggagctggtctatgaactcaaccccttggaccaccgaggccggaccttggaaatacctggcaactctgatcccaatatgatccctgatggggactttaacagctacgtcagggttacagcctcagatccattggacactttaggctctgagggggccttgtcaccaggaggcgtggcctccctcttgaggcttcctcgaggctgtggggagcaaaccatgatctacttggctccgacactggctgcttcccgctacctggacaagacagagcagtggagcacactgcctcccgagaccaaggaccacgccgtggatctgatccagaaaggctacatgcggatccagcagtttcggaaggcggatggttcctatgcggcttggttgtcacgggacagcagcacctggctcacagcctttgtgttgaaggtcctgagtttggcccaggagcaggtaggaggctcgcctgagaaactgcaggagacatctaactggcttctgtcccagcagcaggctgacggctcgttccaggacctctctccagtgatacataggagcatgcaggggggtttggtgggcaatgatgagactgtggcactcacagcctttgtgaccatcgcccttcatcatgggctggccgtcttccaggatgagggtgcagagccattgaagcagagagtggaagcctccatctcaaaggcaagctcatttttgggggagaaagcaagtgctgggctcctgggtgcccacgcagctgccatcacggcctatgccctgacactgaccaaggcgcctgtggacctgctcggtgttgcccacaacaacctcatggcaatggcccaggagactggagataacctgtactggggctcagtcactggttctcagagcaatgccgtgtcgcccaccccggctcctcgcaacccatccgaccccatgccccaggccccagccctgtggattgaaaccacagcctacgccctgctgcacctcctgcttcacgagggcaaagcagagatggcagaccaggctgcggcctggctcacccgtcagggcagcttccaagggggattccgcagtacccaagtaggggccgtccccgggtgccctcccacctccgctgggaggaacctgaacctgggaaccatgaagctggaagcactgctgtgtccgctttcatgaacacagcctgggaccagggcatattaaaggcttttggcagcaaagtgtca

SEQ ID NO: 440056 - DNA, 1226 bp, Homo sapiens
aggtccagagtcaactctgccccgaggcctagcttggccagaaggtagcagacagacagacggatctaacctctcttggatcctccagccatgaggctgctctgggggctgatctgggcatccagcttcttcaccttatctctgcagaagcccaggttgctcttgttctctccttctgtggttcatctgggggtccccctatcggtgggggtgcagctccaggatgtgccccgaggacaggtagtgaaaggatcagtgttcctgagaaacccatctcgtaataatgtcccctgctccccaaaggtggacttcacccttagctcagaaagagacttcgcactcctcagtctccaggtgcccttgaaagatgcgaagagctgtggcctccatcaactcctcagaggccctgaggtccagctggtggcccattcgccatggctaaaggactctctgtccagaacgacaaacatccagggtatcaacctgctcttctcctctcgccgggggcacctctttttgcagacggaccagcccatttacaaccctggccagcgggttcggtaccgggtctttgctctggatcagaagatgcgcccgagcactgacaccatcacagtcatggtggagaactctcacggcctccgcgtgcggaagaaggaggtgtacatgccctcgtccatcttccaggatgactttgtgatcccagacatctcagagccagggacctggaagatctcagcccgattctcagatggcctggaatccaacagcagcacccagtttgaggtgaagaaatatgtccttcccaactttgaggtgaagatcacccctggaaagccctacatcctgacggtgccaggccatcttgatgaaatgcagttagacatccaggccaggtacatctatgggaagccagtgcagggggtggcatatgtgcgctttgggctcctagatgaggatggtaagaagactttctttcgggggctggagagtcagaccaagctggtgaatggacagagccacatttccctctcaaaggcagagttccaggacgccctggagaagctgaatatgggcattactgacctccaggggctgcgcctctacgttgctgcagccatcattgagtatccagctggtgatatgtataaggcagagctcacatctaggtaagtagtgtcctctagcaatcaagttatagtttatcgcagagtcctcaaaagggg

SEQ ID NO: 440057 - DNA, 522 bp, Homo sapiens
gactcttggccaccttgtgttctgctgaagtctgccagtgtgctgagggtgagactgagggcctggggcggggcagtggaggcgggatggccggggccccccccacactgtctgatgggttccccaacttcagggaagtgccctcgccagcgtcgcgccctggagcggggtctgcaggacgaggatggctacaggatgaagtttgcctgctactacccccgtgtggagtacggtcagtcttcccaccgaggccctggcctgaccctccctcggggaccggctgttttggtctctctgggtgtagcctgctcctcttacaggtcatgcacgcagcctgtttgctctgacaccaacttcctaccctctcagcctcaaagtaactcacctttcccccttctcctcaccccctcttaggcttccaggttaaggttctccgagaagacagcagagctgctttccgcctctttgagaccaagatcacccaagtcctgcacttcagtatgaagcaaaccggagaggcgg

SEQ ID NO: 440058 - DNA, 838 bp, Homo sapiens
gggctgcagggcccagggagtgggtccctcatctctcctccccacgcttggccaggtccccacctcccgggagtgcgtgggctttgaggctgtgcaggaagtgccggtggggctggtgcagccggccagcgcaaccctgtacgactactacaaccccgagcgcagatgttctgtgttttacggggcaccaagtaagagcagactcttggccaccttgtgttctgctgaagtctgccagtgtgctgaggggaagtgccctcgccagcgtcgcgccctggagcggggtctgcaggacgaggatggctacaggatgaagtttgcctgctactacccccgtgtggagtacggcttccaggttaaggttctccgagaagacagcagagctgctttccgcctctttgagaccaagatcacccaagtcctgcacttcaccaaggatgtcaaggccgctgctaatcagatgcgcaacttcctggttcgagcctcctgccgccttcgcttggaacctgggaaagaatatttgatcatgggtctggatggggccacctatgacctcgagggacacccccagtacctgctggactcgaatagctggatcgaggagatgccctctgaacgcctgtgccggagcacccgccagcgggcagcctgtgcccagctcaacgacttcctccaggagtatggcactcaggggtgccaggtgtgagggctgccctcccacctccgctgggaggaacctgaacctgggaaccatgaagctggaagcactgctgtgtccgctttcatgaacacagcctgggaccagggcatattaaaggcttttggcagcaaagtgtca

SEQ ID NO: 440059 - DNA, 5254 bp, Homo sapiens
aggtccagagtcaactctgccccgaggcctagcttggccagaaggtagcagacagacagacggatctaacctctcttggatcctccagccatgaggctgctctgggggctgatctgggcatccagcttcttcaccttatctctgcagaagcccaggttgctcttgttctctccttctgtggttcatctgggggtccccctatcggtgggggtgcagctccaggatgtgccccgaggacaggtagtgaaaggatcagtgttcctgagaaacccatctcgtaataatgtcccctgctccccaaaggtggacttcacccttagctcagaaagagacttcgcactcctcagtctccaggtgcccttgaaagatgcgaagagctgtggcctccatcaactcctcagaggccctgaggtccagctggtggcccattcgccatggctaaaggactctctgtccagaacgacaaacatccagggtatcaacctgctcttctcctctcgccgggggcacctctttttgcagacggaccagcccatttacaaccctggccagcgggttcggtaccgggtctttgctctggatcagaagatgcgcccgagcactgacaccatcacagtcatggtggagaactctcacggcctccgcgtgcggaagaaggaggtgtacatgccctcgtccatcttccaggatgactttgtgatcccagacatctcagagccagggacctggaagatctcagcccgattctcagatggcctggaatccaacagcagcacccagtttgaggtgaagaaatatgctggtgaatggacagagccacatttccctctcaaaggcagagttccaggacgccctggagaagctgaatatgggcattactgacctccaggggctgcgcctctacgttgctgcagccatcattgagtatccaggtggggagatggaggaggcagagctcacatcctggtattttgtgtcatctcccttctccttggatcttagcaagaccaagcgacaccttgtgcctggggcccccttcctgctgcaggccttggtccgtgagatgtcaggctccccagcttctggcattcctgtcaaagtttctgccacggtgtcttctcctgggtctgttcctgaagtccaggacattcagcaaaacacagacgggagcggccaagtcagcattccaataattatccctcagaccatctcagagctgcagctctcagtatctgcaggctccccacatccagcgatagccaggctcactgtggcagccccaccttcaggaggccccgggtttctgtctattgagcggccggattctcgacctcctcgtgttggggacactctgaacctgaacttgcgagccgtgggcagtggggccaccttttctcattactactacatgatcctatcccgagggcagatcgtgttcatgaatcgagagcccaagaggaccctgacctcggtctcggtgtttgtggaccatcacctggcaccctccttctactttgtggccttctactaccatggagaccacccagtggccaactccctgcgagtggatgtccaggctggggcctgcgagggcaagctggagctcagcgtggacggtgccaagcagtaccggaacggggagtccgtgaagctccacttagaaaccgactccctagccctggtggcgctgggagccttggacacagctctgtatgctgcaggcagcaagtcccacaagcccctcaacatgggcaaggtctttgaagctatgaacagctatgacctcggctgtggtcctgggggtggggacagtgcccttcaggtgttccaggcagcgggcctggccttttctgatggagaccagtggaccttatccagaaagagactaagctgtcccaaggagaagacaacccggaaaaagagaaacgtgaacttccaaaaggcgattaatgagaaattgggtcagtatgcttccccgacagccaagcgctgctgccaggatggggtgacacgtctgcccatgatgcgttcctgcgagcagcgggcagcccgcgtgcagcagccggactgccgggagcccttcctgtcctgctgccaatttgctgagagtctgcgcaagaagagcagggacaagggccaggcgggcctccaacgagccctggagatcctgcaggaggaggacctgattgatgaggatgacattcccgtgcgcagcttcttcccagagaactggctctggagagtggaaacagtggaccgctttcaaatattgacactgtggctccccgactctctgaccacgtgggagatccatggcctgagcctgtccaaaaccaaaggcctatgtgtggccaccccagtccagctccgggtgttccgcgagttccacctgcacctccgcctgcccatgtctgtccgccgctttgagcagctggagctgcggcctgtcctctataactacctggataaaaacctgactgtgagcgtccacgtgtccccagtggaggggctgtgcctggctgggggcggagggctggcccagcaggtgctggtgcctgcgggctctgcccggcctgttgccttctctgtggtgcccacggcagccgccgctgtgtctctgaaggtggtggctcgagggtccttcgaattccctgtgggagatgcggtgtccaaggttctgcagattgagaaggaaggggccatccatagagaggagctggtctatgaactcaaccccttggaccaccgaggccggaccttggaaatacctggcaactctgatcccaatatgatccctgatggggactttaacagctacgtcagggttacagcctcagatccattggacactttaggctctgagggggccttgtcaccaggaggcgtggcctccctcttgaggcttcctcgaggctgtggggagcaaaccatgatctacttggctccgacactggctgcttcccgctacctggacaagacagagcagtggagcacactgcctcccgagaccaaggaccacgccgtggatctgatccagaaaggctacatgcggatccagcagtttcggaaggcggatggttcctatgcggcttggttgtcacgggacagcagcacctggctcacagcctttgtgttgaaggtcctgagtttggcccaggagcaggtaggaggctcgcctgagaaactgcaggagacatctaactggcttctgtcccagcagcaggctgacggctcgttccaggacctctctccagtgatacataggagcatgcaggggggtttggtgggcaatgatgagactgtggcactcacagcctttgtgaccatcgcccttcatcatgggctggccgtcttccaggatgagggtgcagagccattgaagcagagagtggaagcctccatctcaaaggcaagctcatttttgggggagaaagcaagtgctgggctcctgggtgcccacgcagctgccatcacggcctatgccctgacactgaccaaggcgcctgtggacctgctcggtgttgcccacaacaacctcatggcaatggcccaggagactggagataacctgtactggggctcagtcactggttctcagagcaatgccgtgtcgcccaccccggctcctcgcaacccatccgaccccatgccccaggccccagccctgtggattgaaaccacagcctacgccctgctgcacctcctgcttcacgagggcaaagcagagatggcagaccaggctgcggcctggctcacccgtcagggcagcttccaagggggattccgcagtacccaagacacggtgattgccctggatgccctgtctgcctactggattgcctcccacaccactgaggagaggggtctcaatgtgactctcagctccacaggccggaatgggttcaagtcccacgcgctgcagctgaacaaccgccagattcgcggcctggaggaggagctgcagttttccttgggcagcaagatcaatgtgaaggtgggaggaaacagcaaaggaaccctgaaggtccttcgtacctacaatgtcctggacatgaagaacacgacctgccaggacctacagatagaagtgacagtcaaaggccacgtcgagtacacgatggaagcaaacgaggactatgaggactatgagtacgatgagcttccagccaaggatgacccagatgcccctctgcagcccgtgacacccctgcagctgtttgagggtcggaggaaccgccgcaggagggaggcgcccaaggtggtggaggagcaggagtccagggtgcactacaccgtgtgcatctggcggaacggcaaggtggggctgtctggcatggccatcgcggacgtcaccctcctgagtggattccacgccctgcgtgctgacctggagaagctgacctccctctctgaccgttacgtgagtcactttgagaccgaggggccccacgtcctgctgtattttgactcggtccccacctcccgggagtgcgtgggctttgaggctgtgcaggaagtgccggtggggctggtgcagccggccagcgcaaccctgtacgactactacaaccccgagcgcagatgttctgtgttttacggggcaccaagtaagagcagactcttggccaccttgtgttctgctgaagtctgccagtgtgctgaggggaagtgccctcgccagcgtcgcgccctggagcggggtctgcaggacgaggatggctacaggatgaagtttgcctgctactacccccgtgtggagtacggcttccaggttaaggttctccgagaagacagcagagctgctttccgcctctttgagaccaagatcacccaagtcctgcacttcaccaaggatgtcaaggccgctgctaatcagatgcgcaacttcctggttcgagcctcctgccgccttcgcttggaacctgggaaagaatatttgatcatgggtctggatggggccacctatgacctcgagggacacccccagtacctgctggactcgaatagctggatcgaggagatgccctctgaacgcctgtgccggagcacccgccagcgggcagcctgtgcccagctcaacgacttcctccaggagtatggcactcaggggtgccaggtgtgagggctgccctcccacctccgctgggaggaacctgaacctgggaaccatgaagctggaagcactgctgtgtccgctttcatgaacacagcctgggaccagggcatattaaaggcttttggcagcaaagtgtca

SEQ ID NO: 440060 - DNA, 4625 bp, Homo sapiens
tatcccccatgtcagcttcgctcaggccatctagtatgaaatgcagttagtacatccaggccaggtacatctatgggaagccagtgcagggggtggcatatgtgcgctttgggctcctagatgaggatggtaagaagactttctttcgggggctggagagtcagaccaagctggtgaatggacagagccacatttccctctcaaaggcagagttccaggacgccctggagaagctgaatatgggcattactgacctccaggggctgcgcctctacgttgctgcagccatcattgagtatccaggtggggagatggaggaggcagagctcacatcctggtattttgtgtcatctcccttctccttggatcttagcaagaccaagcgacaccttgtgcctggggcccccttcctgctgcaggccttggtccgtgagatgtcaggctccccagcttctggcattcctgtcaaagtttctgccacggtgtcttctcctgggtctgttcctgaagtccaggacattcagcaaaacacagacgggagcggccaagtcagcattccaataattatccctcagaccatctcagagctgcagctctcagtatctgcaggctccccacatccagcgatagccaggctcactgtggcagccccaccttcaggaggccccgggtttctgtctattgagcggccggattctcgacctcctcgtgttggggacactctgaacctgaacttgcgagccgtgggcagtggggccaccttttctcattactactacatgatcctatcccgagggcagatcgtgttcatgaatcgagagcccaagaggaccctgacctcggtctcggtgtttgtggaccatcacctggcaccctccttctactttgtggccttctactaccatggagaccacccagtggccaactccctgcgagtggatgtccaggctggggcctgcgagggcaagctggagctcagcgtggacggtgccaagcagtaccggaacggggagtccgtgaagctccacttagaaaccgactccctagccctggtggcgctgggagccttggacacagctctgtatgctgcaggcagcaagtcccacaagcccctcaacatgggcaaggtctttgaagctatgaacagctatgacctcggctgtggtcctgggggtggggacagtgcccttcaggtgttccaggcagcgggcctggccttttctgatggagaccagtggaccttatccagaaagagactaagctgtcccaaggagaagacaacccggaaaaagagaaacgtgaacttccaaaaggcgattaatgagaaattgggtcagtatgcttccccgacagccaagcgctgctgccaggatggggtgacacgtctgcccatgatgcgttcctgcgagcagcgggcagcccgcgtgcagcagccggactgccgggagcccttcctgtcctgctgccaatttgctgagagtctgcgcaagaagagcagggacaagggccaggcgggcctccaacgagccctggagatcctgcaggaggaggacctgattgatgaggatgacattcccgtgcgcagcttcttcccagagaactggctctggagagtggaaacagtggaccgctttcaaatattgacactgtggctccccgactctctgaccacgtgggagatccatggcctgagcctgtccaaaaccaaaggcctatgtgtggccaccccagtccagctccgggtgttccgcgagttccacctgcacctccgcctgcccatgtctgtccgccgctttgagcagctggagctgcggcctgtcctctataactacctggataaaaacctgactgtgagcgtccacgtgtccccagtggaggggctgtgcctggctgggggcggagggctggcccagcaggtgctggtgcctgcgggctctgcccggcctgttgccttctctgtggtgcccacggcagccgccgctgtgtctctgaaggtggtggctcgagggtccttcgaattccctgtgggagatgcggtgtccaaggttctgcagattgagaaggaaggggccatccatagagaggagctggtctatgaactcaaccccttggaccaccgaggccggaccttggaaatacctggcaactctgatcccaatatgatccctgatggggactttaacagctacgtcagggttacagcctcagatccattggacactttaggctctgagggggccttgtcaccaggaggcgtggcctccctcttgaggcttcctcgaggctgtggggagcaaaccatgatctacttggctccgacactggctgcttcccgctacctggacaagacagagcagtggagcacactgcctcccgagaccaaggaccacgccgtggatctgatccagaaaggctacatgcggatccagcagtttcggaaggcggatggttcctatgcggcttggttgtcacgggacagcagcacctggctcacagcctttgtgttgaaggtcctgagtttggcccaggagcaggtaggaggctcgcctgagaaactgcaggagacatctaactggcttctgtcccagcagcaggctgacggctcgttccaggacctctctccagtgatacataggagcatgcaggggggtttggtgggcaatgatgagactgtggcactcacagcctttgtgaccatcgcccttcatcatgggctggccgtcttccaggatgagggtgcagagccattgaagcagagagtggaagcctccatctcaaaggcaagctcatttttgggggagaaagcaagtgctgggctcctgggtgcccacgcagctgccatcacggcctatgccctgacactgaccaaggcgcctgtggacctgctcggtgttgcccacaacaacctcatggcaatggcccaggagactggagataacctgtactggggctcagtcactggttctcagagcaatgccgtgtcgcccaccccggctcctcgcaacccatccgaccccatgccccaggccccagccctgtggattgaaaccacagcctacgccctgctgcacctcctgcttcacgagggcaaagcagagatggcagaccaggctgcggcctggctcacccgtcagggcagcttccaagggggattccgcagtacccaagacacggtgattgccctggatgccctgtctgcctactggattgcctcccacaccactgaggagaggggtctcaatgtgactctcagctccacaggccggaatgggttcaagtcccacgcgctgcagctgaacaaccgccagattcgcggcctggaggaggagctgcagttttccttgggcagcaagatcaatgtgaaggtgggaggaaacagcaaaggaaccctgaaggtccttcgtacctacaatgtcctggacatgaagaacacgacctgccaggacctacagatagaagtgacagtcaaaggccacgtcgagtacacgatggaagcaaacgaggactatgaggactatgagtacgatgagcttccagccaaggatgacccagatgcccctctgcagcccgtgacacccctgcagctgtttgagggtcggaggaaccgccgcaggagggaggcgcccaaggtggtggaggagcaggagtccagggtgcactacaccgtgtgcatctggcggaacggcaaggtggggctgtctggcatggccatcgcggacgtcaccctcctgagtggattccacgccctgcgtgctgacctggagaagctgacctccctctctgaccgttacgtgagtcactttgagaccgaggggccccacgtcctgctgtattttgactcggtccccacctcccgggagtgcgtgggctttgaggctgtgcaggaagtgccggtggggctggtgcagccggccagcgcaaccctgtacgactactacaaccccgagcgcagatgttctgtgttttacggggcaccaagtaagagcagactcttggccaccttgtgttctgctgaagtctgccagtgtgctgaggggaagtgccctcgccagcgtcgcgccctggagcggggtctgcaggacgaggatggctacaggatgaagtttgcctgctactacccccgtgtggagtacggcttccaggttaaggttctccgagaagacagcagagctgctttccgcctctttgagaccaagatcacccaagtcctgcacttcaccaaggatgtcaaggccgctgctaatcagatgcgcaacttcctggttcgagcctcctgccgccttcgcttggaacctgggaaagaatatttgatcatgggtctggatggggccacctatgacctcgagggacacccccagtacctgctggactcgaatagctggatcgaggagatgccctctgaacgcctgtgccggagcacccgccagcgggcagcctgtgcccagctcaacgacttcctccaggagtatggcactcaggggtgccaggtgtgagggctgccctcccacctccgctgggaggaacctgaacctgggaaccatgaagctggaagcactgctgtgtccgctttcatgaacacagcctgggaccagggcatattaaaggcttttggcagcaaagtgtca

SEQ ID NO: 440061 - DNA, 5405 bp, Homo sapiens
aggtccagagtcaactctgccccgaggcctagcttggccagaaggtagcagacagacagacggatctaacctctcttggatcctccagccatgaggctgctctgggggctgatctgggcatccagcttcttcaccttatctctgcagaagcccaggttgctcttgttctctccttctgtggttcatctgggggtccccctatcggtgggggtgcagctccaggatgtgccccgaggacaggtagtgaaaggatcagtgttcctgagaaacccatctcgtaataatgtcccctgctccccaaaggtggacttcacccttagctcagaaagagacttcgcactcctcagtctccaggtgcccttgaaagatgcgaagagctgtggcctccatcaactcctcagaggccctgaggtccagctggtggcccattcgccatggctaaaggactctctgtccagaacgacaaacatccagggtatcaacctgctcttctcctctcgccgggggcacctctttttgcagacggaccagcccatttacaaccctggccagcgggttcggtaccgggtctttgctctggatcagaagatgcgcccgagcactgacaccatcacagtcatggtggagaactctcacggcctccgcgtgcggaagaaggaggtgtacatgccctcgtccatcttccaggatgactttgtgatcccagacatctcagagccagggacctggaagatctcagcccgattctcagatggcctggaatccaacagcagcacccagtttgaggtgaagaaatatgtccttcccaactttgaggtgaagatcacccctggaaagccctacatcctgacggtgccaggccatcttgatgaaatgcagttagacatccaggccaggtacatctatgggaagccagtgcagggggtggcatatgtgcgctttgggctcctagatgaggatggtaagaagactttctttcgggggctggagagtcagaccaagctggtgaatggacagagccacatttccctctcaaaggcagagttccaggacgccctggagaagctgaatatgggcattactgacctccaggggctgcgcctctacgttgctgcagccatcattgagtatccaggtggggagatggaggaggcagagctcacatcctggtattttgtgtcatctcccttctccttggatcttagcaagaccaagcgacaccttgtgcctggggcccccttcctgctgcaggccttggtccgtgagatgtcaggctccccagcttctggcattcctgtcaaagtttctgccacggtgtcttctcctgggtctgttcctgaagtccaggacattcagcaaaacacagacgggagcggccaagtcagcattccaataattatccctcagaccatctcagagctgcagctctcagtatctgcaggctccccacatccagcgatagccaggctcactgtggcagccccaccttcaggaggccccgggtttctgtctattgagcggccggattctcgacctcctcgtgttggggacactctgaacctgaacttgcgagccgtgggcagtggggccaccttttctcattactactacatgatcctatcccgagggcagatcgtgttcatgaatcgagagcccaagaggaccctgacctcggtctcggtgtttgtggaccatcacctggcaccctccttctactttgtggccttctactaccatggagaccacccagtggccaactccctgcgagtggatgtccaggctggggcctgcgagggcaagctggagctcagcgtggacggtgccaagcagtaccggaacggggagtccgtgaagctccacttagaaaccgactccctagccctggtggcgctgggagccttggacacagctctgtatgctgcaggcagcaagtcccacaagcccctcaacatgggcaaggtctttgaagctatgaacagctatgacctcggctgtggtcctgggggtggggacagtgcccttcaggtgttccaggcagcgggcctggccttttctgatggagaccagtggaccttatccagaaagagactaagctgtcccaaggagaagacaacccggaaaaagagaaacgtgaacttccaaaaggcgattaatgagaaattgggtcagtatgcttccccgacagccaagcgctgctgccaggatggggtgacacgtctgcccatgatgcgttcctgcgagcagcgggcagcccgcgtgcagcagccggactgccgggagcccttcctgtcctgctgccaatttgctgagagtctgcgcaagaagagcagggacaagggccaggcgggcctccaacgagccctggagatcctgcaggaggaggacctgattgatgaggatgacattcccgtgcgcagcttcttcccagagaactggctctggagagtggaaacagtggaccgctttcaaatattgacactgtggctccccgactctctgaccacgtgggagatccatggcctgagcctgtccaaaaccaaaggcctatgtgtggccaccccagtccagctccgggtgttccgcgagttccacctgcacctccgcctgcccatgtctgtccgccgctttgagcagctggagctgcggcctgtcctctataactacctggataaaaacctgactgtgagcgtccacgtgtccccagtggaggggctgtgcctggctgggggcggagggctggcccagcaggtgctggtgcctgcgggctctgcccggcctgttgccttctctgtggtgcccacggcagccgccgctgtgtctctgaaggtggtggctcgagggtccttcgaattccctgtgggagatgcggtgtccaaggttctgcagattgagaaggaaggggccatccatagagaggagctggtctatgaactcaaccccttggaccaccgaggccggaccttggaaatacctggcaactctgatcccaatatgatccctgatggggactttaacagctacgtcagggttacagcctcagatccattggacactttaggctctgagggggccttgtcaccaggaggcgtggcctccctcttgaggcttcctcgaggctgtggggagcaaaccatgatctacttggctccgacactggctgcttcccgctacctggacaagacagagcagtggagcacactgcctcccgagaccaaggaccacgccgtggatctgatccagaaaggctacatgcggatccagcagtttcggaaggcggatggttcctatgcggcttggttgtcacgggacagcagcacctggctcacagcctttgtgttgaaggtcctgagtttggcccaggagcaggtaggaggctcgcctgagaaactgcaggagacatctaactggcttctgtcccagcagcaggctgacggctcgttccaggacctctctccagtgatacataggagcatgcaggggggtttggtgggcaatgatgagactgtggcactcacagcctttgtgaccatcgcccttcatcatgggctggccgtcttccaggatgagggtgcagagccattgaagcagagagtggaagcctccatctcaaaggcaagctcatttttgggggagaaagcaagtgctgggctcctgggtgcccacgcagctgccatcacggcctatgccctgacactgaccaaggcgcctgtggacctgctcggtgttgcccacaacaacctcatggcaatggcccaggagactggagataacctgtactggggctcagtcactggttctcagagcaatgccgtgtcgcccaccccggctcctcgcaacccatccgaccccatgccccaggccccagccctgtggattgaaaccacagcctacgccctgctgcacctcctgcttcacgagggcaaagcagagatggcagaccaggctgcggcctggctcacccgtcagggcagcttccaagggggattccgcagtacccaagacacggtgattgccctggatgccctgtctgcctactggattgcctcccacaccactgaggagaggggtctcaatgtgactctcagctccacaggccggaatgggttcaagtcccacgcgctgcagctgaacaaccgccagattcgcggcctggaggaggagctgcagttttccttgggcagcaagatcaatgtgaaggtgggaggaaacagcaaaggaaccctgaaggtccttcgtacctacaatgtcctggacatgaagaacacgacctgccaggacctacagatagaagtgacagtcaaaggccacgtcgagtacacgatggaagcaaacgaggactatgaggactatgagtacgatgagcttccagccaaggatgacccagatgcccctctgcagcccgtgacacccctgcagctgtttgagggtcggaggaaccgccgcaggagggaggcgcccaaggtggtggaggagcaggagtccagggtgcactacaccgtgtgcatctggcggaacggcaaggtggggctgtctggcatggccatcgcggacgtcaccctcctgagtggattccacgccctgcgtgctgacctggagaagctctcctccccacgcttggccaggtccccacctcccgggagtgcgtgggctttgaggctgtgcaggaagtgccggtggggctggtgcagccggccagcgcaaccctgtacgactactacaaccccgagcgcagatgttctgtgttttacggggcaccaagtaagagcagactcttggccaccttgtgttctgctgaagtctgccagtgtgctgaggggaagtgccctcgccagcgtcgcgccctggagcggggtctgcaggacgaggatggctacaggatgaagtttgcctgctactacccccgtgtggagtacggcttccaggttaaggttctccgagaagacagcagagctgctttccgcctctttgagaccaagatcacccaagtcctgcacttcaccaaggatgtcaaggccgctgctaatcagatgcgcaacttcctggttcgagcctcctgccgccttcgcttggaacctgggaaagaatatttgatcatgggtctggatggggccacctatgacctcgagggacacccccagtacctgctggactcgaatagctggatcgaggagatgccctctgaacgcctgtgccggagcacccgccagcgggcagcctgtgcccagctcaacgacttcctccaggagtatggcactcaggggtgccaggtgtgagggctgccctcccacctccgctgggaggaacctgaacctgggaaccatgaagctggaagcactgctgtgtccgctttcatgaacacagcctgggaccagggcatattaaaggcttttggcagcaaagtgtca

SEQ ID NO: 440062 - DNA, 5964 bp, Homo sapiens
  misc_feature (5852)..(5852): n is a, c, g, or t
  misc_feature (5915)..(5915): n is a, c, g, or t
aggtccagagtcaactctgccccgaggcctagcttggccagaaggtagcagacagacagacggatctaacctctcttggatcctccagccatgaggctgctctgggggctgatctgggcatccagcttcttcaccttatctctgcagaagcccaggttgctcttgttctctccttctgtggttcatctgggggtccccctatcggtgggggtgcagctccaggatgtgccccgaggacaggtagtgaaaggatcagtgttcctgagaaacccatctcgtaataatgtcccctgctccccaaaggtggacttcacccttagctcagaaagagacttcgcactcctcagtctccaggtgcccttgaaagatgcgaagagctgtggcctccatcaactcctcagaggccctgaggtccagctggtggcccattcgccatggctaaaggactctctgtccagaacgacaaacatccagggtatcaacctgctcttctcctctcgccgggggcacctctttttgcagacggaccagcccatttacaaccctggccagcgggttcggtaccgggtctttgctctggatcagaagatgcgcccgagcactgacaccatcacagtcatggtggagaactctcacggcctccgcgtgcggaagaaggaggtgtacatgccctcgtccatcttccaggatgactttgtgatcccagacatctcagagccagggacctggaagatctcagcccgattctcagatggcctggaatccaacagcagcacccagtttgaggtgaagaaatatgtccttcccaactttgaggtgaagatcacccctggaaagccctacatcctgacggtgccaggccatcttgatgaaatgcagttagacatccaggccaggtacatctatgggaagccagtgcagggggtggcatatgtgcgctttgggctcctagatgaggatggtaagaagactttctttcgggggctggagagtcagaccaagctggtgaatggacagagccacatttccctctcaaaggcagagttccaggacgccctggagaagctgaatatgggcattactgacctccaggggctgcgcctctacgttgctgcagccatcattgagtatccaggtggggagatggaggaggcagagctcacatcctggtattttgtgtcatctcccttctccttggatcttagcaagaccaagcgacaccttgtgcctggggcccccttcctgctgcaggccttggtccgtgagatgtcaggctccccagcttctggcattcctgtcaaagtttctgccacggtgtcttctcctgggtctgttcctgaagtccaggacattcagcaaaacacagacgggagcggccaagtcagcattccaataattatccctcagaccatctcagagctgcagctctcagtatctgcaggctccccacatccagcgatagccaggctcactgtggcagccccaccttcaggaggccccgggtttctgtctattgagcggccggattctcgacctcctcgtgttggggacactctgaacctgaacttgcgagccgtgggcagtggggccaccttttctcattactactacatgatcctatcccgagggcagatcgtgttcatgaatcgagagcccaagaggaccctgacctcggtctcggtgtttgtggaccatcacctggcaccctccttctactttgtggccttctactaccatggagaccacccagtggccaactccctgcgagtggatgtccaggctggggcctgcgagggcaagctggagctcagcgtggacggtgccaagcagtaccggaacggggagtccgtgaagctccacttagaaaccgactccctagccctggtggcgctgggagccttggacacagctctgtatgctgcaggcagcaagtcccacaagcccctcaacatgggcaaggtctttgaagctatgaacagctatgacctcggctgtggtcctgggggtggggacagtgcccttcaggtgttccaggcagcgggcctggccttttctgatggagaccagtggaccttatccagaaagagactaagctgtcccaaggagaagacaacccggaaaaagagaaacgtgaacttccaaaaggcgattaatgagaaattgggtcagtatgcttccccgacagccaagcgctgctgccaggatggggtgacacgtctgcccatgatgcgttcctgcgagcagcgggcagcccgcgtgcagcagccggactgccgggagcccttcctgtcctgctgccaatttgctgagagtctgcgcaagaagagcagggacaagggccaggcgggcctccaacgagccctggagatcctgcaggaggaggacctgattgatgaggatgacattcccgtgcgcagcttcttcccagagaactggctctggagagtggaaacagtggaccgctttcaaatattgacactgtggctccccgactctctgaccacgtgggagatccatggcctgagcctgtccaaaaccaaaggcctatgtgtggccaccccagtccagctccgggtgttccgcgagttccacctgcacctccgcctgcccatgtctgtccgccgctttgagcagctggagctgcggcctgtcctctataactacctggataaaaacctgactgtgagcgtccacgtgtccccagtggaggggctgtgcctggctgggggcggagggctggcccagcaggtgctggtgcctgcgggctctgcccggcctgttgccttctctgtggtgcccacggcagccgccgctgtgtctctgaaggtggtggctcgagggtccttcgaattccctgtgggagatgcggtgtccaaggttctgcagattgagaaggaaggggccatccatagagaggagctggtctatgaactcaaccccttggaccaccgaggccggaccttggaaatacctggcaactctgatcccaatatgatccctgatggggactttaacagctacgtcagggttacagcctcagatccattggacactttaggctctgagggggccttgtcaccaggaggcgtggcctccctcttgaggcttcctcgaggctgtggggagcaaaccatgatctacttggctccgacactggctgcttcccgctacctggacaagacagagcagtggagcacactgcctcccgagaccaaggaccacgccgtggatctgatccagaaaggctacatgcggatccagcagtttcggaaggcggatggttcctatgcggcttggttgtcacgggacagcagcacctggctcacagcctttgtgttgaaggtcctgagtttggcccaggagcaggtaggaggctcgcctgagaaactgcaggagacatctaactggcttctgtcccagcagcaggctgacggctcgttccaggacctctctccagtgatacataggagcatgcaggggggtttggtgggcaatgatgagactgtggcactcacagcctttgtgaccatcgcccttcatcatgggctggccgtcttccaggatgagggtgcagagccattgaagcagagagtggaagcctccatctcaaaggcaagctcatttttgggggagaaagcaagtgctgggctcctgggtgcccacgcagctgccatcacggcctatgccctgacactgaccaaggcgcctgtggacctgctcggtgttgcccacaacaacctcatggcaatggcccaggagactggagataacctgtactggggctcagtcactggttctcagagcaatgccgtgtcgcccaccccggctcctcgcaacccatccgaccccatgccccaggccccagccctgtggattgaaaccacagcctacgccctgctgcacctcctgcttcacgagggcaaagcagagatggcagaccaggctgcggcctggctcacccgtcagggcagcttccaagggggattccgcagtacccaagacacggtgattgccctggatgccctgtctgcctactggattgcctcccacaccactgaggagaggggtctcaatgtgactctcagctccacaggccggaatgggttcaagtcccacgcgctgcagctgaacaaccgccagattcgcggcctggaggaggagctgcagttttccttgggcagcaagatcaatgtgaaggtgggaggaaacagcaaaggaaccctgaaggtccttcgtacctacaatgtcctggacatgaagaacacgacctgccaggacctacagatagaagtgacagtcaaaggccacgtcgagtacacgatggaagcaaacgaggactatgaggactatgagtacgatgagcttccagccaaggatgacccagatgcccctctgcagcccgtgacacccctgcagctgtttgagggtcggaggaaccgccgcaggagggaggcgcccaaggtggtggaggagcaggagtccagggtgcactacaccgtgtgcatctggcggaacggcaaggtggggctgtctggcatggccatcgcggacgtcaccctcctgagtggattccacgccctgcgtgctgacctggagaagctgacctccctctctgaccgttacgtgagtcactttgagaccgaggggccccacgtcctgctgtattttgactcggtccccacctcccgggagtgcgtgggctttgaggctgtgcaggaagtgccggtggggctggtgcagccggccagcgcaaccctgtacgactactacaaccccgagcgcagatgttctgtgttttacggggcaccaagtaagagcagactcttggccaccttgtgttctgctgaagtctgccagtgtgctgaggggaagtgccctcgccagcgtcgcgccctggagcggggtctgcaggacgaggatggctacaggatgaagtttgcctgctactacccccgtgtggagtacggcttccaggttaaggttctccgagaagacagcagagctgctttccgcctctttgagaccaagatcacccaagtcctgcacttcaccaaggatgtcaaggccgctgctaatcagatgcgcaacttcctggttcgagcctcctgccgccttcgcttggaacctgggaaagaatatttgatcatgggtctggatggggccacctatgacctcgagggacacccccagtacctgctggactcgaatagctggatcgaggagatgccctctgaacgcctgtgccggagcacccgccagcgggcagcctgtgcccagctcaacgacttcctccaggagtatggcactcaggggtgccaggtgtgagggctgccctcccacctccgctgggaggaacctgaacctgggaaccatgaagctggaagcactgctgtgtccgctttcatgaacacagcctgggaccagggcatattaaaggcttttggcagcaaagtgtcaaaaaaaaaaaaaaaaaaaaaactcgagctcgtgccgaattcggcacgagggaataatcaggctttttaaatgatgtaattcccactgtaatagcatagggattttggaagcagctgctggtggcttgggacatcagtggggccaagggttctctgtccctggttcaactgtgatttggctttcccgtgtctttcctggtgatgccttgcttggggttctgtggccttgggtgggaagagggccatctgcctgaatgtaacctgctagctctccgaaggccctgcgggcctggcttgtgtgagcgtgtggacagtggtggccgcgctgtgcctgctcgtgttgcctacatgtccctggctgttgaggcgctgcttcagcctgcaccccttccttgnctcatagatgctccttttgaccttttcaaataaatatggatggcaagctcctaaaccaaatanaaacccccaaaacaacacacccacccgaccctatacaaaaatacatgcg

SEQ ID NO: 440063 - DNA, 4861 bp, Homo sapiens
aggtccagagtcaactctgccccgaggcctagcttggccagaaggtagcagacagacagacggatctaacctctcttggatcctccagccatgaggctgctctgggggctgatctgggcatccagcttcttcaccttatctctgcagaagcccaggttgctcttgttctctccttctgtggttcatctgggggtccccctatcggtgggggtgcagctccaggatgtgccccgaggacaggtagtgaaaggatcagtgttcctgagaaacccatctcgtaataatgtcccctgctccccaaaggtggacttcacccttagctcagaaagagacttcgcactcctcagtctccaggtgcccttgaaagatgcgaagagctgtggcctccatcaactcctcagaggccctgaggtccagctggtggcccattcgccatggctaaaggactctctgtccagaacgacaaacatccagggtatcaacctgctcttctcctctcgccgggggcacctctttttgcagacggaccagcccatttacaaccctggccagcgggttcggtaccgggtctttgctctggatcagaagatgcgcccgagcactgacaccatcacagtcatggtggagaactctcacggcctccgcgtgcggaagaaggaggtgtacatgccctcgtccatcttccaggatgactttgtgatcccagacatctcagagccagggacctggaagatctcagcccgattctcagatggcctggaatccaacagcagcacccagtttgaggtgaagaaatatgtccttcccaactttgaggtgaagatcacccctggaaagccctacatcctgacggtgccaggccatcttgatgaaatgcagttagacatccaggccaggtacatctatgggaagccagtgcagggggtggcatatgtgcgctttgggctcctagatgaggatggtaagaagactttctttcgggggctggagagtcagaccaagctggtgaatggacagagccacatttccctctcaaaggcagagttccaggacgccctggagaagctgaatatgggcattactgacctccaggggctgcgcctctacgttgctgcagccatcattgagtatccaggtggggagatggaggaggcagagctcacatcctggtattttgtgtcatctcccttctccttggatcttagcaagaccaagcgacaccttgtgcctggggcccccttcctgctgcaggccttggtccgtgagatgtcaggctccccagcttctggcattcctgtcaaagtttctgccacggtgtcttctcctgggtctgttcctgaagtccaggacattcagcaaaacacagacgggagcggccaagtcagcattccaataattatccctcagaccatctcagagctgcagctctcagtatctgcaggctccccacatccagcgatagccaggctcactgtggcagccccaccttcaggaggccccgggtttctgtctattgagcggccggattctcgacctcctcgtgttggggacactctgaacctgaacttgcgagccgtgggcagtggggccaccttttctcattactactacatgatcctatcccgagggcagatcgtgttcatgaatcgagagcccaagaggaccctgacctcggtctcggtgtttgtggaccatcacctggcaccctccttctactttgtggccttctactaccatggagaccacccagtggccaactccctgcgagtggatgtccaggctggggcctgcgagggcaagctggagctcagcgtggacggtgccaagcagtaccggaacggggagtccgtgaagctccacttagaaaccgactccctagccctggtggcgctgggagccttggacacagctctgtatgctgcaggcagcaagtcccacaagcccctcaacatgggcaaggtctttgaagctatgaacagctatgacctcggctgtggtcctgggggtggggacagtgcccttcaggtgttccaggcagcgggcctggccttttctgatggagaccagtggaccttatccagaaagagactaagctgtcccaaggagaagacaacccggaaaaagagaaacgtgaacttccaaaaggcgattaatgagaaattgggtcagtatgcttccccgacagccaagcgctgctgccaggatggggtgacacgtctgcccatgatgcgttcctgcgagcagcgggcagcccgcgtgcagcagccggactgccgggagcccttcctgtcctgctgccaatttgctgagagtctgcgcaagaagagcagggacaagggccaggcgggcctccaacgagccctggagatcctgcaggaggaggacctgattgatgaggatgacattcccgtgcgcagcttcttcccagagaactggctctggagagtggaaacagtggaccgctttcaaatattgacactgtggctccccgactctctgaccacgtgggagatccatggcctgagcctgtccaaaaccaaaggcctatgtgtggccaccccagtccagctccgggtgttccgcgagttccacctgcacctccgcctgcccatgtctgtccgccgctttgagcagctggagctgcggcctgtcctctataactacctggataaaaacctgactgtgagcgtccacgtgtccccagtggaggggctgtgcctggctgggggcggagggctggcccagcaggtgctggtgcctgcgggctctgcccggcctgttgccttctctgtggtgcccacggcagccgccgctgtgtctctgaaggtggtggctcgagggtccttcgaattccctgtgggagatgcggtgtccaaggttctgcagattgagaaggaaggggccatccatagagaggagctggtctatgaactcaaccccttggaccaccgaggccggaccttggaaatacctggcaactctgatcccaatatgatccctgatggggactttaacagctacgtcagggttacagcctcagatccattggacactttaggctctgagggggccttgtcaccaggaggcgtggcctccctcttgaggcttcctcgaggctgtggggagcaaaccatgatctacttggctccgacactggctgcttcccgctacctggacaagacagagcagtggagcacactgcctcccgagaccaaggaccacgccgtggatctgatccagaaaggctacatgcggatccagcagtttcggaaggcggatggttcctatgcggcttggttgtcacgggacagcagcacctggctcacagcctttgtgttgaaggtcctgagtttggcccaggagcaggtaggaggctcgcctgagaaactgcaggagacatctaactggcttctgtcccagcagcaggctgacggctcgttccaggacctctctccagtgatacataggagcatgcaggggggtttggtgggcaatgatgagactgtggcactcacagcctttgtgaccatcgcccttcatcatgggctggccgtcttccaggatgagggtgcagagccattgaagcagagagtggaagcctccatctcaaaggcaagctcatttttgggggagaaagcaagtgctgggctcctgggtgcccacgcagctgccatcacggcctatgccctgacactgaccaaggcgcctgtggacctgctcggtgttgcccacaacaacctcatggcaatggcccaggagactggagataacctgtactggggctcagtcactggttctcagagcaatgccgtgtcgcccaccccggctcctcgcaacccatccgaccccatgccccaggccccagccctgtggattgaaaccacagcctacgccctgctgcacctcctgcttcacgagggcaaagcagagatggcagaccaggctgcggcctggctcacccgtcagggcagcttccaagggggattccgcagtacccaagacacggtgattgccctggatgccctgtctgcctactggattgcctcccacaccactgaggagaggggtctcaatgtgactctcagctccacaggccggaatgggctttgaggctgtgcaggaagtgccggtggggctggtgcagccggccagcgcaaccctgtacgactactacaaccccgagcgcagatgttctgtgttttacggggcaccaagtaagagcagactcttggccaccttgtgttctgctgaagtctgccagtgtgctgaggggaagtgccctcgccagcgtcgcgccctggagcggggtctgcaggacgaggatggctacaggatgaagtttgcctgctactacccccgtgtggagtacggcttccaggttaaggttctccgagaagacagcagagctgctttccgcctctttgagaccaagatcacccaagtcctgcacttcaccaaggatgtcaaggccgctgctaatcagatgcgcaacttcctggttcgagcctcctgccgccttcgcttggaacctgggaaagaatatttgatcatgggtctggatggggccacctatgacctcgagggacacccccagtacctgctggactcgaatagctggatcgaggagatgccctctgaacgcctgtgccggagcacccgccagcgggcagcctgtgcccagctcaacgacttcctccaggagtatggcactcaggggtgccaggtgtgagggctgccctcccacctccgctgggaggaacctgaacctgggaaccatgaagctggaagcactgctgtgtccgctttcatgaacacagcctgggaccagggcatattaaaggcttttggcagcaaagtgtca

SEQ ID NO: 440064 - DNA, 5600 bp, Homo sapiens
aggtccagagtcaactctgccccgaggcctagcttggccagaaggtagcagacagacagacggatctaacctctcttggatcctccagccatgaggctgctctgggggctgatctgggcatccagcttcttcaccttatctctgcagaagcccaggttgctcttgttctctccttctgtggttcatctgggggtccccctatcggtgggggtgcagctccaggatgtgccccgaggacaggtagtgaaaggatcagtgttcctgagaaacccatctcgtaataatgtcccctgctccccaaaggtggacttcacccttagctcagaaagagacttcgcactcctcagtctccaggtgcccttgaaagatgcgaagagctgtggcctccatcaactcctcagaggccctgaggtccagctggtggcccattcgccatggctaaaggactctctgtccagaacgacaaacatccagggtatcaacctgctcttctcctctcgccgggggcacctctttttgcagacggaccagcccatttacaaccctggccagcgggttcggtaccgggtctttgctctggatcagaagatgcgcccgagcactgacaccatcacagtcatggtggagaactctcacggcctccgcgtgcggaagaaggaggtgtacatgccctcgtccatcttccaggatgactttgtgatcccagacatctcagagccagggacctggaagatctcagcccgattctcagatggcctggaatccaacagcagcacccagtttgaggtgaagaaatatgtccttcccaactttgaggtgaagatcacccctggaaagccctacatcctgacggtgccaggccatcttgatgaaatgcagttagacatccaggccaggtacatctatgggaagccagtgcagggggtggcatatgtgcgctttgggctcctagatgaggatggtaagaagactttctttcgggggctggagagtcagaccaagctggtgaatggacagagccacatttccctctcaaaggcagagttccaggacgccctggagaagctgaatatgggcattactgacctccaggggctgcgcctctacgttgctgcagccatcattgagtatccaggtggggagatggaggaggcagagctcacatcctggtattttgtgtcatctcccttctccttggatcttagcaagaccaagcgacaccttgtgcctggggcccccttcctgctgcaggccttggtccgtgagatgtcaggctccccagcttctggcattcctgtcaaagtttctgccacggtgtcttctcctgggtctgttcctgaagtccaggacattcagcaaaacacagacgggagcggccaagtcagcattccaataattatccctcagaccatctcagagctgcagctctcagtatctgcaggctccccacatccagcgatagccaggctcactgtggcagccccaccttcaggaggccccgggtttctgtctattgagcggccggattctcgacctcctcgtgttggggacactctgaacctgaacttgcgagccgtgggcagtggggccaccttttctcattactactacatgatcctatcccgagggcagatcgtgttcatgaatcgagagcccaagaggaccctgacctcggtctcggtgtttgtggaccatcacctggcaccctccttctactttgtggccttctactaccatggagaccacccagtggccaactccctgcgagtggatgtccaggctggggcctgcgagggcaagctggagctcagcgtggacggtgccaagcagtaccggaacggggagtccgtgaagctccacttagaaaccgactccctagccctggtggcgctgggagccttggacacagctctgtatgctgcaggcagcaagtcccacaagcccctcaacatgggcaaggtctttgaagctatgaacagctatgacctcggctgtggtcctgggggtggggacagtgcccttcaggtgttccaggcagcgggcctggccttttctgatggagaccagtggaccttatccagaaagagactaagctgtcccaaggagaagacaacccggaaaaagagaaacgtgaacttccaaaaggcgattaatgagaaattgggtcagtatgcttccccgacagccaagcgctgctgccaggatggggtgacacgtctgcccatgatgcgttcctgcgagcagcgggcagcccgcgtgcagcagccggactgccgggagcccttcctgtcctgctgccaatttgctgagagtctgcgcaagaagagcagggacaagggccaggcgggcctccaacgagccctggagatcctgcaggaggaggacctgattgatgaggatgacattcccgtgcgcagcttcttcccagagaactggctctggagagtggaaacagtggaccgctttcaaatattgacactgtggctccccgactctctgaccacgtgggagatccatggcctgagcctgtccaaaaccaaaggcctatgtgtggccaccccagtccagctccgggtgttccgcgagttccacctgcacctccgcctgcccatgtctgtccgccgctttgagcagctggagctgcggcctgtcctctataactacctggataaaaacctgactgtgagcgtccacgtgtccccagtggaggggctgtgcctggctgggggcggagggctggcccagcaggtgctggtgcctgcgggctctgcccggcctgttgccttctctgtggtgcccacggcagccgccgctgtgtctctgaaggtggtggctcgagggtccttcgaattccctgtgggagatgcggtgtccaaggttctgcagattgagaaggaaggggccatccatagagaggagctggtctatgaactcaaccccttggaccaccgaggccggaccttggaaatacctggcaactctgatcccaatatgatccctgatggggactttaacagctacgtcagggttacagcctcagatccattggacactttaggctctgagggggccttgtcaccaggaggcgtggcctccctcttgaggcttcctcgaggctgtggggagcaaaccatgatctacttggctccgacactggctgcttcccgctacctggacaagacagagcagtggagcacactgcctcccgagaccaaggaccacgccgtggatctgatccagaaaggctacatgcggatccagcagtttcggaaggcggatggttcctatgcggcttggttgtcacgggacagcagcacctggctcacagcctttgtgttgaaggtcctgagtttggcccaggagcaggtaggaggctcgcctgagaaactgcaggagacatctaactggcttctgtcccagcagcaggctgacggctcgttccaggacctctctccagtgatacataggagcatgcaggggggtttggtgggcaatgatgagactgtggcactcacagcctttgtgaccatcgcccttcatcatgggctggccgtcttccaggatgagggtgcagagccattgaagcagagagtggaagcctccatctcaaaggcaagctcatttttgggggagaaagcaagtgctgggctcctgggtgcccacgcagctgccatcacggcctatgccctgacactgaccaaggcgcctgtggacctgctcggtgttgcccacaacaacctcatggcaatggcccaggagactggagataacctgtactggggctcagtcactggttctcagagcaatgccgtgtcgcccaccccggctcctcgcaacccatccgaccccatgccccaggccccagccctgtggattgaaaccacagcctacgccctgctgcacctcctgcttcacgagggcaaagcagagatggcagaccaggctgcggcctggctcacccgtcagggcagcttccaagggggattccgcagtacccaagacacggtgattgccctggatgccctgtctgcctactggattgcctcccacaccactgaggagaggggtctcaatgtgactctcagctccacaggccggaatgggttcaagtcccacgcgctgcagctgaacaaccgccagattcgcggcctggaggaggagctgcagttttccttgggcagcaagatcaatgtgaaggtgggaggaaacagcaaaggaaccctgaaggtccttcgtacctacaatgtcctggacatgaagaacacgacctgccaggacctacagatagaagtgacagtcaaaggccacgtcgagtacacgatggaagcaaacgaggactatgaggactatgagtacgatgagcttccagccaaggatgacccagatgcccctctgcagcccgtgacacccctgcagctgtttgagggtcggaggaaccgccgcaggagggaggcgcccaaggtggtggaggagcaggagtccagggtgcactacaccgtgtgcatctggcggaacggcaaggtggggctgtctggcatggccatcgcggacgtcaccctcctgagtggattccacgccctgcgtgctgacctggagaagctgacctccctctctgaccgttacgtgagtcactttgagaccgaggggccccacgtcctgctgtattttgactcggtccccacctcccgggagtgcgtgggctttgaggctgtgcaggaagtgccggtggggctggtgcagccggccagcgcaaccctgtacgactactacaaccccgagcgcagatgttctgtgttttacggggcaccaagtaagagcagactcttggccaccttgtgttctgctgaagtctgccagtgtgctgaggggaagtgccctcgccagcgtcgcgccctggagcggggtctgcaggacgaggatggctacaggatgaagtttgcctgctactacccccgtgtggagtacggcttccaggttaaggttctccgagaagacagcagagctgctttccgcctctttgagaccaagatcacccaagtcctgcacttcaccaaggatgtcaaggccgctgctaatcagatgcgcaacttcctggttcgagcctcctgccgccttcgcttggaacctgggaaagaatatttgatcatgggtctggatggggccacctatgacctcgagggacagtgagtcatctggtcccctcagtctcttgtcctccccatgcctcgccacctaggccttgcccctcagaagccagatgcctgtgctctccgtttccacctgccatcctcccgagccctgctgactgcccctttgccccctgcagcccccagtacctgctggactcgaatagctggatcgaggagatgccctctgaacgcctgtgccggagcacccgccagcgggcagcctgtgcccagctcaacgacttcctccaggagtatggcactcaggggtgccaggtgtgagggctgccctcccacctccgctgggaggaacctgaacctgggaaccatgaagctggaagcactgctgtgtccgctttcatgaacacagcctgggaccagggcatattaaaggcttttggcagcaaagtgtca

SEQ ID NO: 440065 - DNA, 5863 bp, Homo sapiens
aggtccagagtcaactctgccccgaggcctagcttggccagaaggtagcagacagacagacggatctaacctctcttggatcctccagccatgaggctgctctgggggctgatctgggcatccagcttcttcaccttatctctgcagaagcccaggttgctcttgttctctccttctgtggttcatctgggggtccccctatcggtgggggtgcagctccaggatgtgccccgaggacaggtagtgaaaggatcagtgttcctgagaaacccatctcgtaataatgtcccctgctccccaaaggtggacttcacccttagctcagaaagagacttcgcactcctcagtctccaggtgcccttgaaagatgcgaagagctgtggcctccatcaactcctcagaggccctgaggtccagctggtggcccattcgccatggctaaaggactctctgtccagaacgacaaacatccagggtatcaacctgctcttctcctctcgccgggggcacctctttttgcagacggaccagcccatttacaaccctggccagcgggttcggtaccgggtctttgctctggatcagaagatgcgcccgagcactgacaccatcacagtcatggtggagaactctcacggcctccgcgtgcggaagaaggaggtgtacatgccctcgtccatcttccaggatgactttgtgatcccagacatctcagagccagggacctggaagatctcagcccgattctcagatggcctggaatccaacagcagcacccagtttgaggtgaagaaatatgtccttcccaactttgaggtgaagatcacccctggaaagccctacatcctgacggtgccaggccatcttgatgaaatgcagttagacatccaggccaggtacatctatgggaagccagtgcagggggtggcatatgtgcgctttgggctcctagatgaggatggtaagaagactttctttcgggggctggagagtcagaccaagctggtgaatggacagagccacatttccctctcaaaggcagagttccaggacgccctggagaagctgaatatgggcattactgacctccaggggctgcgcctctacgttgctgcagccatcattgagtatccaggtggggagatggaggaggcagagctcacatcctggtattttgtgtcatctcccttctccttggatcttagcaagaccaagcgacaccttgtgcctggggcccccttcctgctgcaggccttggtccgtgagatgtcaggctccccagcttctggcattcctgtcaaagtttctgccacggtgtcttctcctgggtctgttcctgaagtccaggacattcagcaaaacacagacgggagcggccaagtcagcattccaataattatccctcagaccatctcagagctgcagctctcagtatctgcaggctccccacatccagcgatagccaggctcactgtggcagccccaccttcaggaggccccgggtttctgtctattgagcggccggattctcgacctcctcgtgttggggacactctgaacctgaacttgcgagccgtgggcagtggggccaccttttctcattactactacatgatcctatcccgagggcagatcgtgttcatgaatcgagagcccaagaggaccctgacctcggtctcggtgtttgtggaccatcacctggcaccctccttctactttgtggccttctactaccatggagaccacccagtggccaactccctgcgagtggatgtccaggctggggcctgcgagggcaagctggagctcagcgtggacggtgccaagcagtaccggaacggggagtccgtgaagctccacttagaaaccgactccctagccctggtggcgctgggagccttggacacagctctgtatgctgcaggcagcaagtcccacaagcccctcaacatgggcaaggtctttgaagctatgaacagctatgacctcggctgtggtcctgggggtggggacagtgcccttcaggtgttccaggcagcgggcctggccttttctgatggagaccagtggaccttatccagaaagagactaagctgtcccaaggagaagacaacccggaaaaagagaaacgtgaacttccaaaaggcgattaatgagaaattgggtcagtatgcttccccgacagccaagcgctgctgccaggatggggtgacacgtctgcccatgatgcgttcctgcgagcagcgggcagcccgcgtgcagcagccggactgccgggagcccttcctgtcctgctgccaatttgctgagagtctgcgcaagaagagcagggacaagggccaggcgggcctccaacgagccctggagatcctgcaggaggaggacctgattgatgaggatgacattcccgtgcgcagcttcttcccagagaactggctctggagagtggaaacagtggaccgctttcaaatattgacactgtggctccccgactctctgaccacgtgggagatccatggcctgagcctgtccaaaaccaaaggcctatgtgtggccaccccagtccagctccgggtgttccgcgagttccacctgcacctccgcctgcccatgtctgtccgccgctttgagcagctggagctgcggcctgtcctctataactacctggataaaaacctgactgtgagcgtccacgtgtccccagtggaggggctgtgcctggctgggggcggagggctggcccagcaggtgctggtgcctgcgggctctgcccggcctgttgccttctctgtggtgcccacggcagccgccgctgtgtctctgaaggtggtggctcgagggtccttcgaattccctgtgggagatgcggtgtccaaggttctgcagattgagaaggaaggggccatccatagagaggagctggtctatgaactcaaccccttggaccaccgaggccggaccttggaaatacctggcaactctgatcccaatatgatccctgatggggactttaacagctacgtcagggttacagcctcagatccattggacactttaggctctgagggggccttgtcaccaggaggcgtggcctccctcttgaggcttcctcgaggctgtggggagcaaaccatgatctacttggctccgacactggctgcttcccgctacctggacaagacagagcagtggagcacactgcctcccgagaccaaggaccacgccgtggatctgatccagaaaggctacatgcggatccagcagtttcggaaggcggatggttcctatgcggcttggttgtcacgggacagcagcacctggctcacagcctttgtgttgaaggtcctgagtttggcccaggagcaggtaggaggctcgcctgagaaactgcaggagacatctaactggcttctgtcccagcagcaggctgacggctcgttccaggacctctctccagtgatacataggagcatgcaggggggtttggtgggcaatgatgagactgtggcactcacagcctttgtgaccatcgcccttcatcatgggctggccgtcttccaggatgagggtgcagagccattgaagcagagagtggaagcctccatctcaaaggcaagctcatttttgggggagaaagcaagtgctgggctcctgggtgcccacgcagctgccatcacggcctatgccctgacactgaccaaggcgcctgtggacctgctcggtgttgcccacaacaacctcatggcaatggcccaggagactggagataacctgtactggggctcagtcactggttctcagagcaatgccgtgtcgcccaccccggctcctcgcaacccatccgaccccatgccccaggccccagccctgtggattgaaaccacagcctacgccctgctgcacctcctgcttcacgagggcaaagcagagatggcagaccaggctgcggcctggctcacccgtcagggcagcttccaagggggattccgcagtacccaagacacggtgattgccctggatgccctgtctgcctactggattgcctcccacaccactgaggagaggggtctcaatgtgactctcagctccacaggccggaatgggttcaagtcccacgcgctgcagctgaacaaccgccagattcgcggcctggaggaggagctgcagttttccttgggcagcaagatcaatgtgaaggtgggaggaaacagcaaaggaaccctgaaggtccttcgtacctacaatgtcctggacatgaagaacacgacctgccaggacctacagatagaagtgacagtcaaaggccacgtcgagtacacgatggaagcaaacgaggactatgaggactatgagtacgatgagcttccagccaaggatgacccagatgcccctctgcagcccgtgacacccctgcagctgtttgagggtcggaggaaccgccgcaggagggaggcgcccaaggtggtggaggagcaggagtccagggtgcactacaccgtgtgcatctggcggaacggcaaggtggggctgtctggcatggccatcgcggacgtcaccctcctgagtggattccacgccctgcgtgctgacctggagaagctgacctccctctctgaccgttacgtgagtcactttgagaccgaggggccccacgtcctgctgtattttgactcggtccccacctcccgggagtgcgtgggctttgaggctgtgcaggaagtgccggtggggctggtgcagccggccagcgcaaccctgtacgactactacaaccccgagcgcagatgttctgtgttttacggggcaccaagtaagagcagactcttggccaccttgtgttctgctgaagtctgccagtgtgctgaggggaagtgccctcgccagcgtcgcgccctggagcggggtctgcaggacgaggatggctacaggatgaagtttgcctgctactacccccgtgtggagtacggcttccaggttaaggttctccgagaagacagcagagctgctttccgcctctttgagaccaagatcacccaagtcctgcacttcagtatgaagcaaaccggagaggcgggcagggctggggggagacagggaggctgaggtgtggccgaggacctgaccatctggaagtgtgaaaatccccttgggctcgtcagaagccttgggcttggccataaatagggaggcagtggcacctctccatgggggtggcgaaggtggaatgagaggatctacacagagtccccagcctgggctcaccctgcaccttctcttcccctctgaccacttttgcgcacgtcatccccgcagccaaggatgtcaaggccgctgctaatcagatgcgcaacttcctggttcgagcctcctgccgccttcgcttggaacctgggaaagaatatttgatcatgggtctggatggggccacctatgacctcgagggacagtgagtcatctggtcccctcagtctcttgtcctccccatgcctcgccacctaggccttgcccctcagaagccagatgcctgtgctctccgtttccacctgccatcctcccgagccctgctgactgcccctttgccccctgcagcccccagtacctgctggactcgaatagctggatcgaggagatgccctctgaacgcctgtgccggagcacccgccagcgggcagcctgtgcccagctcaacgacttcctccaggagtatggcactcaggggtgccaggtgtgagggctgccctcccacctccgctgggaggaacctgaacctgggaaccatgaagctggaagcactgctgtgtccgctttcatgaacacagcctgggaccagggcatattaaaggcttttggcagcaaagtgtca

SEQ ID NO: 440066 - DNA, 756 bp, Homo sapiens
gtacagatataagttgaacgtcggtacccgcatgtgctgtaggccagcgcaaccctgtacgactactacaaccccgagcgcagatgttctgtgttttacggggcaccaagtaagagcagactcttggccaccttgtgttctgctgaagtctgccagtgtgctgaggggaagtgccctcgccagcgtcgcgccctggagcggggtctgcaggacgaggatggctacaggatgaagtttgcctgctactacccccgtgtggagtacggcttccaggttaaggttctccgagaagacagcagagctgctttccgcctctttgagaccaagatcacccaagtcctgcacttcaccaaggatgtcaaggccgctgctaatcagatgcgcaacttcctggttcgagcctcctgccgccttcgcttggaacctgggaaagaatatttgatcatgggtctggatggggccacctatgacctcgagggacacccccagtacctgctggactcgaatagctggatcgaggagatgccctctgaacgcctgtgccggagcacccgccagcgggcagcctgtgcccagctcaacgacttcctccaggagtatggcactcaggggtgccaggtgtgagggctgccctcccacctccgctgggaggaacctgaacctgggaaccatgaagctggaagcactgctgtgtccgctttcatgaacacagcctgggaccagggcatattaaaggcttttggcagcaaagtgtca

SEQ ID NO: 440067 - DNA, 643 bp, Homo sapiens
gcgtttgtgtgctgtgtgctcgtgtgtgtgctgtgtgtgcgtgtgtgctgtggggaagtgccctcgccagcgtcgcgccctggagcggggtctgcaggacgaggatggctacaggatgaagtttgcctgctactacccccgtgtggagtacggcttccaggttaaggttctccgagaagacagcagagctgctttccgcctctttgagaccaagatcacccaagtcctgcacttcaccaaggatgtcaaggccgctgctaatcagatgcgcaacttcctggttcgagcctcctgccgccttcgcttggaacctgggaaagaatatttgatcatgggtctggatggggccacctatgacctcgagggacacccccagtacctgctggactcgaatagctggatcgaggagatgccctctgaacgcctgtgccggagcacccgccagcgggcagcctgtgcccagctcaacgacttcctccaggagtatggcactcaggggtgccaggtgtgagggctgccctcccacctccgctgggaggaacctgaacctgggaaccatgaagctggaagcactgctgtgtccgctttcatgaacacagcctgggaccagggcatattaaaggcttttggcagcaaagtgtca

SEQ ID NO: 440068 - DNA, 3388 bp, Homo sapiens
aggtccagagtcaactctgccccgaggcctagcttggccagaaggtagcagacagacagacggatctaacctctcttggatcctccagccatgaggctgctctgggggctgatctgggcatccagcttcttcaccttatctctgcagaagcccaggttgctcttgttctctccttctgtggttcatctgggggtccccctatcggtgggggtgcagctccaggatgtgccccgaggacaggtagtgaaaggatcagtgttcctgagaaacccatctcgtaataatgtcccctgctccccaaaggtggacttcacccttagctcagaaagagacttcgcactcctcagtctccaggtgcccttgaaagatgcgaagagctgtggcctccatcaactcctcagaggccctgaggtccagctggtggcccattcgccatggctaaaggactctctgtccagaacgacaaacatccagggtatcaacctgctcttctcctctcgccgggggcacctctttttgcagacggaccagcccatttacaaccctggccagcgggttcggtaccgggtctttgctctggatcagaagatgcgcccgagcactgacaccatcacagtcatggtggagaactctcacggcctccgcgtgcggaagaaggaggtgtacatgccctcgtccatcttccaggatgactttgtgatcccagacatctcagagccagggacctggaagatctcagcccgattctcagatggcctggaatccaacagcagcacccagtttgaggtgaagaaatatgtccttcccaactttgaggtgaagatcacccctggaaagccctacatcctgacggtgccaggccatcttgatgaaatgcagttagacatccaggccaggtacatctatgggaagccagtgcagggggtggcatatgtgcgctttgggctcctagatgaggatggtaagaagactttctttcgggggctggagagtcagaccaagctggtgaatggacagagccacatttccctctcaaaggcagagttccaggacgccctggagaagctgaatatgggcattactgacctccaggggctgcgcctctacgttgctgcagccatcattgagtatccaggtggggagatggaggaggcagagctcacatcctggtattttgtgtcatctcccttctccttggatcttagcaagaccaagcgacaccttgtgcctggggcccccttcctgctgcaggccttggtccgtgagatgtcaggctccccagcttctggcattcctgtcaaagtttctgccacggtgtcttctcctgggtctgttcctgaagtccaggacattcagcaaaacacagacgggagcggccaagtcagcattccaataattatccctcagaccatctcagagctgcagctctcagtatctgcaggctccccacatccagcgatagccaggctcactgtggcagccccaccttcaggaggccccgggtttctgtctattgagcggccggattctcgacctcctcgtgttggggacactctgaacctgaacttgcgagccgtgggcagtggggccaccttttctcattactactacatgatcctatcccgagggcagatcgtgttcatgaatcgagagcccaagaggaccctgacctcggtctcggtgtttgtggaccatcacctggcaccctccttctactttgtggccttctactaccatggagaccacccagtggccaactccctgcgagtggatgtccaggctggggcctgcgagggcaagctggagctcagcgtggacggtgccaagcagtaccggaacggggagtccgtgaagctccacttagaaaccgactccctagccctggtggcgctgggagccttggacacagctctgtatgctgcaggcagcaagtcccacaagcccctcaacatgggcaaggtctttgaagctatgaacagctatgacctcggctgtggtcctgggggtggggacagtgcccttcaggtgttccaggcagcgggcctggccttttctgatggagaccagtggaccttatccagaaagagactaagctgtcccaaggagaagacaacccggaaaaagagaaacgtgaacttccaaaaggcgattaatgagaaattgggtcagtatgcttccccgacagccaagcgctgctgccaggatggggtgacacgtctgcccatgatgcgttcctgcgagcagcgggcagcccgcgtgcagcagccggactgccgggagcccttcctgtcctgctgccaatttgctgagagtctgcgcaagaagagcagggacaagggccaggcgggcctccaacgagccctggagatcctgcaggaggaggacctgattgatgaggatgacattcccgtgcgcagcttcttcccagagaactggctctggagagtggaaacagtggaccgctttcaaatattgacactgtggctccccgactctctgaccacgtgggagatccatggcctgagcctgtccaaaaccaaaggcctatgtgtggccaccccagtccagctccgggtgttccgcgagttccacctgcacctccgcctgcccatgtctgtccgccgctttgagcagctggagctgcggcctgtcctctataactacctggataaaaacctgactgtgagcgtccacgtgtccccagtggaggggctgtgcctggctgggggcggagggctggcccagcaggtgctggtgcctgcgggctctgcccggcctgttgccttctctgtggtgcccacggcagccgccgctgtgtctctgaaggtggtggctcgagggtccttcgaattccctgtgggagatgcggtgtccaaggttctgcagattgagaaggaaggggccatccatagagaggagctggtctatgaactcaaccccttggaccaccgaggccggaccttggaaatacctggcaactctgatcccaatatgatccctgatggggactttaacagctacgtcagggttacagcctcagatccattggacactttaggctctgagggggccttgtcaccaggaggcgtggcctccctcttgaggcttcctcgaggctgtggggagcaaaccatgatctacttggctccgacactggctgcttcccgctacctggacaagacagagcagtggagcacactgcctcccgagaccaaggaccacgccgtggatctgatccagaaaggttctgggtgcaagggcaagcaggaggggggccaggaaaggacagttactggaagatggacagcccaggaggctacagagggaaagaaagggggcccctgatgaggatggggagcatggccttgggctcaaacagcagaagggt

SEQ ID NO: 440069 - DNA, 823 bp, Homo sapiens
aggtccagagtcaactctgccccgaggcctagcttggccagaaggtagcagacagacagacggatctaacctctcttggatcctccagccatgaggctgctctgggggctgatctgggcatccagcttcttcaccttatctctgcagaagcccaggttgctcttgttctctccttctgtggttcatctgggggtccccctatcggtgggggtgcagctccaggatgtgccccgaggacaggtagtgaaaggatcagtgttcctgagaaacccatctcgtaataatgtcccctgctccccaaaggtggacttcacccttagctcagaaagagacttcgcactcctcagtctccaggtgcccttgaaagatgcgaagagctgtggcctccatcaactcctcagaggccctgaggtccagctggtggcccattcgccatggctaaaggactctctgtccagaacgacaaacatccagggtatcaacctgctcttctcctctcgccgggggcacctctttttgcagacggaccagcccatttacaaccctggccagcgggttcggtaccgggtctttgctctggatcagaagatgcgcccgagcactgacaccatcacagtcatggtggagaactctcacggcctccgcgtgcggaagaaggaggtgtacatgccctcgtccatcttccaggatgactttgtgatcccagacatctcagagccagggacctggaagatctcagcccgattctcagatggcctggaatccaacagcagcacccagtttgaggtgaagaaatatggtgagagctggaaactggagggac

SEQ ID NO: 440070 - DNA, 2372 bp, Homo sapiens
  misc_feature (25)..(25): n is a, c, g, or t
  misc_feature (28)..(28): n is a, c, g, or t
  misc_feature (30)..(30): n is a, c, g, or t
tgcacgccggtttttgtccgaggcncgngncgagtccgagcgccgccatggctctgctgtccgagggcctggacgagctgcccgccgcctgcctgtcgccgtgcgggccgcccaacccgaccgagctgttcagcgagtcacggcgcctggctctggaggagctggtggcgggcggccccgaagccttcgcggccttcctgcgacgcgagcgcctggctcgtttcctgaaccccgatgaggtgcacgccattctgcgcgcggcggagaggccgggagaggagggcgcggcggcggcggcggcggccgaggactcgttcggctcctcgcacgactgctcttcgggcacctacttccccgagcagtcggacctggagccaccgctgttggagcttggctggcccgccttctaccagggcgcctaccgcggcgccacgcgtgtcgagacgcacttccagccccgcggcgctggcgaaggtggcccctacggctgcaaggacgctctgcgccagcagctccgctcggcgcgagaggtgattgcagtggtcatggacgtgttcacagacatcgacatcttcagagacctgcaagaaatatgcaggaaacagggagttgctgtgtatatccttctggaccaggctctcctctctcaatttttggatatgtgcatggatctgaaagttcatcctgaacaggaaaagttaatgacagttcggactatcacaggaaatatctactatgcaaggtcaggaactaagattattgggaaggttcacgaaaagttcacgttgattgatggcatccgcgtggcaacaggctcctacagttttacatggacggatggcaaattaaacagcagtaacttggtaattctgtctggccaagtggttgaacactttgatctggagttccgaatcctgtatgcccagtccaagcccatcagccccaaactcctgtctcacttccagagcagcaacaagtttgatcacctcaccaaccgaaaaccacagtccaaggagctcaccctgggcaacctgctgcggatgcggctggctaggctgtcaagtactcccaggaaggcggacctggacccagagatgcccgcagagggcaaggcagagcgcaagccccatgactgtgagtcctctactgttagtgaggaagactacttcagcagccacagggacgagctccagagcagaaaggccattgacgctgccactcaaacagagccaggagaggagatgccagggctgagtgtgagtgaggtgggaacacaaaccagcatcaccacagcatgtgctggtacccagactgcagtcatcaccaggatagcaagctctcaaaccacgatttggtccagatcgaccactactcagactgacatggatgagaacattctctttcctcgaggaactcaatctacagaagggtcaccagtctcaaaaatgtctgtatcgagatcttccagtttgaagtcttcctcctctgtgtcttcccaaggctctgtggcaagctccactggttctcccgcttccatcagaaccactgacttccacaatcctggctatcccaagtacctgggcaccccccacctggaactgtacttgagtgactcacttagaaacttgaacaaagagcggcaattccacttcgctggtatcaggtcccggctcaaccacatgctggctatgctgtcaaggagaacactctttactgaaaaccaccttggccttcattctggcaatttcagcagagttaatttgcttgctgttagagatgtagcactttatccttcctatcagtaactgctccgtgttcagactcctggtttcttccaggcttacagtggacatcatcagcttcctgctttaaaaaatatcttatgtccctaattgcctttcttttacctgactttgtcacctttgttgtctttgaattctttaggctgcatattattttacatgctttgttttgtcatgtatataccaggtattggttttatggtttaaacactatggatacaggggtttgttttgcacaattttaatagtcatgcactacataatgatgttttggtcaatgacagaccacgtatatgttggcagtctcataagattataatactgtatttttactataccttttctgtgtttagatacaaataccattatgttacagttgcctacagtattcagtgcagtaacatgatgtacaggtttgtagcctgttttgcatttttcttaggttgtatgctcttctgttttaaaggtttgaatcaccagcatttttgtgatcaaaatcctatttagaaaaaataaaactactttctgtttaaaaaaaaaaaaaaactgtgttcttagcattaaataaat

SEQ ID NO: 440071 - DNA, 2372 bp, Homo sapiens
  misc_feature (25)..(25): n is a, c, g, or t
  misc_feature (28)..(28): n is a, c, g, or t
  misc_feature (30)..(30): n is a, c, g, or t
  misc_feature (1734)..(1734): n is a, c, g, or t
  misc_feature (1736)..(1736): n is a, c, g, or t
  misc_feature (1740)..(1740): n is a, c, g, or t
  misc_feature (1742)..(1742): n is a, c, g, or t
  misc_feature (1783)..(1783): n is a, c, g, or t
  misc_feature (1785)..(1785): n is a, c, g, or t
  misc_feature (1796)..(1796): n is a, c, g, or t
  misc_feature (1800)..(1800): n is a, c, g, or t
  misc_feature (1806)..(1806): n is a, c, g, or t
  misc_feature (1809)..(1809): n is a, c, g, or t
  misc_feature (1811)..(1812): n is a, c, g, or t
  misc_feature (1818)..(1818): n is a, c, g, or t
  misc_feature (1820)..(1820): n is a, c, g, or t
  misc_feature (1823)..(1825): n is a, c, g, or t
  misc_feature (1830)..(1830): n is a, c, g, or t
  misc_feature (1832)..(1832): n is a, c, g, or t
  misc_feature (1834)..(1836): n is a, c, g, or t
  misc_feature (1844)..(1844): n is a, c, g, or t
  misc_feature (1849)..(1849): n is a, c, g, or t
  misc_feature (1869)..(1869): n is a, c, g, or t
  misc_feature (1880)..(1880): n is a, c, g, or t
  misc_feature (1887)..(1887): n is a, c, g, or t
  misc_feature (1895)..(1896): n is a, c, g, or t
  misc_feature (1899)..(1899): n is a, c, g, or t
  misc_feature (1901)..(1901): n is a, c, g, or t
  misc_feature (1908)..(1908): n is a, c, g, or t
  misc_feature (1910)..(1910): n is a, c, g, or t
  misc_feature (1914)..(1914): n is a, c, g, or t
  misc_feature (1918)..(1918): n is a, c, g, or t
  misc_feature (1920)..(1921): n is a, c, g, or t
  misc_feature (1923)..(1923): n is a, c, g, or t
  misc_feature (1928)..(1929): n is a, c, g, or t
  misc_feature (1931)..(1932): n is a, c, g, or t
  misc_feature (1934)..(1934): n is a, c, g, or t
  misc_feature (1937)..(1938): n is a, c, g, or t
  misc_feature (1940)..(1940): n is a, c, g, or t
  misc_feature (1944)..(1944): n is a, c, g, or t
tgcacgccggtttttgtccgaggcncgngncgagtccgagcgccgccatggctctgctgtccgagggcctggacgagctgcccgccgcctgcctgtcgccgtgcgggccgcccaacccgaccgagctgttcagcgagtcacggcgcctggctctggaggagctggtggcgggcggccccgaagccttcgcggccttcctgcgacgcgagcgcctggctcgtttcctgaaccccgatgaggtgcacgccattctgcgcgcggcggagaggccgggagaggagggcgcggcggcggcggcggcggccgaggactcgttcggctcctcgcacgactgctcttcgggcacctacttccccgagcagtcggacctggagccaccgctgttggagcttggctggcccgccttctaccagggcgcctaccgcggcgccacgcgtgtcgagacgcacttccagccccgcggcgctggcgaaggtggcccctacggctgcaaggacgctctgcgccagcagctccgctcggcgcgagaggtgattgcagtggtcatggacgtgttcacagacatcgacatcttcagagacctgcaagaaatatgcaggaaacagggagttgctgtgtatatccttctggaccaggctctcctctctcaatttttggatatgtgcatggatctgaaagttcatcctgaacaggaaaagttaatgacagttcggactatcacaggaaatatctactatgcaaggtcaggaactaagattattgggaaggttcacgaaaagttcacgttgattgatggcatccgcgtggcaacaggctcctacagttttacatggacggatggcaaattaaacagcagtaacttggtaattctgtctggccaagtggttgaacactttgatctggagttccgaatcctgtatgcccagtccaagcccatcagccccaaactcctgtctcacttccagagcagcaacaagtttgatcacctcaccaaccgaaaaccacagtccaaggagctcaccctgggcaacctgctgcggatgcggctggctaggctgtcaagtactcccaggaaggcggacctggacccagagatgcccgcagagggcaaggcagagcgcaagccccatgactgtgagtcctctactgttagtgaggaagactacttcagcagccacagggacgagctccagagcagaaaggccattgacgctgccactcaaacagagccaggagaggagatgccagggctgagtgtgagtgaggtgggaacacaaaccagcatcaccacagcatgtgctggtacccagactgcagtcatcaccaggatagcaagctctcaaaccacgatttggtccagatcgaccactactcagactgacatggatgagaacattctctttcctcgaggaactcaatctacagaagggtcaccagtctcaaaaatgtctgtatcgagatcttccagtttgaagtcttcctcctctgtgtcttcccaaggctctgtggcaagctccactggttctcccgcttccatcagaaccactgacttccacaatcctggctatcccaagtacctgggcaccccccacctggaactgtacttgagtgactcacttagaaacttgaacaaagagcggcaattccacttcgctggtatcaggtcccggctcaaccacatgctggctatgctgtcaaggagaacactctttactgaaaaccaccttggccggnantcgnanaagggcagcaaaaaaaattaacgtactgtaaaaaagataanangggaaccgacngatnagtaangantnngtggananacnnnggggngngnnnacgcgganagggnacatcaccaccccccaccanaaaaaaatatnggagcgnccaaaggnncgngnggggacngnaccngcananngnggggnncnngnaanncngtangctgcatattattttacatgctttgttttgtcatgtatataccaggtattggttttatggtttaaacactatggatacaggggtttgttttgcacaattttaatagtcatgcactacataatgatgttttggtcaatgacagaccacgtatatgttggcagtctcataagattataatactgtatttttactataccttttctgtgtttagatacaaataccattatgttacagttgcctacagtattcagtgcagtaacatgatgtacaggtttgtagcctgttttgcatttttcttaggttgtatgctcttctgttttaaaggtttgaatcaccagcatttttgtgatcaaaatcctatttagaaaaaataaaactactttctgtttaaaaaaaaaaaaaaactgtgttcttagcattaaataaat

SEQ ID NO: 440072 - DNA, 1222 bp, Homo sapiens
caggatccttagaacggagctggaactcagggacgagctccagagcagaaaggccattgacgctgccactcaaacagagccaggagaggagatgccagggctgagtgtgagtgaggtgggaacacaaaccagcatcaccacagcatgtgctggtacccagactgcagtcatcaccaggatagcaagctctcaaaccacgatttggtccagatcgaccactactcagactgacatggatgagaacattctctttcctcgaggaactcaatctacagaagggtcaccagtctcaaaaatgtctgtatcgagatcttccagtttgaagtcttcctcctctgtgtcttcccaaggctctgtggcaagctccactggttctcccgcttccatcagaaccactgacttccacaatcctggctatcccaagtacctgggcaccccccacctggaactgtacttgagtgactcacttagaaacttgaacaaagagcggcaattccacttcgctggtatcaggtcccggctcaaccacatgctggctatgctgtcaaggagaacactctttactgaaaaccaccttggccttcattctggcaatttcagcagagttaatttgcttgctgttagagatgtagcactttatccttcctatcagtaactgctccgtgttcagactcctggtttcttccaggcttacagtggacatcatcagcttcctgctttaaaaaatatcttatgtccctaattgcctttcttttacctgactttgtcacctttgttgtctttgaattctttaggctgcatattattttacatgctttgttttgtcatgtatataccaggtattggttttatggtttaaacactatggatacaggggtttgttttgcacaattttaatagtcatgcactacataatgatgttttggtcaatgacagaccacgtatatgttggcagtctcataagattataatactgtatttttactataccttttctgtgtttagatacaaataccattatgttacagttgcctacagtattcagtgcagtaacatgatgtacaggtttgtagcctgttttgcatttttcttaggttgtatgctcttctgttttaaaggtttgaatcaccagcatttttgtgatcaaaatcctatttagaaaaaataaaactactttctgtttaaaaaaaaaaaaaaactgtgttcttagcattaaataaat

SEQ ID NO: 440073 - DNA, 2333 bp, Homo sapiens
  misc_feature (25)..(25): n is a, c, g, or t
  misc_feature (28)..(28): n is a, c, g, or t
  misc_feature (30)..(30): n is a, c, g, or t
tgcacgccggtttttgtccgaggcncgngncgagtccgagcgccgccatggctctgctgtccgagggcctggacgagctgcccgccgcctgcctgtcgccgtgcgggccgcccaacccgaccgagctgttcagcgagtcacggcgcctggctctggaggagctggtggcgggcggccccgaagccttcgcggccttcctgcgacgcgagcgcctggctcgtttcctgaaccccgatgaggtgcacgccattctgcgcgcggcggagaggccgggagaggagggcgcggcggcggcggcggcggccgaggactcgttcggctcctcgcacgactgctcttcgggcacctacttccccgagcagtcggacctggagccaccgctgttggagcttggctggcccgccttctaccagggcgcctaccgcggcgccacgcgtgtcgagacgcacttccagccccgcggcgctggcgaaggtggcccctacggctgcaaggacgctctgcgccagcagctccgctcggcgcgagaggtgattgcagtggtcatggacgtgttcacagacatcgacatcttcagagacctgcaagaaatatgcaggaaacagggagttgctgtgtatatccttctggaccaggctctcctctctcaatttttggatatgtgcatggatctgaaagttcatcctgaacaggaaaagttaatgacagttcggactatcacaggaaatatctactatgcaaggtcaggaactaagattattgggaaggttcacgaaaagttcacgttgattgatggcatccgcgtggcaacaggctcctacagttttacatggacggatggcaaattaaacagcagtaacttggtaattctgtctggccaagtggttgaacactttgatctggagttccgaatcctgtatgcccagtccaagcccatcagccccaaactcctgtctcacttccagagcagcaacaagtttgatcacctcaccaaccgaaaaccacagtccaaggagctcaccctgggcaacctgctgcggatgcggctggctaggctgtcaagtactcccaggaaggcggacctggacccagagatgcccgcagagggcaaggcagagcgcaagccccatgactgtgagtcctctactgttagtgaggaagactacttcagcagccacagggacgagctccagagcagaaaggccattgacgctgccactcaaacagagccaggagaggagatgccagggctgagtgtgagtgaggtgggaacacaaaccagcatcaccacagcatgtgctggtacccagactgcagtcatcaccaggatagcaagctctcaaaccacgatttggtccagatcgaccactactcagactgacatggatgagaacattctctttcctcgaggaactcaatctacagaagggtcaccagtctcaaaaatgtctgtatcgagatcttccagtttgaagtcttcctcctctgtgtcttcccaaggctctgtggcaagctccactggttctcccgcttccatcagaaccactgacttccacaatcctggctatcccaagtacctgggcaccccccacctggaactgtacttgagtgactcacttagaaacttgaacaaagagcggcaattccacttcgctggtatcaggtcccggctcaaccacatgctggctatgctgtcaaggagaacactctttactgaaaaccaccttggccttcattctggcaatttcagcagagttaatttgcttgctgttagagatgtagcactttatccttcctatcagtaactgctccgtgttcagactcctggtttcttccaggcttacagtggacatcatcagcttcctgctttaaaaaatatcttatgtccctaattgcctttcttttacctgactttgtcacctttgttgtctttgaattctttaggctgcatattattttacatgctttgttttgtcatgtatataccaggtattggttttatggtttaaacactatggatacaggggtttgttttgcacaattttaatagtcatgcactacataatgatgttttggtcaatgacagaccacgtatatgttggcagtctcataagattataatactgtatttttactataccttttctgtgtttagatacaaataccattatgttacagttgcctacagtattcagtgcagtaacatgatgtacaggtttgtagcctgttttgcatttttcttaggttgtatgctcttctgttttaaaggtttgaatcaccagcatttttgtgatcaaaatcctatttagaaaaaataaaactactttctgttt

SEQ ID NO: 440074 - DNA, 2522 bp, Homo sapiens
  misc_feature (25)..(25): n is a, c, g, or t
  misc_feature (28)..(28): n is a, c, g, or t
  misc_feature (30)..(30): n is a, c, g, or t
tgcacgccggtttttgtccgaggcncgngncgagtccgagcgccgccatggctctgctgtccgagggcctggacgagctgcccgccgcctgcctgtcgccgtgcgggccgcccaacccgaccgagctgttcagcgagtcacggcgcctggctctggaggagctggtggcgggcggccccgaagccttcgcggccttccttgctgacctgctgatgctgccttgtgcttctggtttcacttgagcaccacctggattgatgtgttgcactggccaatattcttgctgccgctgtgctgtgactgatggccctgtggaggatgggatgggtggctgctgtgcttgtgctgtgctgtgctgtgctgtgcctgatgtgaccatctgtatctgtgcatcctctggcactgacgttgcgtctatctgtggcaccgtacttacccctgatgccacgtctgtgacccttgtgaagcacaccatgcgtagttttggatgctttgtgattggccctgcacttcttaccatgtggctgccgtacctgctgggctgccgacgctgttgtacgatggactgcgactctcgcatgaccctctgagctgggactggctgggccgaccgtgttgtggccctaccgggttgcaacggactgctcttgctgccaggcagctccgctcgggtgcgagaggtgattgcagtggtcatggacgtgttcacagacatcgacatcttcagagacctgcaagaaatatgcaggaaacagggagttgctgtgtatatccttctggaccaggctctcctctctcaatttttggatatgtgcatggatctgaaagttcatcctgaacaggaaaagttaatgacagttcggactatcacaggaaatatctactatgcaaggtcaggaactaagattattgggaaggttcacgaaaagttcacgttgattgatggcatccgcgtggcaacaggctcctacagttttacatggacggatggcaaattaaacagcagtaacttggtaattctgtctggccaagtggttgaacactttgatctggagttccgaatcctgtatgcccagtccaagcccatcagccccaaactcctgtctcacttccagagcagcaacaagtttgatcacctcaccaaccgaaaaccacagtccaaggagctcaccctgggcaacctgctgcggatgcggctggctaggctgtcaagtactcccaggaaggcggacctggacccagagatgcccgcagagggcaaggcagagcgcaagccccatgactgtgagtcctctactgttagtgaggaagactacttcagcagccacagggacgagctccagagcagaaaggccattgacgctgccactcaaacagagccaggagaggagatgccagggctgagtgtgagtgaggtgggaacacaaaccagcatcaccacagcatgtgctggtacccagactgcagtcatcaccaggatagcaagctctcaaaccacgatttggtccagatcgaccactactcagactgacatggatgagaacattctctttcctcgaggaactcaatctacagaagggtcaccagtctcaaaaatgtctgtatcgagatcttccagtttgaagtcttcctcctctgtgtcttcccaaggctctgtggcaagctccactggttctcccgcttccatcagaaccactgacttccacaatcctggctatcccaagtacctgggcaccccccacctggaactgtacttgagtgactcacttagaaacttgaacaaagagcggcaattccacttcgctggtatcaggtcccggctcaaccacatgctggctatgctgtcaaggagaacactctttactgaaaaccaccttggccttcattctggcaatttcagcagagttaatttgcttgctgttagagatgtagcactttatccttcctatcagtaactgctccgtgttcagactcctggtttcttccaggcttacagtggacatcatcagcttcctgctttaaaaaatatcttatgtccctaattgcctttcttttacctgactttgtcacctttgttgtctttgaattctttaggctgcatattattttacatgctttgttttgtcatgtatataccaggtattggttttatggtttaaacactatggatacaggggtttgttttgcacaattttaatagtcatgcactacataatgatgttttggtcaatgacagaccacgtatatgttggcagtctcataagattataatactgtatttttactataccttttctgtgtttagatacaaataccattatgttacagttgcctacagtattcagtgcagtaacatgatgtacaggtttgtagcctgttttgcatttttcttaggttgtatgctcttctgttttaaaggtttgaatcaccagcatttttgtgatcaaaatcctatttagaaaaaataaaactactttctgtttaaaaaaaaaaaaaaactgtgttcttagcattaaataaat

SEQ ID NO: 440075 - DNA, 425 bp, Homo sapiens
ccggatccaacgttggatccgaatttggatccgaattcggatccaacggccgccctttttttttcccttgctcagaaagtacctgtaatttaacaaacagactgcctgtaggtatagtgcaattacaaatgctctaatcattgtacatacatctctcttgatattgcagcatccatactggctttgtaatcattaattttttggcagattgaatgtgctgtattgatatgtatctatgtaattgtattgtatgtctatagctaattcacgttttgaataatgttattttatttacttttttaagagaggagaatgtaaatttgtcagtttatttctgactagggatattttctttccatttagaaaagaaaatatccctagtcagaaataaactgacaaatttacattctcctctcttaaaaaaa

SEQ ID NO: 440076 - DNA, 6757 bp, Homo sapiens
cggccgctcgctgcggggacaccccggtgaatgagctctcgccgccaggcgcacggcgtaggggagcctcgcaggcggcggcggcggcggcggctcggggggcgaggcgggccgcctgttcccggggaaggaggcgcgggcgtctgagcgaggccgggcgcggcggccttctctcacgcgccccccgagccagcgcccgcctcccgcgcccgcctctcttctcccgtcggcccagactatccgctcccaccgcgcccccggcccacctggtggccccggccctggccgccgcccccgcggctgtgcccgggagctcgtcccggacgcgcgaccgggcggcgggggctcggcggccaccgctgcctcaagggagcgagggcgggagggtgtgtgtgcgcggctgtgagcaggggtgccggcggggctgcagcggaggcactttggaagaatgactctggagtccatcatggcgtgctgcctgagcgaggaggccaaggaagcccggcggatcaacgacgagatcgagcggcagctccgcagggacaagcgggacgcccgccgggagctcaagctgctgctgctcgggacaggagagagtggcaagagtacgtttatcaagcagatgagaatcatccatgggtcaggatactctgatgaagataaaaggggcttcaccaagctggtgtatcagaacatcttcacggccatgcaggccatgatcagagccatggacacactcaagatcccatacaagtatgagcacaataaggctcatgcacaattagttcgagaagttgatgtggagaaggtgtctgcttttgagaatccatatgtagatgcaataaagagtttatggaatgatcctggaatccaggaatgctatgatagacgacgagaatatcaattatctgactctaccaaatactatcttaatgacttggaccgcgtagctgaccctgcctacctgcctacgcaacaagatgtgcttagagttcgagtccccaccacagggatcatcgaatacccctttgacttacaaagtgtcattttcagaatggtcgatgtagggggccaaaggtcagagagaagaaaatggatacactgctttgaaaatgtcacctctatcatgtttctagtagcgcttagtgaatatgatcaagttctcgtggagtcagacaatgagaaccgaatggaggaaagcaaggctctctttagaacaattatcacatacccctggttccagaactcctcggttattctgttcttaaacaagaaagatcttctagaggagaaaatcatgtattcccatctagtcgactacttcccagaatatgatggaccccagagagatgcccaggcagcccgagaattcattctgaagatgttcgtggacctgaacccagacagtgacaaaattatctactcccacttcacgtgcgccacagacaccgagaatatccgctttgtctttgctgccgtcaaggacaccatcctccagttgaacctgaaggagtacaatctggtctaattgtgcctcctagacacccgccctgcccttccctggtgggctattgaagatacacaagagggactgtatttctgtggaaaacaatttgcataatactaatttattgccgtcctggactctgtgtgagcgtgtccacagagtttgtagtaaatattatgattttatttaaactattcagaggaaaaacagaggatgctgaagtacagtcccagcacatttcctctctatcttttttttaggcaaaaccttgtgactcagtgtattttaaattctcagtcatgcactcacaaagataagacttgtttctttctgtctctctctctttttcttttctatggagcaaaacaaagctgatttcccttttttcttcccccgctaattcatacctccctcctgatgtttttcccaggttacaatggcctttatcctagttccattcttggtcaagtttttctctcaaatgatacagtcaggacacatcgttcgatttaagccatcatcagcttaatttaagtttgtagtttttgctgaaggattatatgtattaatacttacggttttaaatgtgttgctttggatacacacatagtttcttttttaatagaatatactgtcttgtctcactttggactgggacagtggatgcccatctaaaagttaagtgtcatttcttttagatgtttaccttcagccatagcttgattgctcagagaaatatgcagaaggcaggatcaaagacacacaggagtcctttcttttgaaatgccacgtgccattgtctttcctcccttctttgcttctttttcttaccctctctttcaattgcagatgccaaaaaagatgccaacagacactacattaccctaatggctgctacccagaacctttttataggttgttcttaatttttttgttgttgttgttcaagcttttcctttcttttttttcttagtgtttgggccacgattttaaaatgacttttattatgggtatgtgttgccaaagctggctttttgtcaaataaaatgaatacgaacttaaaaaataaaagctggtatcttaaaatgtaagagagtaagactgtgaagcctaaaatgactggctgagaatgaaccagaaatgccatttgccaaacagttgtaactagaaatttgattctcacagtccattcttttctttgtccttaagatgacattgttagtgttcacgtcccatgttcagtgtccaaaccggcaatgtaaaaagtatcctgtgtggcttaacaggaaatctgtttatgtctctttatttgaaaccagttttactctcagtggttctttaagttcaatgaagtctgccaggaacattggttggtagtattattccgacacctttaatttccaaaatctgaagttcctgctagtttaccaccttcatgatcttcttgaactggtaactgattaggttgaacttatggaagatttgtggacttaactcaaaagtaacctctcagtgttctatagaacatgtatttgtgtaactgaacctaccaggagaaatgtttggaattctatatgtgcaatttttcaacaaatgcaaaaaaaatacagcacatgtattgacaagcttctgtcaagcagcttgagttgaaatttgatttaagaaaataaatcatgattgttcaaagctgctgggacgttagaattaggccatgatactggtctcattttaactacagtggtatttggcactagtgtaaacttccatataaatcactcttttggaacaacaaagggggagggagaaaaatcacggcctgttaaatgagtaccaaagccgcccaacagtaatgagatgttctcatccttgattctcccagcctcaaacaacacagcttactttttttttcccttgctcagaaagtacctgtaatttaacaaacagactgcctgtaggtatagtgcaattacaaatgctctaatcattgtacatacatctctcttgatattgcagcatccatactggctttgtaatcattaattttttggcagattgaatgtgctgtattgatatgtatctatgtaattgtattgtatgtctatagctaattcacgttttgaataatgttattttatttacttttttaagagaggagaatgtaaatttgtcagtttatttctgactagggatattttctttccatttagaaaagaagaaaaaaaaaaaaccttactgtcatacagagcggtactagcgtcgtgctgtataaaatcatttgcacattcctgagtagaggtatactgattataagacccaaaggtaatttcatagcaaaatacataaaatcagtcggagcttttatacaaacatggaaaccaactttgtagaacttttgccatttgatctaggattggaatatgagcttttatacaattcatattcttatttggcaaatgcacagtttagtattacctctctgatggcctttactagaaaggcagttttagaagctattgtgatccactaaggaaatgttttaacagctagagaccactgcttgcctgaaagggcgttcttaaatttggtgcagcaaaaaaaaaaaaaaaaaaaaaaaaaaaattaaacaacaacatttgaaggcctacagtgtgtatagagaaaacctcatcacaagatcataagtgttacagttttagggaatcaagatattctatttaatagagctatagtaaatgtagtcaattaaacctgatctcaaagcttgaagaagctgagcaaaacagggaaagattgttatatttgtctttatgaaattgggatggaatttgctatgcagaattgaggtttgtggctttgctgttcctgtagggtgcatgacaagatcccttctcttgagaaaggaaaaaattgatcaccctagcagcagtgatgcatagaaacctaattttagccacaccagtcaatcgaagctaaaggattttcttttttgtttcttcggggttttattgaaggggctaggggcgggacgggattcttttcagttttgtataaaaacaaagtttactcatgctttatattatattgtgattgcaagcgttataagcgtgtgccactggcctcctattgttgatgcttaggtaatggaggcctgtggtgagttttatggtgacttgggcatgtcttattcaaaaacaaaaacataaaacacagaaacctttcttcagcataccaaggcaagcagccatttcatgactcacttaacacattgcagtgtaccagtttacagatgatttttccctttttgcgtgacatggcagttctaacccccagagaattccttatttgtaaattggaagtttctactatgccttacagagcttaaattcaggaagtttgtgcctcatatctggaaacaaagggaaataacacacccattcaaaagtaaataaatctcctagaagtttttgtttttaacatttccatataaagagctctgttgaatgtcatgaatagactggaaaaaaaaattttaagaacctgcatatgttgtttactagcagatgacaactacaaaaggaatctgaagaacacgtaaaacttgtatttttttttttttggtagattaactagcaggcctattttaaaaaggtaattcagctaaagggcaatttacttttttgtacttcagactatcttgattgtcaaagtgtacgaactgtaattttaaaatttatactgccacatgattgtaaattttagttgtcttaagttaggaattggtgaaaagctatttatgctggatttgggtcaaaatgacttatttgcaaaaaaataaataatgggaagaaagggctgtataatgaaatactgcaagactcacatattggttggaaatttccctcaaatcacctaccgattacccttgatttccctttgttttcagtttctcaaaacgaatgaaatgaaatatagcagaatgttaacccatataaaaataaagtgtacccaaatattgtaatgtatattgctgctcttcttcaaattaaataagggtttaaaaccacttaattggtaatcaacatctcaattgatacaaataaggtgtgcttggtatacattaatattttcttccaaagatatatctttggttagaaacacaaaaaaataaaactagtaatattgtatgtttatctatctctacatatttccagcatatgtagcgttaatagatctgtcctggtaactgtgtctttgggatttcattttggttccatcaaattaggaaaagaaatggcttagttgtatatgattagctagagatttttggagccagacacctgctgtttagtagataacttagtacagaccctaaacttgtcatttgtttttctcacagaatagccatttcctgctgtcttcccaatgatcactgccctttcaataacactcttgcctctagaatcatatgttcaaagtatgaatacacacctagcacatagtaggtgctcaaatattaatttcctccttgccttccttatctaccctgtgtcctccatttccccgtatgattccaacccaatatagcaaatgacatttacatgttatgaaaacatctattgggtaaaatcagatcttggataaagaaattctgacttttatataagcttttggtagacagaaaaaacagaaaggtattcgttggtagaacatttttaagttcaggaaagaaagctggaataatactacgtaactttgtccaggttactttgactgaaacacgtttttggtggatttcttttcctcaaagaactctctaaatgcaactccttgctggattcctcacccatcatcctgttggaaacccttactagacctatgtatttagggagttttgtcagaaaacatttttaacttgcagtatttaaaagaatatttactgttcctaaaatgtcattcaaatgcatgtactgtctattgtttggggatgggaactagttttgcaaaaaacacctaatgttgtataataatgccccaatgatcttgctggttaaaaatacagtatttttggccataattttgtactatagtattcttcattgttgagttttgcttccattaaagttgcccgagcccctctcagaatgttttgtattagtaggagtactgaaatacatctttccttccttaacacaccttgtgcatattgcattttccaaaataaacaagtttaatggtttcaaaaaaaaaaaa

SEQ ID NO: 440077 - DNA, 6703 bp, Homo sapiens
cggccgctcgctgcggggacaccccggtgaatgagctctcgccgccaggcgcacggcgtaggggagcctcgcaggcggcggcggcggcggcggctcggggggcgaggcgggccgcctgttcccggggaaggaggcgcgggcgtctgagcgaggccgggcgcggcggccttctctcacgcgccccccgagccagcgcccgcctcccgcgcccgcctctcttctcccgtcggcccagactatccgctcccaccgcgcccccggcccacctggtggccccggccctggccgccgcccccgcggctgtgcccgggagctcgtcccggacgcgcgaccgggcggcgggggctcggcggccaccgctgcctcaagggagcgagggcgggagggtgtgtgtgcgcggctgtgagcaggggtgccggcggggctgcagcggaggcactttggaagaatgactctggagtccatcatggcgtgctgcctgagcgaggaggccaaggaagcccggcggatcaacgacgagatcgagcggcagctccgcagggacaagcgggacgcccgccgggagctcaagctgctgctgctcgggacaggagagagtggcaagagtacgtttatcaagcagatgagaatcatccatgggtcaggatactctgatgaagataaaaggggcttcaccaagctggtgtatcagaacatcttcacggccatgcaggccatgatcagagccatggacacactcaagatcccatacaagtatgagcacaataaggctcatgcacaattagttcgagaagttgatgtggagaaggtgtctgcttttgagaatccatatgtagatgcaataaagagtttatggaatgatcctggaatccaggaatgctatgatagacgacgagaatatcaattatctgactctaccaaatactatcttaatgacttggaccgcgtagctgaccctgcctacctgcctacgcaacaagatgtgcttagagttcgagtccccaccacagggatcatcgaatacccctttgacttacaaagtgtcattttcagaatggtcgatgtagggggccaaaggtcagagagaagaaaatggatacactgctttgaaaatgtcacctctatcatgtttctagtagcgcttagtgaatatgatcaagttctcgtggagtcagacaatgagaaccgaatggaggaaagcaaggctctctttagaacaattatcacatacccctggttccagaactcctcggttattctgttcttaaacaagaaagatcttctagaggagaaaatcatgtattcccatctagtcgactacttcccagaatatgatggaccccagagagatgcccaggcagcccgagaattcattctgaagatgttcgtggacctgaacccagacagtgacaaaattatctactcccacttcacgtgcgccacagacaccgagaatatccgctttgtctttgctgccgtcaaggacaccatcctccagttgaacctgaaggagtacaatctggtctaattgtgcctcctagacacccgccctgcccttccctggtgggctattgaagatacacaagagggactgtatttctgtggaaaacaatttgcataatactaatttattgccgtcctggactctgtgtgagcgtgtccacagagtttgtagtaaatattatgattttatttaaactattcagaggaaaaacagaggatgctgaagtacagtcccagcacatttcctctctatcttttttttaggcaaaaccttgtgactcagtgtattttaaattctcagtcatgcactcacaaagataagacttgtttctttctgtctctctctctttttcttttctatggagcaaaacaaagctgatttcccttttttcttcccccgctaattcatacctccctcctgatgtttttcccaggttacaatggcctttatcctagttccattcttggtcaagtttttctctcaaatgatacagtcaggacacatcgttcgatttaagccatcatcagcttaatttaagtttgtagtttttgctgaaggattatatgtattaatacttacggttttaaatgtgttgctttggatacacacatagtttcttttttaatagaatatactgtcttgtctcactttggactgggacagtggatgcccatctaaaagttaagtgtcatttcttttagatgtttaccttcagccatagcttgattgctcagagaaatatgcagaaggcaggatcaaagacacacaggagtcctttcttttgaaatgccacgtgccattgtctttcctcccttctttgcttctttttcttaccctctctttcaattgcagatgccaatataggttgttcttaatttttttgttgttgttgttcaagcttttcctttcttttttttcttagtgtttgggccacgattttaaaatgacttttattatgggtatgtgttgccaaagctggctttttgtcaaataaaatgaatacgaacttaaaaaataaaagctggtatcttaaaatgtaagagagtaagactgtgaagcctaaaatgactggctgagaatgaaccagaaatgccatttgccaaacagttgtaactagaaatttgattctcacagtccattcttttctttgtccttaagatgacattgttagtgttcacgtcccatgttcagtgtccaaaccggcaatgtaaaaagtatcctgtgtggcttaacaggaaatctgtttatgtctctttatttgaaaccagttttactctcagtggttctttaagttcaatgaagtctgccaggaacattggttggtagtattattccgacacctttaatttccaaaatctgaagttcctgctagtttaccaccttcatgatcttcttgaactggtaactgattaggttgaacttatggaagatttgtggacttaactcaaaagtaacctctcagtgttctatagaacatgtatttgtgtaactgaacctaccaggagaaatgtttggaattctatatgtgcaatttttcaacaaatgcaaaaaaaatacagcacatgtattgacaagcttctgtcaagcagcttgagttgaaatttgatttaagaaaataaatcatgattgttcaaagctgctgggacgttagaattaggccatgatactggtctcattttaactacagtggtatttggcactagtgtaaacttccatataaatcactcttttggaacaacaaagggggagggagaaaaatcacggcctgttaaatgagtaccaaagccgcccaacagtaatgagatgttctcatccttgattctcccagcctcaaacaacacagcttactttttttttcccttgctcagaaagtacctgtaatttaacaaacagactgcctgtaggtatagtgcaattacaaatgctctaatcattgtacatacatctctcttgatattgcagcatccatactggctttgtaatcattaattttttggcagattgaatgtgctgtattgatatgtatctatgtaattgtattgtatgtctatagctaattcacgttttgaataatgttattttatttacttttttaagagaggagaatgtaaatttgtcagtttatttctgactagggatattttctttccatttagaaaagaagaaaaaaaaaaaaccttactgtcatacagagcggtactagcgtcgtgctgtataaaatcatttgcacattcctgagtagaggtatactgattataagacccaaaggtaatttcatagcaaaatacataaaatcagtcggagcttttatacaaacatggaaaccaactttgtagaacttttgccatttgatctaggattggaatatgagcttttatacaattcatattcttatttggcaaatgcacagtttagtattacctctctgatggcctttactagaaaggcagttttagaagctattgtgatccactaaggaaatgttttaacagctagagaccactgcttgcctgaaagggcgttcttaaatttggtgcagcaaaaaaaaaaaaaaaaaaaaaaaaaaaattaaacaacaacatttgaaggcctacagtgtgtatagagaaaacctcatcacaagatcataagtgttacagttttagggaatcaagatattctatttaatagagctatagtaaatgtagtcaattaaacctgatctcaaagcttgaagaagctgagcaaaacagggaaagattgttatatttgtctttatgaaattgggatggaatttgctatgcagaattgaggtttgtggctttgctgttcctgtagggtgcatgacaagatcccttctcttgagaaaggaaaaaattgatcaccctagcagcagtgatgcatagaaacctaattttagccacaccagtcaatcgaagctaaaggattttcttttttgtttcttcggggttttattgaaggggctaggggcgggacgggattcttttcagttttgtataaaaacaaagtttactcatgctttatattatattgtgattgcaagcgttataagcgtgtgccactggcctcctattgttgatgcttaggtaatggaggcctgtggtgagttttatggtgacttgggcatgtcttattcaaaaacaaaaacataaaacacagaaacctttcttcagcataccaaggcaagcagccatttcatgactcacttaacacattgcagtgtaccagtttacagatgatttttccctttttgcgtgacatggcagttctaacccccagagaattccttatttgtaaattggaagtttctactatgccttacagagcttaaattcaggaagtttgtgcctcatatctggaaacaaagggaaataacacacccattcaaaagtaaataaatctcctagaagtttttgtttttaacatttccatataaagagctctgttgaatgtcatgaatagactggaaaaaaaaattttaagaacctgcatatgttgtttactagcagatgacaactacaaaaggaatctgaagaacacgtaaaacttgtatttttttttttttggtagattaactagcaggcctattttaaaaaggtaattcagctaaagggcaatttacttttttgtacttcagactatcttgattgtcaaagtgtacgaactgtaattttaaaatttatactgccacatgattgtaaattttagttgtcttaagttaggaattggtgaaaagctatttatgctggatttgggtcaaaatgacttatttgcaaaaaaataaataatgggaagaaagggctgtataatgaaatactgcaagactcacatattggttggaaatttccctcaaatcacctaccgattacccttgatttccctttgttttcagtttctcaaaacgaatgaaatgaaatatagcagaatgttaacccatataaaaataaagtgtacccaaatattgtaatgtatattgctgctcttcttcaaattaaataagggtttaaaaccacttaattggtaatcaacatctcaattgatacaaataaggtgtgcttggtatacattaatattttcttccaaagatatatctttggttagaaacacaaaaaaataaaactagtaatattgtatgtttatctatctctacatatttccagcatatgtagcgttaatagatctgtcctggtaactgtgtctttgggatttcattttggttccatcaaattaggaaaagaaatggcttagttgtatatgattagctagagatttttggagccagacacctgctgtttagtagataacttagtacagaccctaaacttgtcatttgtttttctcacagaatagccatttcctgctgtcttcccaatgatcactgccctttcaataacactcttgcctctagaatcatatgttcaaagtatgaatacacacctagcacatagtaggtgctcaaatattaatttcctccttgccttccttatctaccctgtgtcctccatttccccgtatgattccaacccaatatagcaaatgacatttacatgttatgaaaacatctattgggtaaaatcagatcttggataaagaaattctgacttttatataagcttttggtagacagaaaaaacagaaaggtattcgttggtagaacatttttaagttcaggaaagaaagctggaataatactacgtaactttgtccaggttactttgactgaaacacgtttttggtggatttcttttcctcaaagaactctctaaatgcaactccttgctggattcctcacccatcatcctgttggaaacccttactagacctatgtatttagggagttttgtcagaaaacatttttaacttgcagtatttaaaagaatatttactgttcctaaaatgtcattcaaatgcatgtactgtctattgtttggggatgggaactagttttgcaaaaaacacctaatgttgtataataatgccccaatgatcttgctggttaaaaatacagtatttttggccataattttgtactatagtattcttcattgttgagttttgcttccattaaagttgcccgagcccctctcagaatgttttgtattagtaggagtactgaaatacatctttccttccttaacacaccttgtgcatattgcattttccaaaataaacaagtttaatggtttcaaaaaaaaaaaa

SEQ ID NO: 440078 - DNA, 6711 bp, Homo sapiens
cggccgctcgctgcggggacaccccggtgaatgagctctcgccgccaggcgcacggcgtaggggagcctcgcaggcggcggcggcggcggcggctcggggggcgaggcgggccgcctgttcccggggaaggaggcgcgggcgtctgagcgaggccgggcgcggcggccttctctcacgcgccccccgagccagcgcccgcctcccgcgcccgcctctcttctcccgtcggcccagactatccgctcccaccgcgcccccggcccacctggtggccccggccctggccgccgcccccgcggctgtgcccgggagctcgtcccggacgcgcgaccgggcggcgggggctcggcggccaccgctgcctcaagggagcgagggcgggagggtgtgtgtgcgcggctgtgagcaggggtgccggcggggctgcagcggaggcactttggaagaatgactctggagtccatcatggcgtgctgcctgagcgaggaggccaaggaagcccggcggatcaacgacgagatcgagcggcagctccgcagggacaagcgggacgcccgccgggagctcaagctgctgctgctcgggacaggagagagtggcaagagtacgtttatcaagcagatgagaatcatccatgggtcaggatactctgatgaagataaaaggggcttcaccaagctggtgtatcagaacatcttcacggccatgcaggccatgatcagagccatggacacactcaagatcccatacaagtatgagcacaataaggctcatgcacaattagttcgagaagttgatgtggagaaggtgtctgcttttgagaatccatatgtagatgcaataaagagtttatggaatgatcctggaatccaggaatgctatgatagacgacgagaatatcaattatctgactctaccaaatactatcttaatgacttggaccgcgtagctgaccctgcctacctgcctacgcaacaagatgtgcttagagttcgagtccccaccacagggatcatcgaatacccctttgacttacaaagtgtcattttcagaatggtcgatgtagggggccaaaggtcagagagaagaaaatggatacactgctttgaaaatgtcacctctatcatgtttctagtagcgcttagtgaatatgatcaagttctcgtggagtcagacaatgagaaccgaatggaggaaagcaaggctctctttagaacaattatcacatacccctggttccagaactcctcggttattctgttcttaaacaagaaagatcttctagaggagaaaatcatgtattcccatctagtcgactacttcccagaatatgatggaccccagagagatgcccaggcagcccgagaattcattctgaagatgttcgtggacctgaacccagacagtgacaaaattatctactcccacttcacgtgcgccacagacaccgagaatatccgctttgtctttgctgccgtcaaggacaccatcctccagttgaacctgaaggagtacaatctggtctaattgtgcctcctagacacccgccctgcccttccctggtgggctattgaagatacacaagagggactgtatttctgtggaaaacaatttgcataatactaatttattgccgtcctggatatttaaactattcagaggaaaaacagaggatgctgaagtacagtcccagcacatttcctctctatcttttttttaggcaaaaccttgtgactcagtgtattttaaattctcagtcatgcactcacaaagataagacttgtttctttctgtctctctctctttttcttttctatggagcaaaacaaagctgatttcccttttttcttcccccgctaattcatacctccctcctgatgtttttcccaggttacaatggcctttatcctagttccattcttggtcaagtttttctctcaaatgatacagtcaggacacatcgttcgatttaagccatcatcagcttaatttaagtttgtagtttttgctgaaggattatatgtattaatacttacggttttaaatgtgttgctttggatacacacatagtttcttttttaatagaatatactgtcttgtctcactttggactgggacagtggatgcccatctaaaagttaagtgtcatttcttttagatgtttaccttcagccatagcttgattgctcagagaaatatgcagaaggcaggatcaaagacacacaggagtcctttcttttgaaatgccacgtgccattgtctttcctcccttctttgcttctttttcttaccctctctttcaattgcagatgccaaaaaagatgccaacagacactacattaccctaatggctgctacccagaacctttttataggttgttcttaatttttttgttgttgttgttcaagcttttcctttcttttttttcttagtgtttgggccacgattttaaaatgacttttattatgggtatgtgttgccaaagctggctttttgtcaaataaaatgaatacgaacttaaaaaataaaagctggtatcttaaaatgtaagagagtaagactgtgaagcctaaaatgactggctgagaatgaaccagaaatgccatttgccaaacagttgtaactagaaatttgattctcacagtccattcttttctttgtccttaagatgacattgttagtgttcacgtcccatgttcagtgtccaaaccggcaatgtaaaaagtatcctgtgtggcttaacaggaaatctgtttatgtctctttatttgaaaccagttttactctcagtggttctttaagttcaatgaagtctgccaggaacattggttggtagtattattccgacacctttaatttccaaaatctgaagttcctgctagtttaccaccttcatgatcttcttgaactggtaactgattaggttgaacttatggaagatttgtggacttaactcaaaagtaacctctcagtgttctatagaacatgtatttgtgtaactgaacctaccaggagaaatgtttggaattctatatgtgcaatttttcaacaaatgcaaaaaaaatacagcacatgtattgacaagcttctgtcaagcagcttgagttgaaatttgatttaagaaaataaatcatgattgttcaaagctgctgggacgttagaattaggccatgatactggtctcattttaactacagtggtatttggcactagtgtaaacttccatataaatcactcttttggaacaacaaagggggagggagaaaaatcacggcctgttaaatgagtaccaaagccgcccaacagtaatgagatgttctcatccttgattctcccagcctcaaacaacacagcttactttttttttcccttgctcagaaagtacctgtaatttaacaaacagactgcctgtaggtatagtgcaattacaaatgctctaatcattgtacatacatctctcttgatattgcagcatccatactggctttgtaatcattaattttttggcagattgaatgtgctgtattgatatgtatctatgtaattgtattgtatgtctatagctaattcacgttttgaataatgttattttatttacttttttaagagaggagaatgtaaatttgtcagtttatttctgactagggatattttctttccatttagaaaagaagaaaaaaaaaaaaccttactgtcatacagagcggtactagcgtcgtgctgtataaaatcatttgcacattcctgagtagaggtatactgattataagacccaaaggtaatttcatagcaaaatacataaaatcagtcggagcttttatacaaacatggaaaccaactttgtagaacttttgccatttgatctaggattggaatatgagcttttatacaattcatattcttatttggcaaatgcacagtttagtattacctctctgatggcctttactagaaaggcagttttagaagctattgtgatccactaaggaaatgttttaacagctagagaccactgcttgcctgaaagggcgttcttaaatttggtgcagcaaaaaaaaaaaaaaaaaaaaaaaaaaaattaaacaacaacatttgaaggcctacagtgtgtatagagaaaacctcatcacaagatcataagtgttacagttttagggaatcaagatattctatttaatagagctatagtaaatgtagtcaattaaacctgatctcaaagcttgaagaagctgagcaaaacagggaaagattgttatatttgtctttatgaaattgggatggaatttgctatgcagaattgaggtttgtggctttgctgttcctgtagggtgcatgacaagatcccttctcttgagaaaggaaaaaattgatcaccctagcagcagtgatgcatagaaacctaattttagccacaccagtcaatcgaagctaaaggattttcttttttgtttcttcggggttttattgaaggggctaggggcgggacgggattcttttcagttttgtataaaaacaaagtttactcatgctttatattatattgtgattgcaagcgttataagcgtgtgccactggcctcctattgttgatgcttaggtaatggaggcctgtggtgagttttatggtgacttgggcatgtcttattcaaaaacaaaaacataaaacacagaaacctttcttcagcataccaaggcaagcagccatttcatgactcacttaacacattgcagtgtaccagtttacagatgatttttccctttttgcgtgacatggcagttctaacccccagagaattccttatttgtaaattggaagtttctactatgccttacagagcttaaattcaggaagtttgtgcctcatatctggaaacaaagggaaataacacacccattcaaaagtaaataaatctcctagaagtttttgtttttaacatttccatataaagagctctgttgaatgtcatgaatagactggaaaaaaaaattttaagaacctgcatatgttgtttactagcagatgacaactacaaaaggaatctgaagaacacgtaaaacttgtatttttttttttttggtagattaactagcaggcctattttaaaaaggtaattcagctaaagggcaatttacttttttgtacttcagactatcttgattgtcaaagtgtacgaactgtaattttaaaatttatactgccacatgattgtaaattttagttgtcttaagttaggaattggtgaaaagctatttatgctggatttgggtcaaaatgacttatttgcaaaaaaataaataatgggaagaaagggctgtataatgaaatactgcaagactcacatattggttggaaatttccctcaaatcacctaccgattacccttgatttccctttgttttcagtttctcaaaacgaatgaaatgaaatatagcagaatgttaacccatataaaaataaagtgtacccaaatattgtaatgtatattgctgctcttcttcaaattaaataagggtttaaaaccacttaattggtaatcaacatctcaattgatacaaataaggtgtgcttggtatacattaatattttcttccaaagatatatctttggttagaaacacaaaaaaataaaactagtaatattgtatgtttatctatctctacatatttccagcatatgtagcgttaatagatctgtcctggtaactgtgtctttgggatttcattttggttccatcaaattaggaaaagaaatggcttagttgtatatgattagctagagatttttggagccagacacctgctgtttagtagataacttagtacagaccctaaacttgtcatttgtttttctcacagaatagccatttcctgctgtcttcccaatgatcactgccctttcaataacactcttgcctctagaatcatatgttcaaagtatgaatacacacctagcacatagtaggtgctcaaatattaatttcctccttgccttccttatctaccctgtgtcctccatttccccgtatgattccaacccaatatagcaaatgacatttacatgttatgaaaacatctattgggtaaaatcagatcttggataaagaaattctgacttttatataagcttttggtagacagaaaaaacagaaaggtattcgttggtagaacatttttaagttcaggaaagaaagctggaataatactacgtaactttgtccaggttactttgactgaaacacgtttttggtggatttcttttcctcaaagaactctctaaatgcaactccttgctggattcctcacccatcatcctgttggaaacccttactagacctatgtatttagggagttttgtcagaaaacatttttaacttgcagtatttaaaagaatatttactgttcctaaaatgtcattcaaatgcatgtactgtctattgtttggggatgggaactagttttgcaaaaaacacctaatgttgtataataatgccccaatgatcttgctggttaaaaatacagtatttttggccataattttgtactatagtattcttcattgttgagttttgcttccattaaagttgcccgagcccctctcagaatgttttgtattagtaggagtactgaaatacatctttccttccttaacacaccttgtgcatattgcattttccaaaataaacaagtttaatggtttcaaaaaaaaaaaa

SEQ ID NO: 440079 - DNA, 6720 bp, Homo sapiens
cggccgctcgctgcggggacaccccggtgaatgagctctcgccgccaggcgcacggcgtaggggagcctcgcaggcggcggcggcggcggcggctcggggggcgaggcgggccgcctgttcccggggaaggaggcgcgggcgtctgagcgaggccgggcgcggcggccttctctcacgcgccccccgagccagcgcccgcctcccgcgcccgcctctcttctcccgtcggcccagactatccgctcccaccgcgcccccggcccacctggtggccccggccctggccgccgcccccgcggctgtgcccgggagctcgtcccggacgcgcgaccgggcggcgggggctcggcggccaccgctgcctcaagggagcgagggcgggagggtgtgtgtgcgcggctgtgagcaggggtgccggcggggctgcagcggaggcactttggaagaatgactctggagtccatcatggcgtgctgcctgagcgaggaggccaaggaagcccggcggatcaacgacgagatcgagcggcagctccgcagggacaagcgggacgcccgccgggagctcaagctgctgctgctcgggacaggagagagtggcaagagtacgtttatcaagcagatgagaatcatccatgggtcaggatactctgatgaagataaaaggggcttcaccaagctggtgtatcagaacatcttcacggccatgcaggccatgatcagagccatggacacactcaagatcccatacaagtatgagcacaataaggctcatgcacaattagttcgagaagttgatgtggagaaggtgtctgcttttgagaatccatatgtagatgcaataaagagtttatggaatgatcctggaatccaggaatgctatgatagacgacgagaatatcaattatctgactctaccaaatactatcttaatgacttggaccgcgtagctgaccctgcctacctgcctacgcaacaagatgtgcttagagttcgagtccccaccacagggatcatcgaatacccctttgacttacaaagtgtcattttcagaatggtcgatgtagggggccaaaggtcagagagaagaaaatggatacactgctttgaaaatgtcacctctatcatgtttctagtagcgcttagtgaatatgatcaagttctcgtggagtcagacaatgagaaccgaatggaggaaagcaaggctctctttagaacaattatcacatacccctggttccagaactcctcggttattctgttcttaaacaagaaagatcttctagaggagaaaatcatgtattcccatctagtcgactacttcccagaatatgatggaccccagagagatgcccaggcagcccgagaattcattctgaagatgttcgtggacctgaacccagacagtgacaaaattatctactcccacttcacgtgcgccacagacaccgagaatatccgctttgtctttgctgccgtcaaggacaccatcctccagttgaacctgaaggagtacaatctggtctaattgtgcctcctagacacccgccctgcccttccctggtgggctattgaagatacacaagagggactgtatttctgtggaaaacaatttgcataatactaatttattgccgtcctggactctgtgtgagcgtgtccacagagtttgtagtaaatattatgattttatttaaactattcagaggaaaaacagaggatgctgaagtacagtcccagcacatttcctctctatcttttttttaggcaaaaccttgtgactcagtgtattttaaattctcagtcatgcactcacaaagataagacttgtttctttctgtctctctctctttttcttttctatggagcaaaacaaagctgatttcgatgtttttcccaggttacaatggcctttatcctagttccattcttggtcaagtttttctctcaaatgatacagtcaggacacatcgttcgatttaagccatcatcagcttaatttaagtttgtagtttttgctgaaggattatatgtattaatacttacggttttaaatgtgttgctttggatacacacatagtttcttttttaatagaatatactgtcttgtctcactttggactgggacagtggatgcccatctaaaagttaagtgtcatttcttttagatgtttaccttcagccatagcttgattgctcagagaaatatgcagaaggcaggatcaaagacacacaggagtcctttcttttgaaatgccacgtgccattgtctttcctcccttctttgcttctttttcttaccctctctttcaattgcagatgccaaaaaagatgccaacagacactacattaccctaatggctgctacccagaacctttttataggttgttcttaatttttttgttgttgttgttcaagcttttcctttcttttttttcttagtgtttgggccacgattttaaaatgacttttattatgggtatgtgttgccaaagctggctttttgtcaaataaaatgaatacgaacttaaaaaataaaagctggtatcttaaaatgtaagagagtaagactgtgaagcctaaaatgactggctgagaatgaaccagaaatgccatttgccaaacagttgtaactagaaatttgattctcacagtccattcttttctttgtccttaagatgacattgttagtgttcacgtcccatgttcagtgtccaaaccggcaatgtaaaaagtatcctgtgtggcttaacaggaaatctgtttatgtctctttatttgaaaccagttttactctcagtggttctttaagttcaatgaagtctgccaggaacattggttggtagtattattccgacacctttaatttccaaaatctgaagttcctgctagtttaccaccttcatgatcttcttgaactggtaactgattaggttgaacttatggaagatttgtggacttaactcaaaagtaacctctcagtgttctatagaacatgtatttgtgtaactgaacctaccaggagaaatgtttggaattctatatgtgcaatttttcaacaaatgcaaaaaaaatacagcacatgtattgacaagcttctgtcaagcagcttgagttgaaatttgatttaagaaaataaatcatgattgttcaaagctgctgggacgttagaattaggccatgatactggtctcattttaactacagtggtatttggcactagtgtaaacttccatataaatcactcttttggaacaacaaagggggagggagaaaaatcacggcctgttaaatgagtaccaaagccgcccaacagtaatgagatgttctcatccttgattctcccagcctcaaacaacacagcttactttttttttcccttgctcagaaagtacctgtaatttaacaaacagactgcctgtaggtatagtgcaattacaaatgctctaatcattgtacatacatctctcttgatattgcagcatccatactggctttgtaatcattaattttttggcagattgaatgtgctgtattgatatgtatctatgtaattgtattgtatgtctatagctaattcacgttttgaataatgttattttatttacttttttaagagaggagaatgtaaatttgtcagtttatttctgactagggatattttctttccatttagaaaagaagaaaaaaaaaaaaccttactgtcatacagagcggtactagcgtcgtgctgtataaaatcatttgcacattcctgagtagaggtatactgattataagacccaaaggtaatttcatagcaaaatacataaaatcagtcggagcttttatacaaacatggaaaccaactttgtagaacttttgccatttgatctaggattggaatatgagcttttatacaattcatattcttatttggcaaatgcacagtttagtattacctctctgatggcctttactagaaaggcagttttagaagctattgtgatccactaaggaaatgttttaacagctagagaccactgcttgcctgaaagggcgttcttaaatttggtgcagcaaaaaaaaaaaaaaaaaaaaaaaaaaaattaaacaacaacatttgaaggcctacagtgtgtatagagaaaacctcatcacaagatcataagtgttacagttttagggaatcaagatattctatttaatagagctatagtaaatgtagtcaattaaacctgatctcaaagcttgaagaagctgagcaaaacagggaaagattgttatatttgtctttatgaaattgggatggaatttgctatgcagaattgaggtttgtggctttgctgttcctgtagggtgcatgacaagatcccttctcttgagaaaggaaaaaattgatcaccctagcagcagtgatgcatagaaacctaattttagccacaccagtcaatcgaagctaaaggattttcttttttgtttcttcggggttttattgaaggggctaggggcgggacgggattcttttcagttttgtataaaaacaaagtttactcatgctttatattatattgtgattgcaagcgttataagcgtgtgccactggcctcctattgttgatgcttaggtaatggaggcctgtggtgagttttatggtgacttgggcatgtcttattcaaaaacaaaaacataaaacacagaaacctttcttcagcataccaaggcaagcagccatttcatgactcacttaacacattgcagtgtaccagtttacagatgatttttccctttttgcgtgacatggcagttctaacccccagagaattccttatttgtaaattggaagtttctactatgccttacagagcttaaattcaggaagtttgtgcctcatatctggaaacaaagggaaataacacacccattcaaaagtaaataaatctcctagaagtttttgtttttaacatttccatataaagagctctgttgaatgtcatgaatagactggaaaaaaaaattttaagaacctgcatatgttgtttactagcagatgacaactacaaaaggaatctgaagaacacgtaaaacttgtatttttttttttttggtagattaactagcaggcctattttaaaaaggtaattcagctaaagggcaatttacttttttgtacttcagactatcttgattgtcaaagtgtacgaactgtaattttaaaatttatactgccacatgattgtaaattttagttgtcttaagttaggaattggtgaaaagctatttatgctggatttgggtcaaaatgacttatttgcaaaaaaataaataatgggaagaaagggctgtataatgaaatactgcaagactcacatattggttggaaatttccctcaaatcacctaccgattacccttgatttccctttgttttcagtttctcaaaacgaatgaaatgaaatatagcagaatgttaacccatataaaaataaagtgtacccaaatattgtaatgtatattgctgctcttcttcaaattaaataagggtttaaaaccacttaattggtaatcaacatctcaattgatacaaataaggtgtgcttggtatacattaatattttcttccaaagatatatctttggttagaaacacaaaaaaataaaactagtaatattgtatgtttatctatctctacatatttccagcatatgtagcgttaatagatctgtcctggtaactgtgtctttgggatttcattttggttccatcaaattaggaaaagaaatggcttagttgtatatgattagctagagatttttggagccagacacctgctgtttagtagataacttagtacagaccctaaacttgtcatttgtttttctcacagaatagccatttcctgctgtcttcccaatgatcactgccctttcaataacactcttgcctctagaatcatatgttcaaagtatgaatacacacctagcacatagtaggtgctcaaatattaatttcctccttgccttccttatctaccctgtgtcctccatttccccgtatgattccaacccaatatagcaaatgacatttacatgttatgaaaacatctattgggtaaaatcagatcttggataaagaaattctgacttttatataagcttttggtagacagaaaaaacagaaaggtattcgttggtagaacatttttaagttcaggaaagaaagctggaataatactacgtaactttgtccaggttactttgactgaaacacgtttttggtggatttcttttcctcaaagaactctctaaatgcaactccttgctggattcctcacccatcatcctgttggaaacccttactagacctatgtatttagggagttttgtcagaaaacatttttaacttgcagtatttaaaagaatatttactgttcctaaaatgtcattcaaatgcatgtactgtctattgtttggggatgggaactagttttgcaaaaaacacctaatgttgtataataatgccccaatgatcttgctggttaaaaatacagtatttttggccataattttgtactatagtattcttcattgttgagttttgcttccattaaagttgcccgagcccctctcagaatgttttgtattagtaggagtactgaaatacatctttccttccttaacacaccttgtgcatattgcattttccaaaataaacaagtttaatggtttcaaaaaaaaaaaa
